United States Patent Application Publication US 2014/0057251 A1 - sequence listing, part 122

SEQ ID NO: 224432 - DNA, 2567 bp, Cannabis indica
ctgtaactggacaagataagagagagtgctcaatggtttcaggagccctagtacagacaagttttaattgtaacataaagttactaaattttttatatacagatatacatatagatttgcatttcaaagcaaaaatataattatatttatatatatatatatattattttattgtgttgttgctcaaatgaaacaaaaagaataataacaaacataagatttcagcttttttttttttttttttttgaaaaaagagcgaattaatatgatcagcccaaacctcaaatgagctaattaatgttcttcgactcttcttctttaaaaaaaaaacttgaatggagtttgaagcagttgtacactcatgacctccaccattccatttttccatttctatgaacaaccaatatatataaaagcttcacgcaaacacatatctataaatatatattataaacttgcgtgaactctgaattgcagagtttagatgaagcagagaaaggagcagaggaaggaagatggagaagatagaatgaatgaatggaaaaagaagctcaatcaaagattggcttagtcattgcattatatagcagcttgagtacaagatacaattaacagaaacatcataacagacttgtaacagacctaaccaactaacaatcagttattaactaactttgtaacaaccattgtatcaggttctctaatatccccctcaagtgacactggtctaaaccaagtgttaacttgtcatacaaaaattgaaaagatgtagttggaagtggcttagtaaataggtctgctaattggtattcggaggcaacataacgaacatcaagctgttgagcaatgactctatctcggacaaagtgaatgtcaacttcgatgtgcttcgttctagcatggaaaaccgggttggaagccaaggatcctgcccccatattgtcgcaccaaaggatggggcattgagggagagaaatgcttaattctgtcagaagggactgcagccagatgagctcagatgtggccaaggctaaagctcgatattcagattctgtacttgagcgagcaacaacagtttgctttttcgaacaccagctgatcaagtttcctccgagaaagatacaatatccagaagtggatttgcggtcatcatgacaccccgcccaatcagcatccgtaaagccttggagataaaaaattgttgctggtttgaagagtaatccaacatctgttgtaccaacaagatatcgtaatattcgtttacaagctgcccaatgttcagaggtaggggactgcataaattggctcaatctgttgacagcaaaggcaatgtcaggccttgtcattgtgaggtattggagagcaccgatgacactcctatacactgttggattggtcataggggttcctgatgcagcagtgagtttggtagtggcacacattggggtcggttggggcttggagtcaagaagctgagtcttggatagaaggtcacgaatgtatttttgctgtgttaaatgtatagcagtggcagttctttttacttcaaatccaaggaagtattgaacaaggccaaggtgtttaagagcaaaaactttgttgaaattagtgatcaagctttggacatgtgaggagtcggctcctgtgatgagaatatcatcaacgtagaccaagattagtatcaagtggccatttatggtagtaaagaaaaggcttgaatcggctttgctattcttgtaaccccactgaagtaatttatcttttagagtgtcaaaccaagcccgaggggcttgttttaaaccatatattgctttgtgcaatttgcatacatggtttagatattcggtgctaacaaatccttgcggttgagccatgtatacatcctcttgaagatctccatttagaaaggcattattgatgtctatttgttgaatgtcccaaccataagtgacagccatagtgaacatgatgcgtatagtgcatggctttataacaggactgtaagtctcaaagaaatcaatacctggtgtttgttgaaaaccttttgcaactaatcttgccttgagtctttccacagaaccatcagcattatattttattcggtacacccatttgttttgaatcacaaccatgtcacttgtacgaggcaccaaagtccatgttttctttctttttgaagcaacaatttcatgacccatggcagcattccattttggatttgcaagggcagccttgagagtagtaggttcttgttcttgagtggtgtaggcagcaaaggtttttggtttaaaaactcaagtttggaccgggttatcataggatgttggttgtgagttggagcaggtaaaccagtggttgatgtggggtctgtggtactggtttggggaatatgagagatgggggaagtgcggatggcagcagtgttgttgggagagggctgggatgttggagattgaggtgtaggctctaaatgagtaactgggggtgttagagtaggttggacagtgggaactctaaaggcattactgtctataattggggaaggagtgctgttggtgtggtgaaca

SEQ ID NO: 224433 - DNA, 2020 bp, Cannabis indica
cttaacatgaagaacatcaaaccttgtccaacacccatggttggaggaaaacctctatctctccatgatggggctgtacttgaaaatccctccaattataggagcatcataggagctatgtagtaccttactgatacgaggccagatatagcctttgcagtaaaaacgttgagccagtttctcaaagccgctactacaactcacttgagtgcagccaagagagtgttttgattcttaaaggcacaatacactatgcaattcacattcagtaaagtgatcgacttgggattgtaggttactcagacgcagattgagtctgctgccctcatgatagaaaatccataggcggatattgtatgtattttggagaagcactcatctcacggtccttcaaaaagcagtttgttgtctccaagtctagcacaaagtcgaaatacaaggcccatgctcatgttatcgctaaaatcatttggatttagtcactggttagtgaaattaataaattttctctgtcttatactcccatagtgtggtgtgataacatgagtgcaagctcacttgttataaatctagtctatcatgcaaggacataagcatgtagatgatattcattttgttcaaggtaaagtaattcataagtaaattaattttagatacatacccttttggtctgaccaagtagctgattactttacaaaaggcctttcccattcttggtttcaattcttagttgacaagctcggtgtgatctcttcaccctttcgcttgagggatggtgttaagaactgattgaacaatgtaagtaggctgctaattcttttcgttaaaggtagtgtgctggtgcacacactactgagaaaattatgttatagcctttttgcttgaattggttgcattgtggtcccatcttgtaggccttgccatctgttccctacttttgttctgtattgtaatccttcattatataatgaattgttctttcttagcctccttttgagttgagttttctctattggggcgtttggcactttccaaactcaatcataaaaatttgactcattccaagagcttatactaactgctgagcgattctaacaagctcgagaataagaaaaacctatccatgcatgaaaagtcgtttcttcataaaaattgcaccttggacatgctctactaataattagtatatgtttaaaattaaggacaagtgggaattaaacgttgttaataagtatatttctacttgttcaacgttattcctcgaagtaaatacgataatttaaaataattaaagatgttatttactactcaaatatttctagaagaaactagaaacaacaagaagatgaaatatgacacacaattaaagtgcaagaaatctatatatcatgtatgaaattgaataatagtagtcacgtaggcctgtagaacgaacatgcttatagtcaaggtaaaattatatttaactattgaatagaatatgaattgtacacatattttaattgcaaatttattgtatatttagaatatttaaatatcattccccctcaagataatgaatagatataaaattcaatttcaaagaatataaattttacatatattagtaatgccagaagttatttcattatttcttgaaatcaatgatttcaaactattgttgttataagatatttatatatatatatatttcaagagaatacacattggtgtctaacatattcaatcaattgtgtcaatcttgcagacttattcacaaagttattactaacattaataattgagaaggcgacatacaagattgaaatttattgattaaaagatcttcacgaatgcttaaataaggagaagttaattcatactacactctttttttttaccaaggttttttagcaagatttttaatgagttagtttttatagacatccaaggagtgcgttatgaaatattatatatgaatgtctaaattatcaaattaattatatatcaccattaatgtttgattgtattttcttttatt

SEQ ID NO: 224434 - DNA, 1597 bp, Cannabis indica
gagactacttcaaggactacataaatcatattgaagttgccccattccatttgactcccatctcctacagtattctcgctagtttgaaagtcttatacaaaattctgaattgggggtgtcccacaccattagagattgagtatctttactcagttaaggctgttccgtcaaggaagaacaccgctggggcctttttctatgtcggtaatcattctagcgagcctaaaattattgtagacttgccaaataaagtatccttcaagaacaacttcttctggatgtatagtctttcccccatcgacacaaccacattttgcaaacttcgtaattgattgttctcttcttgctcatttacatcaatctttgtttttcaaaattatgaccaatgttttgtttgttttgacagccctcttaccgagtcctactcctacgctcgagatggtcagtaggcatagcgcttgataactcttccctacgatctttggtcatgcaatttccttttaagtgaggccaacctgcgatcggcaagccttctcgctgataaggaatatacttgtgattacaagattcgcaagtattttttcttggcagcaaattattgtgtcgaccgaggaccaggcctgggatcgcttggctcaagcacaataccttcaaaacactgcccctcgagaatccagtgaaggagcatcctgaggtaatcaatgtggttggtctcctactgtacttagggctgaacgtaatacattagtcacattccaagactcccgccttaatttttatatttggaattcccttctcgtggaccacattgctcataagtttgacagctggtatcctagattccacgtccaggttaactgtcacgagtcatattatggtatagctgagcaatacggtactatggaagatagggcaggtcacatagaagcgaggtgggatttagaaccaatcaagacttttgatatatcaagattacaggctgtagggattttagtggatattatggtccctctaccccttcatttagtgatagctcgccttctagtgattttggtaaattccttaggtcgaaaattatattcctccctttttcatcgtcctttttactaattgtaacacttttccttgttttgcaaacctgggttatgaagatatcatggattggaaggggaagaataggtcaacccaccttggggtccctacagctgctgaagtggttcctcccaagaggcaaaagaaaaccactgcccttaagaagaaatcactggctgacccatcgatctcgaggtctctgacaatgatatcaaagaacaagttcctcctccagccgctttcgacgccaatgttcctcgtctcgaggcaacccctgctactacttcttcgagcaaggccattgagaccttgtccgccgcagtaggagaggtcgggtctgaatttgcccaagcatatggagttgcctgctggcgtaaacttcaaactcttcttccccctgattgggattttctcaatcttagaagcccaaaagagatgctatcaaggagcttggactattacttctgttagaatttattttacctggatcttagatctactcaca

SEQ ID NO: 224435 - DNA, 4158 bp, Cannabis indica
tacttgcaaaatttggctgcatctctcttatgtctcgcgtggctcatgggctcaagtttacaaaatgcaaccctaagctcatgtgcgagatagatgtcttcacgagtttcattaagcttagtgtaaatggtgtagattggcacattcttatcgtgcttcttgtgctttttcttgtccttggatgactccttagagttatccttcctctttgaactagaggcttctgaattatcagccatagtcgagacggtacttgatgagacattgctgggtttgtttcccaagccaaactgcaacaacttcatctcctttcttgcttcttcttttcaaacaaatacttcagccctttcattgaactcggtaatgttttttactaggcgaccctgtagatcatcccatatctcgcctccagcagtggagagatcagtagtgatccttgcttgagagcagtaagtggggtactatcatctaggttcctctccctcgcagcagctctgctaaaacgacttaagtaggccttaagcgtcttgcccgaccattgctctatgttggtgagtgaggacatttcgggtcgcctatcccttacggcctaaaactggtttttgaagtccttagacaactgttcccaagaagtgattgaatgatgagtaaatttattgaaccagttgctcgctgctccaacaagcaaggtggggaacaaaatatagcgtagattgttcgtaacattgcgggctcacattatagtattgaaattattcaaatgtgagactgaatctgtggtctcatcatatgacgagacgtgagggtttttaaacccctgggggaatggagtattcatgatgtctggatagaatggctcgagttcttcatccgagtcatatccagactgctttccttgttcccatacttgataccccctgaatttatcttccaactcatctattcctaattggataggatcctcttgctttacaccgagttgttggcaaagattatgttttttctggttcaagtgattgcgtagatcaggttggttataacttctagtggacctcgtcctactcattgacctcgtccttctcccaaaccttgtccttgagtaactttcggttttacttgtgcctgtactctcttgatcattattgcgacgagtactttctcttcctcgcgttgatcgacaatgggtcctgtccttctcccttgggtgtggttcgttgtgtgccccctactggggtttgtacgtgccccttccctaatgatttgagaaggacgttggcgatggctcgttggtgacccacgtgtccacgagggatttcctgttccctagtttctgtttgccttctgttctcatttcggtgagaaggctctagttgatcatttggttgttcgctctcagggggaccctcagttttgccaggttgttcttcctgagcgttttgagaattctcctgagcgtctcctgcctcttggttcgtgagccacgaggtctgcctcatggtcttctcattccaaggtccgattaattttatgcattgttctcctgtgctaccctggccgctgctgtccagttccaactcagaatttcatcagtttgcctcctccaggcggcgcctgagatggcagttctccaactcagtaattggcacatatcttgtaggatcataagcgccatcattatcatgtacagtaggttgagggcctccaagatcgggttcttcatcccctacctctagattttggccattctcatgctaagttcttctcaatcatgtggaccgtgtactggggccaccttcaggttgggtcctccttcaggttgggtcctcctagaacgagtggatcctgtgcttgggccaccttcaggttgagtcctcctaaaatgagtggtctgtgtagatcgcgagttgggaggcctccgggagcccattggctcttttcaggcacgatgttgggtggtgtcttcaggaggagtatccacattttctccgttgtcagtcatagagaaagttttttttatcaggatggttttttctgagcttttttttatgaaggctctcaatgaaagcaccaaactgttaacgcagatttttgttaactaaattaaagcctattttgtgatgaatttgcacagaaataatagtagtaaaaggaaaagcaataacataaaggtttttttttacgtagttttgcagttaaaattctgcatagtccacgagtctatcctattagatttttgatacaaaactagggctttttctctaaagaattttccgtcccttttttaatgtatcttgctcctatttatagttacataggatggaagttaattacaatcagactgatatcccacaacaataatcccctaaaattattggatttgattacgtccaacgtaaaataaatgcggttattatttaaaaattacacaggtgtgatttatccgcttttatcgggtgaatgcgtacgtggattaaatatgctggaaagtgtatcgtgctgggacatctcgctgggaacatagcagcaataaccctggcagcgagttggagcttttctcatgtctttttgaggatgataatgtaaatctcgctgtttcagcttttgaagacataaggttccatttaataattgcagttcttggtgacaaggtgaacttcagcagtcaacatcatttgaatgtcaacttctttctgggagagttgactcgacggagtagtggatatcattgaaagatgtttggaggtgattagtgaaagtaccatgagtataccttcccatagtcagatggatgcctcgctattaattgttcaagttcattcaattgttatgcttagtttgtataatatatattatacgttaagtcttttaacctgtcttatctacatctcttcatacgtgatgaggagaatggtttcttgtcaatgcgcaagacaatagtttgtatatccttatctcacttaagactttacagttagcaagttgtaaatatactctaccagctctgcatttaataaattattccattttaatatcttctaatttaattatcattatatttgttgattcgtattctccaagtttgacacgtgtcctcctctgaagtgccaaccgaattttgggtataacatatatattatattgacattcttaggcttatgattcatgttggattaaattaattttattaaatctgattctgcttttttagctctgatatggaccataaaatctaatattgcataccaagcctagagttcaaaattttatttttaggccattaagagtttttcaatttagctacaatattcatggcaaataattttgatcaaagctagcatatcacattaattcttaggcatgaagaaatgtgataagtgatcattaagcacgcaatattgaattgaatgatcgcattatccttgactaaggcatgccgagatataaatttaaggatcataaattaaatatgacatttagattttcttgtacagtcgtcatgtataattaaatttatacaatcaataaaatgcttatttaaacattttctcaccttcatgcacaacttaattttatttgagaaaattgtatcttcaaaggacgagaataaatataaagtttatgatttattcgctaaagtacatagttacataaagtatattgttatgtagtaaatacatcgtaatacttgaaatataatactcgccatataatgaggaccaatcactatgattcataagtttactatctaacaaggataatgatttggtttaagtgatatattgattgaaagaggttaaactaagtctttgtaggtggattatatggggttttttctttcatcatcttcttcatcctactactaccgccaactacacatcatgccagaccgcctgtcatttatttaaaaaaggtctcgttatgagaagattctagtgttccaatagacaagttttttgtctgcgagtaatactttggctgacttaagtcgttttagcatccttaaaagattggttccggtgctgttctctttttcagtgttttaataccagtttttcttctcttttctggctgtaatctttgttagctgtgaaaagacagtgttttattattttctactcaaagttttaactctgattcatcttaatggaagaacaagtt

SEQ ID NO: 224436 - DNA, 1682 bp, Cannabis indica
ataaatcacttcaaatttcttatattgataaataatcagattgtaaaagagttttatttagggcacaaaacccaacagcagtcactctgaagaaatggaagattagagatggtaaagccatgtttgcaattcggaccacagtcgaagatgatatgttggagcacatcaggccgacaaagacactaaaggaagcatggaataattttacagcattgctcaccaagaagaacgatacgagattgcagcttctagagaactagcttctcttaatcatgcaacatgacatgacaatcaatcaataccttaccaaggtaaaatctctttgttgtgaaatttctgtattagacttttgttgaaatttatgccttaaaagtaagtatttaatggataatatattatagaatgtgaaatgcaattataagatagttaaatacattaattatagaagtataattaataaatatcttaaaatttcttattcatatggagatagtataatcttgtaaggtcgtacaagagaattaaaattataccatatgaataaaatatgttggtagtgtattaaagtaagagatctttaatatggaattaccaagtatggtttactatacactatactctaggtccatggtccccaaatcacctctatacaatactggacatgggaaggtttaatttgatgaatgaacttgagaaagaattaatctctatgagaaatcattcttaagagcaaaatagtatttttgtggaaattctaattttgaataattatatcaattatgaattgtgtaattgatatttaactatttagtcttatttgatgaaactatattaattagttaaatataatattatttttaaataatattaaagatagaaatatattattttaataaaaataatatttattttaactttaatgaaataagagattaatgaaaattaatcaattattatttattggaaaaataaataataaattttatttatggtaaaattgataaatcaatttcggaccttaaaatatagcaagggagacatataaagcccataaaaattttgtttgattattttattattaaaattaataaaattaaattaataattatcgtttatttattatattgaatatattattagataatgtatttaaaattaaaaaaaataatattaaataaaagattataatttatttttgttattatatttatattgaatttgaatttagaatatgaattaatataaatattatattttatttaatatgattaaataaagggtttatttataacattaggatatatacatatataaatataacatgacaagtagataagtgaagaacttttgagagatcagttttagagtaaaaaaataacgattgaatttttccaactctctctctcttcccttgctcaccctcactcaggggcggagctatattgagctccacaggggccatggcccccctcatctttctatatatttatgtttatacaactaactaatgtgttcttgcaaaatcaattattgtatttttatattttgtttgtattgatttttcaaagtttttcgttgcagatcaataatatatatgtataattactgtataatataatagtatatgtggagatcaatttcttaataaaaaataaaagtacacctaataaaataaatgtgaa

SEQ ID NO: 224437 - DNA, 1254 bp, Cannabis indica
gcaccttcactgttatcttgtaacatggtgcagacctttttagtttagtgggaacatgcttgctacaagggatttgctattaatgaatattcttcagggagtaattctcttatgaggaatttctttcctcgatctatttattgacgggcctggtaactccttgtgtgtagccatgctactttgagttggcttggtctcttcttctttcccttttgtcaatgaatcctgctagcaagatgttgtgtacctctcagtcattgtagaccagaagtataagagcagactgctgttgatcgagctagccagggcaagactagctgtccagccatactgaggaagcattgcttgggcaattggatgaggccatggccaaccagcatgtggaggtggtggccggctagaatgtggattctatggccaaccaaattgttgaggacatggtcggtcagctttctaaagacccagtcgatgctgtagtttgatcttgtctgcattcgattggctttgccccccggtgtaattgtcgtaaagcctttgtgaacttctgttaatagctatagaacttctttcttggaaacactccttggtggtgttgggataccacttctatgtgttatgctatcatgatcggacaccttgtagctgtcctcctagtccctgctttctggcaacgtctttgtttggaggtaaattgcgataggtttcatccatgttggagtgtcatccagcatgtcaacctcctctaggacaacaatgatgggttcttctaggaactggatgggcatcaagttttcttggtcagctatggtactacttgctaggcgggcaagtgcatctactatggaattctattctttttgaaataggacttagttctttgaagaactcagtagggaccaagttttcgttacttgtcaaggcgcagtcgactagttgagcgagtgtgtcggctgttgtgctatctttggggcttgccttctaggatagcctttgagctgtcttaacagctttggtaggccatcatcttcttgtattgagctgtatattcacctgagacataacctacgactatctaagagttgtggtgtatgtctaggtggttagctggtgcttcatgtgctagcctgggggttagcatttgcagcttcatgtcaagcctccttgttagaagctttgaaattgaccttgttgcctcgtgcatcagttgccccaggtgccttgggggctaggtctgcatcgggcaagtggtcaatg

SEQ ID NO: 224438 - DNA, 1293 bp, Cannabis indica
taccattgctgggcggcttccaaaagggtagcaggaagattctacaacacacatccccttgtatcccccgcaaatccatttgcatctcaaaattcttgaggtaggaaagaggatcttctcttcctgtgtacattttccatgttggcatttaaaacttgtggggtaacgccagaagattaatctcaggagagaaaggagttccacgtgctcggtccagctcgagatcattgtttctctatccacccatgccttggaacatattttttcagttcgtctagctgtgcctgcacagctatactaacttggtcggcattctggtcgatttgaatcacatcagtacctttctgagcgagaatttgagcacgggctccaggcttaacgatcatcatgacaatataattgtctactcttcttcttcttttcagatcgctccttaggtcatgagtcgtccgcaacctaccgaatacagaagggcctggctgtcttagtgattgatttgcatggttgatgggtggaatgacatcgttaacctggttggaactatcaggaatgacctcgcctgatgaattactagacaaggtctgcccgcctaccgctaggcccacaagcggaacttgtgaccgtggatttggcggctgaccatatgtagtctgggaagtattcattgctggatcttcgtccgtctcacccaaggggatgacactttttttccgacagtttggtaggctttccgtatcagcacagtagcttgcggactacgattttcaatctctgtatgatgagccctcaacgcttccatctctttgtctctccactcggcaaacatacgtctttattcctcgaacgcgagatttaccgcagcgcggagttcttcctgatcatgatgtagggtattggtatgaccctgcacgagtcaaagagtagcacggaagttttgtaactcaatatcatctccaatggtcgtttgggtgttggtagcaggcggaacggttgtgttttgaatgccctagttaggtgctgaactgttattcccagtcccttgcacaccaggcgcgatttcatctataggagtcgttataccatgacccacattcgccgactgttctggattaacagctggcggaacccttgcgtttcctgggttctgaaatttaggatccaccgtctatggatttgttggatcaaccaggcccctgggaatttgtactaccatcgtacttgtggttagattttgaatgaagagcgattctagagttcatctctcaatgaaagcaccaaaatgttgacctcgct

SEQ ID NO: 224439 - DNA, 1734 bp, Cannabis indica
ggaacagtaatattaaagtaaaaatgaagggattttagcatacgtaccaaagaagaagcatccacttttagttcggtcagaaaaatgacatccggcgagcgcgaccgaattagggacttcagctcacgaactgtagaggtctgccctaaccctctacagttccaagcaatgcctctcatggctcctgtggaggagtagaattctcctccacaggggtatgagagtgagccgacccaaaagaaccagagtcttcaatcacaaaagtgccctccattggtcttgatgaaatcacattcttgccttttgtcttccactcgtccgggcccgtaaaatcattattagagagggaagcctcttctgagggctcctctttcgactccatagtatcattagcgcaatcctttgaatcccagggaaaatcacggatagcccaaggatgaggacgaaggagcttccaaggacgagaacaaagcgaagcggtagtctcatcaaactttctctttttgaagggagtagttcgttcattaacctccgaggtagtaggaaccccaatgtcgcctccaatagatttaatctcatataagtccaaattcccaaatttcttaagttcttgaagagtagtaccttgggcttgaaaaaaattagtcaaagctaattgttcatcatgatagaagttaacttcttgaccacaaatagaactttcaattgaattggacaaggccggcccaatagcctctttaccctcaattattgcatgtgaaagctctaaaggcccagctattccaatcggcccaccaccttttaaaaaaggtttacctatttccttattttcagcaaacgacccaccaccttttaaatgaatctgaccatgcaattctttccttggtccatttgaagaggcacaatcatttaaaaggcccaacttggaaaccggcccagaacaagaaaaagctggcccatcatttactttgctacacccaaaacgaggccctttacctttcccaatatacagctcacggttttcaaattttgaattaaaaccaggacatggtacaacctcctttccaccatcctgatttccaatgaatttttggttaccatttatagaaaaacctggcgtgcgtgaagcagaggttgctttgggcacccagacctttctgcgcatctgacctcgattcagacctccacgagccgtcaccttcatagcttggttcgacaatcgagcggtcgtcttcctcccatggcccttcgaaccagtggtcacggccaacggctggcttccaggactagcagagatcgagttcgcacggtccactggagtcgacgacggagtgaaagtgaaagctcccgagaaaacgtcttgatatgtcgactccagagatatccacggcccgtacatagggaaaggaaccccgctaacgctcgccaccgtgatcggagaagacagagagcaccctcttctttgatgtcccattacaccgcagttataacagaagatgcccatcttctcatatttgaactgaatccacctttgggtgcccgattccagaccgaaatagcatccagtaaacaggggttgattaacatttaatctaatcaaaactttgagtgccttactccggagtgcaggtattccttcatcagctttcacatatagcacctgaccagcttttgcccccaataatttaccattatccgctgagaagtagtccctagggaggttgaaaatatgta

SEQ ID NO: 224440 - DNA, 1071 bp, Cannabis indica
caaggccagattagttgcaaaaggattcacacaaattgaaggtgtagactatttagaaatcttctctccagttgtcaagatgaagacaataaggatgatgattgccattgctgttcagcttgactgggatatacaacaaatggatgtaaaaactgcatttttgaatggtaaacttgaagaaactatatatatggaacaacctgaaggtttcaaggtggaatctaaagaaggagaactggtttgtctactgaaaaggtcattatatggcctgaaacaatccccaaggcaatggtacaagaaaatcgattctgtagtcactaaagttggttacatcagatccaagtatgacacttgcttgtatttcaccaacctaaactcacaagctgtaactttcctgctaatctatgttgatgacttgcttatcatgggtaaagatcaaaacaaaataagcaaactgaaatatgtactaaatagtgagtttgaaatgaaagacatgggaactgctaagaagatacttggcattgaaatcagaagagacaagaaggaaaagaggctactgcttacacaacaatcttacattgagaaggtcattaaaaggtttaacatggaggatggaaaagagactcaagttccattagctggccactttgttttcacaactgaacaatctccaaaggatgaaaaagcaagaaaaaggatggaagaaattccttatgccaaagccataggaagtgtcatgtatgctatgataagcacaaggcttgacatagcttatgctgttagcactttgagtaggttcatgtctaatcctggtgaggatcattggactggtttaaaatggcttttaaggtatctaaaaacaacctcaaactatggtttgaagtttgaaaagactggtagtacattgaagctagaaggatttgttgatgctgattatgcatcaaacaaggacaccagaaagtcaattacaagctattgtttccagttaaattcatgctgtataaactggaaatctcagctgcaacctattgttgccttgtcaactactgaagccgagtttatggccataac

SEQ ID NO: 224441 - DNA, 1406 bp, Cannabis indica
ataatataattcctcaattaactcacaattatctaattagggttttgctaatcctttccttaattctgggtattacacagcaccacctttgaccctagccgaactccaaacccaggtggtccgcccaccacttggtccatcttctccattcatggtacgagttccgatcgttcacatcctctgagctcaatcccaagcagtcgtccccgagccaaacccccactgcacaactgacgtcattgctccgttcgagacccaaacctgagaccacccttcgattgaaacttaggagctattcaagaacttgctccctctagcccacccaaagatctacgctcaaaatctcatcactattgttagccctgcctgctcgctgtcgacgagatctaaacaaatatgctacttttctctctccacgtgagattttgtcattagctagccctattttcgaagactcaccccacaatggttatgatctcggcattttcaaagttcgacgagctaacttcaagttttagattttagatcgatgatggtaggaggcggaaaaggagagaatatgatgaacatatagtttgcaaaaaaaaaagtcagttgagtatggtttctataaatgggtttgtggttgtgctccacgaagaaaaagaacaaggagagagagagagttgaacaattaagagagaaaacaactaaaagaaaaaagaaaataaaaacattcaaagtttttatttgttacacgtggaaaaattaatggaatgactactttacaaatggttcaaagaccattttctatatgttaaaaaatcaaagatagaataatgcataactcataaactctaataaatttatagcacaacataaaatagtacaaaacgttgcattgggatttaattcagttcttgaacgttttagacttgagtttaaagtcataaggtgtctaaagtatattttagaatatagtctaatcaaggtttcaataatttattgctaagaaaaagtcttagtaatctagagatttgtgtagtgtatcacattactatagtcaattgtttctaacacacgccaagaaaaagtataataatacaaaattcaaaatggatttaaacacattgcttggattgtaaacttttgaatggtgctaattaattttattcataagaaccgttaatataagtacgtttgagaattaatttattatatttcgaaactttaaactacttgtcattattgatttcaaaaaaagaaaactactagtcattattaaaggacaatgacattaagaataagaaagaagggaaaaggagtagtgaggtttaagcattggttaattctttccagagtgttgtttgattgaatatatggaaactaatggcatgtttactaataagtaatgggaatcaatagta

SEQ ID NO: 224442 - DNA, 1463 bp, Cannabis indica
ggcataaaacccaacacattgttactgcaattcttgattattctgcattttctttccttttttacaacacccagttggaactaaccccctctctagacacgactctgggagtatactgctctctatcttagttttgttttttttttgttcatctaggaatggagatgtttagagaaggagggtccacataacgaacccctgcgttggaaggtgtcaattacccataatggaaaaccaatatgcgagcattttttagggcggtgaatgaaagagtttggatggccatagaagatgatttaacatgcccaacggtgatggataatgatgtcaccaaaccaaaacctatgagcttatggactctagatgagatggagagggccaattttaattcaaaggtcatgcatgctctgttcaatgcagtgtccacaaatcaattgaaggtcattgcgaactgtgagatggctaaagaggcttgggaaaaactgcgaagtaaaaatgaaggaacgaatgcagtaaagaaatcctgtcttcgtgctttggcaaaagcatttgaggatttatcaatggaggaagaagaaacggtggttgagttccatgctaaattgtgtgacatatcaaatgagtcttatgctttgggaaagacttactcaaatgcaaaactaagatttatgtctaaagtaacctcaattgaagaaatgaaaaacatggaggaactagatattgatgaactgattggatccttgcagaattatgaaatgtccttaacaaggtggaagaaagaaaaaaagaagaagggtgtggacaaagaaaaaggggacaactgacttgtgttcattcagaaagatgaaaagaagtctatcctagaggtgtctgttggcttctcagatgaaactgtagatctgctaaccagaaactatgcaaaattcttgaaaaagaagtacaagaaatttttttctgggggtaaggaaaatgttcccaaatgaaatcctgttggaaactttaggcatagtcagcaacccagtgataattagagcatgggcattcagtgtagagaatgtgatggtttcagacacattcaagtcgagtgtgccaacactcttaaaaagaagaaagcccttattgccacctggagagatagtgacgaaaaaaaaagattctattgcaagcaaaagttctgatgaggataaacaggtagcggctttcatggctcaaagtcattattctgttgaatctgaggatgatggggtttccacttcttctaaagctgactgtaatggaagaaaaaatacatatgaagagatgtttgcttagtgggaatatatgaccaagcagattagaggtctgaataatgccaagaagtagataaagtctgaaaaagtcaagctagaggacactattaagaatctcaacactactacaaaaatagtttttctcgacgtttttaaacagtcgtttaaagtact

SEQ ID NO: 224443 - DNA, 2732 bp, Cannabis indica
ttttaagaatcatcttctttgagaaactttaacgaatgaatcaaagaaactaatagcatgaataggagttcatgattactcaagattcaggccaatttgttattgatcatccttataatatgaattaagtctttatagtaaacaacatgtttgataaacacaacttaattacacatcggtctatgtcatatataatctctattatatacaacacatccacttagatgtcatactacatcagcaatgtgaagcgagattgcttgtaccgaataacgggcatcagtgaacggtattaacaactgttacttaacgattccatagctttaatatgttgttgattattttgttcatggctaggtgatcttaatttttcgtacaatacaagtcacaacctcatatatgaataaggaaatttttaatatttatatataaattatttaatattaaatatcaataatttaacattcaagcatatatcaaaatagtcaattagtatttataataaaaaatatatttacacgcttttcaggggataaaccctaataatgttagttgatgtgttcgattaatactataaaatgatctttaaacaaaaattacatttggtctttttattttgtaaaagaaagcgtgcaatatattataaaaagcaattagatctcacggtcattacaaaagatagcattcgggatagtagatacctccaccataccataaatgttgttggcaaaagcccgattggccacattatgtgccataaaattacattttcttgaaatgaaagaaaaattacaactattgaaaaagatagagagctgcttgcattgacttgtgtagttctcaattctccaaaggtctcgacacctttaagattattgatcacaatcgcagaatcgctctccaccacaacaaaaaggtgatgcatcgagatcgccgtctccaaggcaacaaactagccgccgcttctcctaaaagagggtcaaagaagtgaagcttgtttgtcgccacccacaaaatcgactccttatggtcccttgcaattgctactgcacacatggtgtcccctccagctctgacatcgcaattgatcttgatccaatccacaggcgacggggaccaacccaaagtgtcctctacttggtgagccttgaacaaacaggatccataatctccataacaataatatatagagtcaatataatttatcaagctacccatagtgttattatgaaccttgtcattacgcgccctccaaatagtgtcaaccacaatcgaagcgtaaaggaatacaccatcagtatccacccctctggacccaagattccaaagaaagttaacccaatcccacatgcgagcaccagagtccgcaacatgcataacactccaatgggaggatctccagaggtgggatgccaaatcacaaaagagaaacaaatgtttcatagtttcgtccccattaccgcaaatgggacaggagatctcatcaattaccattctcttggaaaggagtgcctaatcggaagtgcatccgagagaatactccaccatagtactttgtggcactccaagatctttgaattccacagcttgttccataaagacggagcaacactacacaaaggggttcggcccaaggcttggatgagatagaccgacttagttgagaaaataccattagagtccttagtccagacccatttatccctaccttggccactaggtttaccgcccctcaagatattttcaactgtttccctatcaaagagatcatttaccttccggatgtcctgattcccgtcaggagtaagtaaatctgtcaccagttcaggcattccttgggggttgttcttgggtgtagggtaaaactcagacccataacccaagggtcatcccagatccttgtatccctcccattggtaataagcttgcaagcccctttccaagggtcatcccagatccttgtatctctacatattttctagtatgtataatattttcactaaagtgtcctacactagactagtaacccgaattagttacatgtattcataatactagtgggtggtagtggtaattcatgtaaagattctgtaattttattttactgcaaactcttaatgttcaatatctcaatcacaattctcttacaactatatgagattgagaccgcactggatgaactttgaaatttcttgatatttatcatcaatgttatttaaataaagttgaatattgtctatatatatatattaattcaattcaattatttatttcatttaaagtattttttaattacaattagctttaaaagtattaagaaaaattgcatttagacctccacaaaaaacacaatatcaagattatttaattaattatggatagtaataaaaaattaattcaaaattaagaaaattaatttaaaaaatactaaaattattagtaattcaaaactaataaaaagttactgaagtattctaaaaatgttagagaacaaaattaatttaatgcacaaaagaaaccaaattgtagacttattaagtatatcgtatctagaagacattgtctggaaggagcaccttccgtgctagagacaagtcgtccaaggatcacagtgtcctctttgctctgagactgaagaggtctaaaagtctaccggtacaatagactctttccaaaagatttggagcaggttagtgtaacctgcacgctacctttgataataaggactgcta

SEQ ID NO: 224444 - DNA, 1967 bp, Cannabis indica
atgaagtcatctcagtcgaaagagttactgagaatgaaacttgtgttactgagattcaaccaaaccctgagtttgaggcatggattgtacataaccaacttctcatgggttggctctacggatccatgtttgaaggcattgcgtctgaagtaatgggttgcagatctgcctcagccctttggacagctttggaggagctctatggagctcactcaaaggctaatatggatgatttacgcactaagctccagactacaagaaaaggggcacaatcgatgactgattatttgaaaatgaagagagtttgggctgactccctcgcacttgctggagacccgtatccagagaaacacctcatagctaatgttctgtctggacttgacatggagtatctctctctatcgtactccttcttgaacatcgaacagatctgtcatggcaagaactgcagggttctcttctaagctttgacagtaaactcgaacgccttggtgctgtctctcctaccagtaaggctcttggtaacccctctgcaagcttggctcaaagacccaacaattccaacaacagaggcaactattcaggcagaggaggaggatacaacaacaatcagggtcgtgggaatcagtaccaaggaaactctggaagaggaaacaacaatttcagcaacaacaatcgtggaaggggacgatacaacagagataactcgagactgacttgtcaactgtgtggtaaatttggtcattctgcagctgtttgttactacagatacaatgacaactacatgggacaaccaccgcaaggagatggacaacaaaaccaggataaaaactcacagatgacagctcttgttgccactccccagaccttgaatgatgacacttggtacgcagacagtggggctactaatcacctcacatcagaagctgagaaaatgaccaacaagaataatatcatggtaaggatcagatgttaataggagatggcagcaagcttgcaatatctcatgttggtactggttctttacacactacaaactctaatcctttggttttaaatgatcttcttcatgtcccatccattacaaaaaatttgattagtgtttctaaattaaccagtgacaacaatgtgtccattgagttctttcctgatttttgttgtgtgaaggatctaataacagggaaggaggtactgcaaggaacacttaaggatggtctctatcaaataagctcagctttggccagtccctgtacttcctcaacctttccaagctatcaatccaatgtctccactaagtctactgtgtctagttttaattccctaaaggatacctggcatagacgcctaggtcatccatctagtaatgtattaaatcaagtgttgaaactgtctcatgtaccctttaatcttaatgaaacacatggattctgtgatgcttgtcaatttggcaaggctcactctctgcccttttctacttcaactagtcatgcatcacaagttttagaactaatacacacagacttatgggggcctgccccgattgcttcacacaccaactataaatactatattcatttccttgatgattatagtaggtatacttaattgtatccactcaagcacaaatccgatgcactgtttgcctttgttcactttaaaaacttagctgaaaatcaattcgaaaagaaaattaagcaactgagaactgactggggtggtgaattccagtctttctcagatttagtcagtgaacatgggatttattttcaccatagttgtcctcacacatctgaacataatggtagggccgaacgcaaacatcgacacatcgttgaaaccggtttaacactccttgcacaagcccaaatgcctctcaaatattggtcagatgcattccaaacggctgtatatctgataaatcgacttcctacccctatcctgaaatggaaattgttgggttttatgcc

SEQ ID NO: 224445 - DNA, 2274 bp, Cannabis indica
aaaagtattaccaaacgacactccaaattatctttcttaattaaaaaaattaataaaacaaattaatttaaaagatatacgtatctaaacaaaattatgacaacaatacttaagtaatcaattttgttataattaattattagtataaaacaattaatagcaaaattggtaagtaaaattactttttttttaaaaaaaataaaataaatacctatataaaaataatttaaattaactttaaaaaaataaatagtattaatttaaaattaaaaattaataaaatttattaattattaatattatttttttttaaaaaaaataaatatataattaaatattattataatatgtataatattttaattgtatgtaaacagttctatcttaaaaatatagactttatattttaataactacattatttaaaataaaaaagcttccatacagtaaagaaatgctaaatccctctatagtcttagcctatataaatatatttatttatttatttatttttacaagttcgacaatcactttccccttctgtttttttctcgtttttcagtaaaacaaataagttctaagatataaaagatcatgcctttttgctaggcttatcaatgatacaagtatacagcactagataaaattaagcaaagtgaacagggacttccgatctaattactaatttcatcgtttatttggatattcccttggtccaaatatagttgaaccaattctcacattagtgctgcccatttcaatctgcattatcataatatgtgaaccttttattagtaggaagtacaaaagaagcaacaaagcgtttaacaagaaaactcaaaagaacatgaaaacgcagagcatataccgcttgctcaaagtcaccagacatgcccattgaaagttcacactgctcttctgtaaacccaagtgccttgcacacctcaagtctgcagttcgacaatgtctaattgattgacatgaattagtgtaaataaatgaaattgtagaaagatcataacattgtgaattttcatttctgattctgagatagaaaagttgaagttttaagtacaaaagatacaaactcatactcaaagtccaatagagggttagaggaactagttaccctaaagttctctggagttgatgtgtagtccggcatcccgattgtcattaacccagaaaactgtagatttgggcagtgcaatttgacatgttttgcaagctcaacaacaccagaagggtcaacaccagattttgctgccaaaaatgtcaaaactattttatattacttttgttatcttaaatagggtacaaaactattatctggtgaagcattgtattgattatattgaataatacagagatctagtatggctcgactgtgatcttggcaacatttatttttctgtaatctaggccgcaaggagaaaattctcctaggtgaaagtcagctattacaatattggcataaaaaacgcctacgtatggaacttagtttaaccttgatcgtctctatttgtttgaaactcaaatctttcattttaaactccacaattaattgcatttcatatgattgatttagaaaacttcaccaagcaaatttcaacaatcatatttgggcatcatgtaagaaagaataccaaaacaaagaccgtgggagtttcaacaattgtagagaatttttataaatggccaaaagctagtaccaattaaaaggtcaatatgggttagaagagacaatgtcattatgctggatcatgacacatcttcatcttcgaggattcataattctatttccactgttattagatgactttttaatctctaaagaacctctctcatactaaaagaacaaagactaggaattaaaatcctttgatcagtcctagttgagccatgggcatgaatctaatttgagatttgatggttgcaatagactgtttcttaattggttcaatggacatcaatgtggcttcatgaatttttatgagatttccatagctgtggtcaaaaaagaaaaaggtggcatcaaccacatacatggctttctttgcgacagtcaccctaaccttttatagacttaatattcaaaagccatagaaatataatgaccaatattttgtagatgctacaaaatgataccaaacttagactaggcatcatttaatatttcttcaaactcaaagttccaggtgctgagttgcactttatgttatggcaaaaagatgcagttcaatggcactaatctctctttctttcttgaaacta

SEQ ID NO: 224446 - DNA, 2916 bp, Cannabis indica
tggaggtatttcgatccttaagttatatagtgtatatatttgtttattccgtattttatatacacatacatatatttcagtttatacatataaatgtctaacatttaggtctatccagatccgatctaattatatattagatgttagattttaccattcgatctgatctaattaatttcaatcatccaatcgatccaacatctattggatatttgattggatcggttctatctattagatgtatttcatatatatatttattggtttaatttgagtttatttaatattttagacttagtttttttagatcggatcgtatcaatccaatattttaggtccaatatgtattggattggactggatccatccaatctaagaaaaaaagagtaatgaatgttaatttttatgtatacgtatatattttacgtataacattataaaatctaattgcttctcaaaactaaatgaaaatactattaattagtttgattagatgttggatgtgttagatttttggacaccccatcaaacatccgatctgatccaattgaatattaaaaaataacatccaatctgatccgatcataatctaatatttggtggtcggttgtagttggatcactcggttgtcattaaattagatcaatttatgtacacccctaactatgagcatgagtgtcttttaactttaatcatattttttatatttaatttttttttctatttatgaaacttatttatctttttatttttgttaaatttgtttttattattttatatttaataagaattttttaacaatgaataacttcattgaaaaaagaatcataatgtcatacaaactttaagaattaagaaactccaacaaaggaagaaatctcatcaaaccatactagttctctatccacccgaagagcatgccgagctaatccatgtgcagccccattagctgtccgccttacatggattagggatacttcaggaaaactagacatcaaactagttaaatcctctaataaggaaccaagctcattgaggaaggaagagcattttaaaaacgcatttacaactgctaaacaatcagattcaacaaattataaagaaagacccacagtataagagcccaatccaatgctacaagtaaagccacatactttgcttagataattgagaaataaaccattaatggtttagaaagacaagctactacaaaaccatttgaatctcttattatagctcctattccaatcgtctgagtatgttcatctattgctgcatcaatatttaatttcaaacagcctacagatggagttgaccatgtagcagccaaattatagcctttagtcaaagaggatataggaaattttctaatctgatgatactcatctgaaagaagtttaattcttgagataatctcatttggatgttgcgaatctttttcgtgagttatactatttctttcaccccatatataccatgccgaaagaataaagaactcaaaatttgactaggaaaacacgtttgaagctctcaacagaacttgttgaaaactcacatccactaataccttttcaataaaactaaagtgcaagagttttcaagtttgttgaaaagcactacaccaaaaaattgcatggctattatagtatttttatcaaaaccacatagaggacaatctgactgtaaaacaagctttcgctttttcaagccccaagtggtaggtaaaatttcatgaaaatctctccatgcaaaattaagaattttagatggcaagttcaatttctagaaacatttccacaccaagaagaaaagacttctctagagggagaaccatctaaagaatcaatggttgaagccacccaataaccactctttactgaataattactattatttgtatagtgccacatccaactatctgcttctgagaacttactagttggaatagagcaaattcactcttgaccaacccgattaaatatagaatccaatgttgataaattccaacctccaattccttgtaacataacatctttaaataacaatttagaattctgccccgctggtgttactggtagaaaagaataaggtctgaatagtcaaggatctttaaatatatggataatatctccatttcctactcgacgatgcaatcctttagtaagtaaagcatgtcgccaaacaatacttttttttagatataactaaaatggtcacccttggaacaaaaacatggaaataaaataaagtattatagtgtctaaaaattaaaatagcaaacaaggattgctcctactaattaaaataattaaataactcttaataaaattgcaactaatcattaggatgaatcaatactattatatatattctatataagtgtggctatgtaacagaattcttggtgtaacgatcctttttgggtttctgtgttaactttaacagaatattctattaattaacaaaatattctttattaaattttatttattatatatatatttaaaaataaaaattaggtagatattttatataaagaaattttatttatatttaaaatacttaaaatattataaatatttttaaatttattagtttaactttaaattagaataaaaaaattcatgtaaatattttatataaacaattttaatttaaaatattataaatatatacacacttaaatttgattatgtgagttttggttagaatatagtaaattaaaatatatacattatgatatatgttacctagttttgaaaaatttaaaaatttaaaaatacgtatatacataattatatccaaatgacacaccaatgtagcaataattaatttttttttcctaaagatcaaaatctcaatttccattcaaatttaaaaaaaaaggcattacctaattaaaaaaaattaaacata

SEQ ID NO: 224447 - DNA, 2907 bp, Cannabis indica
gtcttttttttgtagtggaatctagctcaaaaacggtgagcaaactatgcctcattggccagttgtgtactcagtaagagcactatacgtccttcctcaagaatctcctatgacgtatttggaatttaacttggaaagattgggatttcaaatttaagggtcaaactaattctagcctctttcttactttgccttccaataatccgacccatttggattgagtgctggcaaaaatgccaagagtgttgcagcaaggccgtctcaaggtgttgagaggcctaggacaaaatttgaaatgaggcattttctttttagaaaaattaaaataaatattatttaaattttaacataagatcaattttaactctttgatctctatataacaaataatttttctcatcacataagctaatttaaagtgctatatatttaagcacttttgttaagaaaaaaatatatgtaaaaaattttgtcattttttttatcatatgttaacaatttataaatttaagaagacacataataattaacaaatatacttttattttagttataactcattaatttttaagttataatattcttatttttttaaaaatatttaatttatttattattatagtgataattttttattcagtttgcacctaaaaatactattgtaccctatatatatatagagtaatttcttatctaattcagcatgcagctttcgagagagagagcagctcttctaaaacgcgtcgtagcaccttccaccataaaatggcgagcttcgctgagactgatattgaagctgttaaccacagccacattatcacagtagaaaagaactctcttaaacttgcatttagctacaaattcagcagcgcagaccaacatctgtgctttagaaaaagcatgattagtagcactgaatcgtgaagccaaaatgcgtgtattcggttcctgcaatccttaaacactgctgcctcataagactggtttgcacaaatagaagcattaaggcagcaaacaaactagtcaggcagagggggtactcaaacaacatcttcatcgatatgaggagttcgacgagaggaatgatcctgaaattggtggcacacaagtctgatagcctccgaagccagagtgagacgagagccataaaccacgttgttgcgcatactcgaaacgacatcaaagatgcatagggcccttataaagaaagtgttgaaatcaatatttgggggccgaatgttgttacagtgaaaccactgcagccaactaatccagtcatcgcactgaattgtatccgttttaattccccaaaggcttccaaaccataaagcttttgcgaaggcacactcctagaacagatgtagcgttgattccacatcctcatcacaaataggacagcaatgtgacgagatagggaaagactgagcaagcttttctctcatggggagtgcattagaatctgccatcccagcagctttagacatgcatggataggcaaattccataatattttccaatgccacattgggtggttcgtggccatactcaacttgactaagtggtaagccaatttgatcaagaaaaccctactttcctcatcaagccaaacacaagagtcctgctgacgttgtgctggaagaccaatgttgaggatgtgtatagtatcgtttgctccaaaccattatctgatccttgtttcgttccatgtgaggttctcgttaataaagtcttacactaggtttgccccttgagtagcatctagaagagggcggggtttgtgatcagtcgcgggtacccaagcattgtatcgaacgagatggacgtagaccttccatcccctatccttctacagatgccttcattcaacagcgttttgtatttcagcatatatagccttccagagtcttgagtcagatgttttgcaatccacatcgaaaaaacttagctcccttcaagtatttttccttcattgtagcactccatagactagaggaatcattgattagcttccagccccacttaagaataaaaacgttgttgatatccttgatttgacgaaagcctaatcccccattgaacttagatttgcaaagagaactccaagcaatggtgtataccagtgttctattatcaaatgcaccccaccataaattccaaaggcatttatcaattttttgttgttgttccacatggtaaacatcagaggtagccacatagataggcaacgagcctccaacaggttgaattaaacatgtcctccctgccttagacagcagtcgtgatttccacccatcgattctagtaagggttttttttcaccagataattcatttcatgggatctactggcagactgaaagagagggaaacccaagcaggtggcatctttcttcatcttgcgcattcccaggaggttcgcaatattgaatgcatggttcatggaaactcctattgagaagtacaccgttgatttttggaaattcacagcttgcctggaccattcgcaataagtgtgaaggcacttgaggaaagcctcagcttctttttccgtagcttgtccgaacaacataacatcatctacaaaaataatatgagttgttggcctagcgaatcttgacaccttaaaaccacggatctttcctttatcattagcatatgaaattagtcgagataataaatccgctgcaagaatgaacagggtcagggaaagaggatccccctttctaagcccgcaatgagggataataacaccatgtctcgctccatttaacatcagattcagctttttaatttggatacagctcattattcatcccaaaaatggatccttagcgccatgaaattgaagggcttctctcacaaaatcccaattcatcttatcgtaggctttttccatatccagtttaat

SEQ ID NO: 224448 - DNA, 2164 bp, Cannabis indica
atcatcagatggcaactcatcgagcaacaagcgcatcatcttcatttgacggtggagatgccaacctcaaatatctatctttcaatcttttgttgaacattatatataccaaagaatgcattctttgggtagtcaatcgatttctttttttttgtatgaacttgattgaaagtgctccaatttcgctcgcatcctgatgccgagcaagtaagacctaatactttgatggcaaatttttgtaactctggcgtgccatctccatattgagtccaccaatccactaaaattggacattaaaagaataaatattttagaaaacatgctatgaaattttccaaaagcattagtaaaagatttagacatttaattacctggtgatcgtttttcaaatgtctgtttagcttgggtaaatccaaagaagccttccttgttgtgaaaaatgctacattgaaggtcagctttttctctttctttgggatctgggataagtctgtccatacaatgaaacaaacccaacttgacctctggatggttggaaaaatcttctgcataatgacagcggggattcaaatagtaggcagcagcatgcaaatgtcgatgtaattgaaattcccatttctcatcaatgatttcccatatctccttgtaatctttttcttctccacccaaattatttgctatcttttccttcgccttatccattgcattatagagaaatcccatagccggttccttatcaccatcaactaaccttagcacttcaactaaaggacttgtggtcctaatagcataaatcacacttggccaaaagttcttgtccttcaaaactgtttttcttgcttcttttccatctggtttagctgcccaaggacactctatccactcttcagaagtaaacatagcctccaaaggttgtctcacttgataaatgctttgtagtgtaagaaatgcagttgcaaatctagtggcagcaggtcttacaatgtctcttttggcaaattttctcatcatgtctaggaccagagctgggttagatatagacgaggtctaaaccatgactgaagttggagtctgatcaccaacgtttgttgcacttgattgatcctggggaatcgacattgcgtaggcaaggacggctctgataccaagttaatttttagagaaatgcaaattaattgatcagctcaaatcgagactggttgggagattttcatttatagaagcagaggaatacaataggtcatacagtgatacaatcttagccttacacgtgttacacacccttttacaacagaaagaatattccctcaatcatgcctaacagtattgatggtaatttgttacctcgggaaatgcaatattccaacaacttaggagacacctcaccacaatagattatgacagtactacccctgcaaatatcattctgtaacagctcggacgccctcactttatttttacagacataggtgcttctgcgtcctaggttcaaatccgaggattttatttttgaataaattttttagggagatcgaaaataagttattacatgggggaaatcgaacccatcacattatatttaatgcaataagcacttgccatcacattccatcaaattactattatacatgtgcagtaatatataaatcatctaattataatatataattaattaatactttcttaaaaataggttacaaaaatatttttatggaaatatatttttaatatttaataaaaaaaattaaaaggtgtcataattttacgtggtcttgaacacccattatctcaggcacaatcgtaggaaataaatttatatcctaggaaataacatatgaggttaggtaaccgtatacatgatcagatctagaagataagagttcccatgcattagaattcattaatataatgtcttgaaaaaatcaccatcttaatatataattaagagtaattaattcaagtaaaaaaaaacttgcggcataaatactaattaagtttaattttcagttgtaaataaatatctaattttaagtttagttcactacaaaaaataaaaaactgttacttttagtcacaactttttagtcataacataatttttttgtgactaaatgtgacttttagtcacaataaaatagtacttgtgactaaaacatcgtattta

SEQ ID NO: 224449 - DNA, 2444 bp, Cannabis indica
ctggactcgagaatctgaagtcaaacctagacccagacccgaaacctaccccgcacccaaactaggataggaacctggacatgaaccaggatcaaacctgaacccagacccaaactcaaaatcggacccttactcgggacctgaactcagacacagacctagaatcagacccaaacctagacctagacccggacctgaactcgaacgcagactaaggaacccaggacttagacccagaactaaacaaaaactcagatcgagaatggaacttgggactcagacccagacccgaacctggacccgaacccacacccggagcttgatccggacctagaccgaaatccgaacccaaacataaactcagaccaagactcgaacccctacatgaatttgaatccaaactcaaactcagaatagcaactagagctggaaccgaactaggactaggactaggacctaaacccgaacccgacccagataaaatcaagacaaagacccaaactcgaatcgagactaggactcaaacccgaacctagactaggacccaatcccagaccagaattgggacctggacccagaatcaggatagggacctgggcaacggaactaggaccgaaacctagtacccaaccccagacctggacttgaacctaggacccagctcatgaaatggcacccaaaatggaaccagaccaggacccgagatcgagatctgtatttagagccatagcttggatcgaacccatagtcggtgtatggatctgggacacaccccggaccctaacctagaccagcacccgaaccaaaactcagacctgaacccaatcctagacccaaacctgcacccgaaaccgtaccttgtgacccgaaattggaaccgaaatcggaagttgaccttgacctagaaatgggaccacaaccaggacttggacctagaaccgtaaccgaacctgggcctagacccaaaactataaccggaccaagaaccagactcaaacttagacctagacccaaactgggacccagactcgaatccccacccggacctggactcgggacccgaacccatacccaaactcagacccaaacatggaaccagactcgggacacacaaccggggctgggacctagaatcgcacctggtctcaatcccgaacgcaaacttggacctggaacccaggactagaaccagacctagacccgtgatagggatccagatcttgactcggaatccagtaaatggggcttggaacagacccgtggtcggtgtttgaatctgcgactcaaactaggacccgaacctagactaggacccaaacccgaacccagacctagacccaggacccgaaactagcacctaaacaagaactgccagaccatgaccgtgtaacaagactaggaccctgaccaggacctagacccagacctagaactgaacggaccaagcccaagacccaaactaagaccaaaaatcaagcttagacatggtcgtgaacttagatcagaaccgagaattggattagacctaaatctgggacctaatcccaaacacagactcggacctagatagggatcaaggtacgaacttggactcagacctagacccagaccaagatcgaaacctgggacctagatcaggacctagatccagacccaaatccaaacttggacccgcaccagggacctgaactcagacctggaccgaacccagacccagatcgggatccacacctggacctagactcgcacaaggactcaaacctcgacccagacccagacccaaacccgaacctagacacagaatccgattgtgggtctatgtccgagtccgcgccctggtccagttataattttgggtttaggtccaggtcctatcctggtcctgttcttgggtctcgatccgcttctcgttttggttctactttcaagtcatggggtacgggtcgagtccaagcatcgagtcttggatcataagtctcggggtgggtcctaggtcaaggtttgggtctggggtcaggtcctgaatctcgggtccgagtttggttatttattcctaggtccagccccagttcttgggtcttggtctaggtcccggtcctggtcttggtttaggtcccaggtcacaggtcccagtctgggtccaagtttcggtatgggttcaggttgagtttgggtttaggtgtgggtcctgttatagtcccaggtttgggttctcgtcccattcctggttcgattccgattatgggtccaaaattgggtctggatcctagttcgggtatgggtttgggtcttggattcaaacattgatcatgggtcttgtttaagcctcaagttcagattcggatctcagttttgttctagtttgggccccaggtccctggccgagtcctaagttttagtttgggtccaagtttggggttgtgtcctggtagtgaggtcctggg

SEQ ID NO: 224450 - DNA, 1161 bp, Cannabis indica
tttttttaaaaaaatatgatatagtgacactctttgattgtggttgttatccagaaaataataaaaaaaataagaaaaatacaaatagtgacacgctgaaagtctatagtgacatgcaatgagggagtctaaaattttttagtgacatgcgctagagggtcactaattattacttttcctgacacccacattagtgacacgcgttgaagtgtcactatatagttttagagtctttcaaaatgggtcactgaatcccatatttgtagtagtgaatagatacactactattatagctagtggcatatcaatatatatacatgtaataattatcaattgatattcttaattagatacaaaattgggatactttgtttaattaaggccatataaatgattattaattaatttagcagtataacaaaacaaagagcaagaatatgccatcaatggactgcatgtgaaacattaaaaaattatgagatttggtatcacagtcacagacaatggacttgtgtttgggattattataaagaaataaataaatatataatacaatgtgaatgggagactatttgatttgattttgagtaacatgcatgtttgttgcctttatttacgccttaattattaatatgatctatttattatcatggtaaagtaaaccacgtattcactctattttaattactattattattcctttatttaatagttaagaatgtgactgtaaacgcatttagggaacaaaagagtcaaaagtttgtacccaagtatatctttttctcagacaaaaaggaaaaaaaagaaaacaaaagttttgatattggggtttgggggaggggtaattcaattttgaaaaatacaaagtgcacctcgagctcgtgctaggtaagacgtgacataatgttattgatgtattttaatattaggtcttatatattttaatttaataatttatataaaaaattactaaccaattataagacactacatcagtatggtattagatactttaagatattaaatagtaatactttttaaacttaagacctccctctttgtgagaaaatgtataaaactagtaggatatactgaccaaaaaaattgtttgaaggaaaggtggggaaaattgaaaagaaaatgattttgaagaattttatt

SEQ ID NO: 224451 - DNA, 963 bp, Cannabis indica
tagaaagttcttatttaggatgttaataaacatacttgtgagtagatttaagatcctggtaaaataatttcctacatcttcatggggctatttagatgcacacagttctgtaggtctacctcgcttggacgattcatttattcaacaaccagaaggcttgactttactaatggatccagtccattatcttgattaggcccgtgattgggcctggaacagccaggctaaaaatatcttggaattacacgtgtcctcaatccgaaaacatggataacatttacccctgaagccttcagaactcaaggggtttcagaggcttgcattcaacattccagatggcatgaggctcgtcgaatacaaggtttatagctgcacggagatcctcctaatcatggttcaaagcgttattatgacctagcatgagcccatgggctactcgaagattttggatttcaatattagagacttgaactctttttattcacgaggaaacaagggtaggaaggcaatttgtgcagcctctccacaccagatttttcactttaggtagtacttttaacgcccacatagccttccaaaatgcagttgagtctgaagtatcctcttgctcgaagcttgattgggttagcttatatgcactttataccgagtataggcatgaagtttcattaatccatacatagtgatcattcccctgaagtaactgagtaggaatggattcaagtaaaagtcggtctctatcttcaaacaagtctgccaacaactcataatcccagctttgaccatcaatagccaataagttagcaaccttagcattgtgaaggacaggatgaacagaggtgacttatggattatcattatcagttaaccagggctcacccaacacattgatatttcttccattttcgattctccaacgcaccccttttcgtaccaaatcttgagcttccaacaaacttcgcc

SEQ ID NO: 224452 - DNA, 1559 bp, Cannabis indica
ttcgaaaagaagatcatgtaatagcccgtcgaacaacttgatttccttgtctaccgatgaagcttcttcatatagtttcttagaagcttcgggatcggtaatagtatcagctttgccatgtagaactagaaagggtactctcagtttgttcaaattttgttgcaagtaagaagttattttgagaatctcgtaaccggttcgtacccttatggagccggtgtacaccaatggatccgaatacttggcttctaaagcctcgggatcacgagaaaccggtgtgccctttttgtttgctgcactaacttgatatctaggtagcaaaaatgagacaatgggagcaagaatctgccacataatgttttcgaaaattaaaaaaagatcagatgagacatagaaacattgcgaatttgatttagacacacttatttgagtattcggttttgtaatacataatggtttgagaagtaaaatctaaagtattggattctcactgcgaaaattggatgggatggctgtactccaaccgcaggcgatgtcaacacgaggcccgctacattggcttccactttagggtcaagcattgcctataagatcataaaaaaatgcaaaccagtgtaagtttttgaacacactagtaatgttttaaggaaaatttcgggtaatgcctacaatgtctaccttaagtagaatggctccaccggtcgaatgtccaaagcagaaacacggtagcccgtgattttcggctacaaccttctcaatgaaagatttctgcatagaataatgagatatgattagtcctagttcatatctgagtaatgaaactttgaataatagttacataccgtatccgaaacagcataatcaagagaaggaacatatgcatgaagtccatcactcccaccatgacctataaaatatgagaatttaaagatgaataatagattagatgaaatatttacactcttattgttagattctttgctctactacactctttttcttcctttttccttaaaccgaagtggcgcaaagtatcccggcccaaattcaaacaaaactatgcttatgttttctccattgtagggagccaaaaaaccgctaaaattgaaaatctggcttacttattaagaggagcttggcaagttagcaatgaagcccaaataatgaatccctgcaacatccagattagatgttggagaatgttgattcattaactaatgacgtttactctaaacaaaaaagaaaagagaaaataactctctaacatacacatacacatacaaatcccactattatacatggagaattgtcaaggggcaccagtattattggttactattattgatacaattcagtatcaggtctaacatattttaatcgaaaatagaatatgtgagactcactacccatgaccgccagtgccccatacatacatttatccccaagatagaactaggaccgtgcttcaaggaggccaagttaaaaacaaaagggccaaacatattacataggacatggcaagtggtgtataggttgaattcaaatttttttaaaaaaaa

SEQ ID NO: 224453 - DNA, 2017 bp, Cannabis indica
aaagatgaagtcaaaaggttgagtgccaatgacatcatcactaaagcattcaattcgctttgggtatccaaccctgtattggtatccaaacctaacagcaagtggagggtgtgcatagatttcacctacctgaataaagcatttccaaaggactgcttttgattccaaggatcgaccagctagtagatgctacagctggacatgaaattctaagcttcatatatgcttatttaggttacaactaaatcaagatgcacccactagatcaagaacacacaagtttcatgacaaacctaggcctatactgccacaaggtcataccctttgggctgaaaaatataagggccacctatcagagacttgtaaacaaaatgttcaaagatctcattgaccacaatatggaggtgtacgtggatgacatgctagtcaagtctaaaaaagttgggggacatgtggagggtctagatgaatgcttcaagatcctccaagagtacaacatgaaactcaaccccctcaaatgttcatttagagtaggctcaagtaaattccttagcttcatagtcaatgccagtagaatagaagcaaacctaagccttttggacatgaagtcacccacaacaatcaaagaagtacaaagcttgacgagacgtactactatactaagcagatttgtgtccaaatccacgaaaaaatgcattcccttctacaacatactcagaggcaacaaaaatttgagtggacaagggagtgtgaaaagcattccaagagctgaagaaacaattggcttaacctcctgtcctatcaaaacctttggacaatgaagagctgggtgtgtacctgactatcacagaacatgttgtgagtgcagtcttgataagagaagaaaatggtatacaatatccagtatactacatcagcaaaagactaattgatggtgaaagtcgatacccactcatggagaagctgacatacaacttactcttacaatcaagaaagctaaggttgtacttccaagctcacccgataagggtgtacactaacaaaccattacgacaggttttgtaaaaacctaaagaatctagttgactactctagtgggccattgagctcgaccaattgagatcacatatcaaccgagagtggccataaaaggccaagctcttggagacttcatggctgaatgtacaagcatatctcttgaaatctctcaagatttgggagaaaagcaagagccaaagaagaagcaagagcaagagcagcaacagaaacctgaagaatcgacatgaaaattacatgttgatggaaattgcactaatcaactattcattgcaggcattgccctcattaaacctaggggcaacaactgcatagggcaatcaaatttgacttcaaggtctctaacaatgaggttgaatatgaagtcccaatcactggcctcaagttggtgcacgaagtacgagttgactacctaaacgtacacatcgactcttagttattatttaatagacaaatatacgatacatgttatataactcgagctaataatttattgctctaaaaattaagtataacactaactaaatattctcattcataataaatacagttttatgtttacagacaattatattcatcgctaaaatattccaataaattaaattattttaaactcctcatactaaacatcctttatagtatttctacaccatttagagctctcattcactttcttttaatagatttaaagttctcatttagttgatacaattatgagtcaaacatgaattatttttatttttgaaattttgattctcattttaaaaaataaaaagaaacttgaataaacatattttttaaaaataaatttacctgtccaattaataaaacaaaaaaatactttaaatttaaacaataattatagaatgcagccttttgtttttgaaatttttaaaccacaaaaataatactttttttatttttgaaattttttctttctaaaatttaaagaaattataat

SEQ ID NO: 224454 - DNA, 1143 bp, Cannabis indica
tttatttattctgttatatttcttaattactttattctgattactctatagtaaaagtgtaaagtcaaataaatttatattgtcctcttttatttttacccttttttttaaagtctatcatttttacctcttttttaaatattataccaattttgcccctgtcacttcaagatactctccatgtaactctcttatgtcagggtattttgggtacaatatatctaaaaagaggtatttttcaattaaatataaaattagaggtaaatttgattaatagattaataaaagtggtatttttcaacttatcccctaaaagatgacatcttgcttctattgttgggcctatatgttggacttatcattatggaggtataggtcatttttaggtgattattttacaattatttcataaatacctaaaaataattaaaaaaaaaagtttatattttaatggatttatagttttttttttttacttttttaagattttaacttttttttttaacaaaaaacagtgctattctctattgtttacgttgttactacgggaaagtaatatgaaaataacttttttttctaaaaacgtgaaaaaaaaatataatttgtaaagatgtaaaaatacaaattctgttaaaatgtaaaaaaaaatgtctgatttttaagtacattatgtaaattttcttttcacaaattgtaaaataatgtaatacatttctaattacatattgcaatgtggtgagtgtcgagaatttacaccatcaatggtaactagttactgatttgcaataatttaaaaagtaaatattattttggaccctgtattttgcaaaagttactaattggacttccagttttgttaaatgacataatggaccctgtatttttcaaaatggtaaaattagaaccctgagcttaatttttgacaacttttttttaatacaatcaacttgaagacagttcttaacatgaacagatacagaaaatataaacagtgttgtcataacacctctagatcggattattattaaattttattttgacaaaaaatcagtttaggatcctatttatactattttaaaaaatacaaagtctattttgtcatttaacaaatttaagtgtctattaataatttttataaaatat

SEQ ID NO: 224455 - DNA, 1146 bp, Cannabis indica
ttttaattaagttaatccaactttaatcactttgtcccctaaaaaaaaagcttgatcaatttgttgatcaaaatgttcatcaacttcaacacatacctcaaatagctaaaaatgagcaaaaaaaattatagtgtttggaaagcataattaaattacataaaataaaattagtgaggatgttgaaaaatcaatcaaacaacttatataatactattcatagtatgcgataactcaaattacttaatctcattaaaaaaattagaataattttagaataataattcagacacactcaacttactcacatttttttttacatagattactctaattaaaaataattattaattatatataataagtgtatataatttaagtgtgtataacttataatttataattttatggtatgaaattgttgaatgtattttaatgctactgaacaaattcaggactttaacttaaaaaaggcactaatgtctcccaaatacaatttttaaacttataaattctcataaaattggtaggttcttccgtaaatatcggaatcaaatttaggaaagtaatatgtatttggacataagaaacacatgagaactgaatcgaacaagaaataaaaatgagacaagagaggaagctgtctacatctttctgagcttccgagaatatatataaaccaaaacaactcattacatttacatgggtcaaattcagacagtcggaccacccaaaccacccttctctctctgtctatttaatttaaaagatagcttttttttttgacagaaaataaaataaaaagaaaaatctgaataaaaataatagttattttagttatatcagtccttccttctagaagaaatttgaataataagaagaagaagaagaagaagaaggacgatctcattctcattacatacaatcaatcaataatttgattttctaccttctacgtgggggagaggaaagtagacttttttattggattatttattgataattttgattttaagtttcgatctcgaatgggtttttattattgtcgccacccattatgacttcttcttctcctttttcttagttttcttgtagtagccgccctctctctcctgttcctttgtacttttctctctctagattctctct

SEQ ID NO: 224456 - DNA, 970 bp, Cannabis indica
tgtaataatgacaccttcaagaacgacggatgggttagccttcgcgccaaaaacatggcttatcagtttacttgaataatttaatattaaaaaatagataaataaaaaatgatgtatttttaaaaaattattaaattaaaaaaattacgtaaaattaaatttaaaacatttaaaattagataagttatacttcattaacaaaaatccaaaataatcattttttttttaattataatacgaaataaatgaaattaaaagtttttttaagaaaaataaatataaaatgaaaaattaataccataaaatatcttaatttgaatctctaagtactaatttaaacataaatatattttgtacaatcctattccaaataggagtcagttaatttttcttactttttttttaataataattaaatgttttatttgaaaaaataaatgaaattaaaagtcccttaaaagataaaactcttttacgaaaaataaatataaaatgaaaaatcaatactataaattaaaatatctttcaaccgtacaccaatacaagtatatatgtactaattcaaatataaatataagccactaaggctagcttagtggtgagggaggaatgggaaaagggagaggtcatgggttcgaacccaagacctttaagctataagctattagttgattgtaagaataccattacgctacactcaaaaaaaaattcaaatataaatatatttacatctttttttttattattattattattttgtataatcctactccacataggagtcaaatactcctctcactcctctatataaacacatacgtacctcataaaatatgaaacaaactactcattcattcattcattttagtttcaactttcaaacattaagattgttctttgtgttctagtaagtattaaattaaagcttctaactatttcatttcattatggaatctacgcctttcaacaa

SEQ ID NO: 224457 - DNA, 1732 bp, Cannabis indica
ttttcttaaatgttccccattccaatcccttggtaccagaacgagttgcattttttcatcatacttacccagtttgtatgcttctaattcgagaacttcgaccacttgatatggtccttcccagttaggtccgagtacacctgccgtactgtctttggtgtttagaaatactcttcttaagaccatatctcccacaaagaatttccaagccttcacttgtttattgaaataccaagctactttttgttgatgggccatcaacctttaagtttgttgtggttcgcttctcttttatttcattaagtgattcggcaaggagtacgtgatttgtttcttggttgtacatcaatcttctgtgggatggtggctcgagctctacgggcagcattgcttcatatccatatgcaaaggaaaatggagtttgtccggttgccgttttctcaattgttcggtacgaccatagaacttcaggaagctcctccggccagtttcctttaccatcatcgagtcttttctttagtgtatccttcagggtcttgttgactgcctcaacttgaccatttacttggggatgcgccactgcagagaaatttttgatgataccatggttcgcacagaaatcactgaaggactggttgtcgagctgtttgccattgtccgaaactattttgtatggcaattcgaaccggcagattatgttcttcacaacgaagtcttgaacttttttggatgtaatggttgccagtggttcagcttccatccacttaatgaagtaatcaatcgcaaccactacatactgcactccacctttgcctttgggtaattgtccgatcaggtcaattccccaaatggaaaaaggccacggactttgcatctaagttaaatcgttgcgcggagctcaaggtatctttgaaaatctatagcatttgtcacattttttaacataggcctttgaatcctcgatcattgtcggccagaaataaccttgccttagaattttcttggacaaactctgcccagtggcgtgatttccacaaaatttatcgtgcacttcagacaaaagtcgttcagcttcttcttaggtaacacatctgagaaattgaatggagaaccctcgtctgtacataattccctctactacgatataccgtgcagccttccttctcatcttttaagcttcatttcgatcatctgggagttccccagtattgaggtaggctgctattggcatcatccagtttgtgaaagtatcaatcatttcgatctcttccgtgccattgatgctaggatcttcgaggaactggataggaaccaagttcgctttatcacttacattactactcgctaaccgagctaatgcgtctgcagtcgtgttttcttccctcaaaatttgtctgagaccgtagcttttaaattgtgcgatcaagtcatgtattttgctcagatatgctatcatcttttctcctctagcctcgtatttttcatatacgtgatttaccaccagctgtgaatcactacaaatttcgatatgttcggctttcatctcccgggctagtttcaggccagcgatcaaagcttcatattcggcttcgttattggatgctcttccaaacttgactcagctgcaggtgttgcccccaggtgtgacaagggcgattcctgcactggatagttaatctgtagccgacccctccatatgtagtttccaagtcgacttgtcttcactgttact

SEQ ID NO: 224458 - DNA, 2722 bp, Cannabis indica
cttttaagtttcaaatcttttattttagttttgactattaagtaaataataaaggctaaaacattgtatataatcaaaatcattaacattttgaaatgtagaggtaaacatagacttttgctccgataatataattttaggcttttagcttattaatcccaaaaagctaatatgacaatgacattagaaattatatctcacatatctaaacaactatgttagcaaattaataatgatatgtgcatctaaacattatggtattattatttttaacagtgatattgttttctaaaaactattcttcatcctctattttttttaatatgtatttttagtgtatgatcttaatgaaaaaaatttaaatgattatgtatctccggaaagttgtaagggagatgccaagtttatgattaaatgataagcaaattcagtacataatatttctaaaatatcagtttctacgattgataaatgttttttgttcatgatatgagttcaacaatttttttttcttccttttctatttctcataattttattcggatatataatgcctaaaaatgttgtgaatgtgtgcttcctattcctaacacacaaacacaaaaataataataaaaaaaaactcgaaaggaaatatatctttttaaaaaagttctagaacgaatacatgccaaacatcatcgtatatacattcttcttcactagaaaaaaagccattgttgtagacaatttgataaattatgaatactaatacgaagtaaaaaaacttagtttgaatattacatgtatatacgaacacacccatttcaaattaaagtaagagagtagaatatatcaatcaacaggtgggagattggttaggaagaagttataagtcactaacccaaattaaacttgaatttcattttcaaccatagtactaataattctcctttatcatcattctactattagctcgaagtttccttccttcttccgattaacaaacattttaactaaaataaattagctatcaacggtaatccacctgtccaaacaatatagcttacaataataataataatatatatgtatattatatctacaaataaagaaaagaaaacacccaaatacatcatcatagtctagtcttagtcagagattgaaggtcaaaaccgccgtctcaaagatccctctttacattgatatcaatctaagaaaaagtattgaccgatcttgaaatttccattacaccaacaacaagacaatgcactttttctttgtttcaagctgaccatttgttaaatgtataggcaccatatacagattaccatcatgttcttaattatatggattttacatttgtattattattacttttgtttttttggtaaggaagctccagccaccaaacacgaaacccatttaaattaagcgccatttttacaagagaatgtacaataatattcttagacctcttataatgagataaagatatatttcgaaaggattttcaaaaaacatcaaaaatatcattaagcagaataaacatctttaccattaataataagatccatacggagataatcggagaaagctgtaacaatcctaaactccaaccgaaggcaaagggataggccatgaaatagggccattgcctacgcaaccataagcctcgaaggtaccaaaattcaaactttgtaaatgtaaaatgtgcaatgtaaacaaggtccttgcctctgcaacatgtggctcgaaggtactgttgagtttagagaggaagagagaacgattgttgaatgaattactttacatcagaacagaaaagaatttatatacaacaagaagaacaaagcaattagttacagaattggttagactgatagctagcaaaatagaaaactaactaacttaataacagacagtaactaactattaacagttgctaaatgctatcattaacagcccccctcaaactaagtgtgaatagagaaaccacactgagtttgtcccttaaaaaaggaaacctgctgctagaaatagccttggtgagagtatcagccaactgatcttgagcagggacatgacaaactcgaagctgattttgtaggactttgtcacgaacaaagtaaaggtctatctcaatatgtttcgttcgagcgtgcagaactgggtttgcagcaagcatgacagtgctcaagttgtcacaccaaactgttggtgttgaggaggaaacaacctgtaatttagagagaagagattgcagccatgtaatctcagctacaactgcagcaagactgcgaaactcagcctctgttgatgaccttgatatggtctgctgtttcttggacttccaggcaataagatttgaaccaaatagcacacagtagccacttgtagacctcctatcgtcagggtctgaagcccaatcatcatcacaaaatgctgagatatcaaagtgagatgatctctgaaggtttagaccgtagtcaagtgtgcctgaaaggtatcttaaaattcgtttcactgcaatccagtgagactccaatggagcttgcataaactgggacactttgttcacataataggcaatttcaggtcttgttattgtagcatactgtaatgctccaacaatagaccgatatagagtagggtccaagacagagtcactgccaaacttagagagtttaagaccattggtcatgggtgtgctgctggacttggcaccttgcatctgtgttct

SEQ ID NO: 224459 - DNA, 2572 bp, Cannabis indica
tatcgttttacccttctaataatttacatcttttagtaccattaatttatcaatgaaagtataatttatatccaatctaaatttgtgcacaactttttagttctagaattaacacttaaagggaaccaacattcgattcgttaggaaagtcaaaattccatgattgtaaatcaagtttgtagccatccatattattagcttcccaaaacagaagttgtaattaagaatcatcttctctgagaaactttaagagggaatcaaagaaactaataacatgaacatgagttcacgattactgattaggattcatgtcattatactattgatcatcattgtgatatgtcttaagtttttataatgaacgacatgtttgatatataaagacaacttaattatatatcgattcatgttatatataatctctattatatacaacatcttcacttaattgtcatactacatcagcaatcctaggattgcttgcatagaataacgagcgtcagtgaaccatactagcaaccgttgattaaatattttataactttaatatgttactgactattttattcatagctagtcttaattctttgtacaatacgagagtcacaacctcatatatgagtaagaaatttttcaatatttatatataaattaacattgaagcatatattaaaatgttcactaatatttattatcataaatgtttttacatgtttttaaggttataaatcctaacacttaataaatcgagcaatttggttagttaatccacttgaatcgatctttcttttattattattattattatcaataataaatttgatcacaatgccaaaattaatgttcaaatagttacttaccgattaccacacgtataaaaaaaatagttatgcgtgcaacaaaatatttttaccttatttcggtattgtaaataactcaatttttgttttaaaaaaaaaatatagtatgaatcctaaataattataacttacatgattattaaaaaaaagtatactaaaaattgaaattgatatggtatatcaaaacatatttttaacaaatgatatcactcttttaaggtgttatatcgctattagtataaattagtattaagttttacttattttattttaataaatattataaaaaatcgctaacaaattatcctaaagttaagtactaagtgtctcgtaccaattctctttaacaatgtagctattattaatttatgagaaatgttaaaaggcaccagtgatacctagtaccttcctatgtatcaatattgttattgttctaattaagtatcgggtcccatataatttaatataataacttttagggagtatcgctagccaatcgcaacgcaatatgtcgaaaaagtactaccactagtgcctaatagcaatgctgttaatttatagttatcaaattatatagaagcattgaatttaagtcgtaatgaccggttttagaggagagaattgtgagttgttggaataatatattgttatgtagtccaaatcttattggattctagagaatctgccactcagtgcaagtgaagcgcactcacatttaatggacacgtgtctacatttttcttcatatccaataatttactgacacgtggccatgtgttgagctttattattgccttggcaaataagatagtgacacctaattcatgttactaaaaccagtcaaccgactttttctttgtaaagcaaaatataaaatttaattagtggacgagaggagtcctctcttaaatatatataattaattatcattattacagaatatagtatgtggaaaatagcaataataatagaatatatatatgatgaaaactatataataaaaaataaaaatgatagctaatgaattaaatgaatcagcaaaataattcacttgatctgtaagcacttttataataaacatatgcataaaaagaaaaatccaatataggttgtacaaatcatatatacacattattaataatatatatgctaatattaatctagtatctttctagagccaactataattaataagtgcatgtaaatatagtctggatttttttgacacaactcgaaattatcgacataaatttaggtggcaagaacacaattaaacatgaaaaaatttaatatgaatttaaatatgatacaacaataatatatattggtacgatacaatataaaaattatatacttaagtacgatataatacaaatatgaatgatacaacatgtaagtacaaaaagactaatttaaaatgcacagtatgggacaagccaaaaatatacagcacaatacgttaaaaactctacaatttattattaatgataaataaataagtatttgtcaattatatataacttaaaataatatcaaattttcaataatattttgaatattataattttataattaaaattattataaaatataaaattaaaattatatattcatttattataaattataacataaaaatttgagtatttataagtaaatattcaaattataataattttatttttctaatgtaaaatattattaaaaaatta

SEQ ID NO: 224460 - DNA, 1998 bp, Cannabis indica
cttattctcatcggggacggggcagggaatcccctattgtaaaaataaaatttattttaaaaatttaaatgtataaaattatttaattacataaaagataaaatattacatattatttactattcaatatagcaattattatacaaaagcacaacttcgaaaattgtaaaaatgatattaatatactaaaaaaaatacaaacgcatatataaaatataaaatatttataaaataataattaataattaaacgagtccccgtcggggcgaggagtgtcatccccgtccctaccccgtttaacgttcggggttaaaatttgatccccgtccccatcccgttccccatttagacgagaaatctccgcgggccccatccccattgggaaaatgtgcatccctaatcttatctaagtatatatagtttttcaaataagtatagtttcaagcaatttttaatttaatttgaatgccaaaaataatgtttacgcattcttttgtcataacgtacataattaatgatatttatgccaacaactgtaatcaaatttaggtgtaattctaaaaaattgacttaatttgatatattattggattatttaattataaaataattatgttattagttataacaaatgttccaattatgatagttaagaaatacctctttgatatatatatatatattaatcaaaaatatttttatattatattttattaaaatatactcatttttgtgagtgggttgtctaatatatctcactctctacttaaatttagcacataatttacattaacttaaggaggattagtaagaacatcatctataaaagtaggtatatttaaagaacatagaaataaaattaaaaaaattaaactatataaagtaaagggagtattcaatgtaatttcttcattaaatactatttatttcttatcatccataagaaatgtatgtaattattacacggtataattagttttaaaaaaaaattttgtactataaatttgtttacttttagtcacaacaaaacttatgattgaaagggaaaaaattatgactaattataaattatcatttttatgttgtggttaaaagtattagtcataaaaaattataatttattgtaactaaatgtgttttttatttgtgactaaaattaaattattaacaacttgtatctaaatagtattttaattcacaagtaactttttgttgtgactaaacgtcacatttactcacaaaaaaattatgttatgactaaaagtttgtcactaaagatattttttttataacattgaataataatattaattaattactaaacaatattaagtttttatacaaatactaactattttgtagaataaaataataagaattatatgtaataattatattatattcaaagaaaccatagatatataaatatatatagtgtaattactagacttatttacgaaaccatagatatatattatatatagtgtatagatatatatatactttttggagccttttacacaaatatatcaaatttgtattgtttaatttattataaatctatgtttaaagtttaaggtggtcacaaattcaaaactccacaccttaacttttcttcttgtattattgttggaatttaaatttagattaatttaaaatattattattattttatgttagtcaattatataatttttattaaatattaaagtgtaaatattggtaaatctattaagtattatgatatctttattatttagtatcattataaagtgacgccttataaatagttactgatttttaataattattattaaacttaaaataagtagaattcaataaaaaaatttccttaataatttactataaaaataaataattgtctcatttaaattttatttctagctttgttcccaactcacttacacgccctataagcagcctcttatgtcattaggtttagttaatataattgaaacaacccacaaaaatggccaa

SEQ ID NO: 224461 - DNA, 2255 bp, Cannabis indica
cttggacctcgaacctcaaactcagacctgaacttggacttgcactcaaatcagaacccgaccctagacctcagatctagccttgagtccagggtctgggtttgggtctgggtccagatccaggcgtccaaggtccacgtccgggttcgagttcgggtccgggtcttggtctggggtccgggtcaagggtttgggttcgggttcgggtctggttcaggatctaagtctgggtcagttttgggtctaggtctgaggtctggggttcgagtctgcagcattcgagtctgtgtctgggtatgggttcgggctgggatccgggttcgggtttgagtctggattcagtccagggttcgggtccgagttcatgttcgcgtccagggtctggggacccgggtttagtaggttttgccgtcaaaattttagcttttgttgttaagtgttaaaagatttaaagttcaagtggtttagccgccaatatgatcccttccttttttaacaggtttttccaaaccaaaataagtaaataataacaattttgtagttgtagaaaacataaaaaaataaacaattaatggagattttttcattaatttgtattttctcaaaataaaaaattttgtatttctaatttttcttgtttagaaaactagttgagaagatcaattgtttgggttggtaaacttgtaaattgtaaacagtgtgattcttttgtctttgttctgttttggctgcaatgaaatttcgtctcatttactaaaacaaaaaaaaaatgtaaataaacaaattatttaaaggtagtgtttgtatattaatcagaacagaagtaagattttatttatagtaaataatctgaaagattgtacagtattactaagtcactaaatagttttttttttccttgacagtaaaagtcagtatgaaatggcactatagggcaaaagccacataagtactctcacacttgatcatgtggctattatatagtcactatgtaatcgtaaatctaacagagaatttattaactcctaccgagcactattaaattagtgtaaaatatgattttttttactgctacattgacttacatttaagtgaataactttacagactactcatatataattatatatagttcactttcaccggattttttttttattatatataaataatgtaataatatggaattcttagcaccatgttgtctaaatattattgctgtcctcacacttggcatctaattttagctgcaaaatctttatcagattgaaaactcctcagatataattcatcagtataacttttttcgaacctaattataaatatatcccaaaataatgtcattgaaacctacgacgtccctatatatatatatatatatatttatttatatatatatatcacaggtaattaataacctatgaactaatgtgcttgattttgtagagaaaatttgaacgtaaatattacgcactacgtagtacgtactaacatatttaatataatattaattaattcatcaagtgctcattaatgttaatatactaattatattcgaaataagcaataaataatagtttataattaataacaaaatatcacaaaacctttattacggaaagaataaacacaaaccttttctttcgtaatttgatcacgacagttggatatagatgacgtggcataatattagggtttcccacctaatatttttttccatctcagaaccctcaaaataaattgatgattattctctctctaattccacaaaatactaactgtgaggttgaatatatgccacctcaaaaatttatatatagaatagctagggcattccatttcaaaaaaaaaaagaaagaaatagctagggcattttgaagctttaattacttggatagtggacttatctaagtgaagtgagatatctctatgagtctctagacagctttattcataaaaataaataaataaagacttttccttttaatagtctaatatatttatatatatatatatatcttattcttagctataacattcatggccatggaaagaataatataataggctccacaacacaaaagagtagctatgaacacaacacaactacgtactctctcttgtcaatcgacaacttacaacaattcccatgtgtattgtcctaacaaattaagacacaaaactactttatattactaagcaatcataatgagagattcttatgtgtatatatataaataataaacaaaatattt

SEQ ID NO: 224462 - DNA, 1540 bp, Cannabis indica
tgttgacaacactgtaattgtgaataaatatatgttctggatttaactgatttcgtgcatatattaaatatgtatagcatgtaaaatacatgttaacctaatcacttcaaaaatcttaaattgataactatcaggttgtaatgagttttatttagggcacaaaacccaacaagtctttggctagagtagctatgatttgttggggtatatggcggcctcaacatgatatggtttagaaacagaagaggtagtcgtttaatgaagtggtgtcgattgcattcagtctctagatcaatgaagtaaagctcacgtcatggaaagtctttctcattgaattcattgcatggatgtgatggtgttgagcgttggatcaagcctgtagataattgtgtcaagattaatgttgacaaaaccattttcttggaaactggtaattatgggattggttttgtggttggagactcatccaggtagcttttggtggctgctacttgtcgtcatttaggcgttgttgaatgtgactgtcagtagtcccgtgatctataaggagaaataccgaataagttgtgcaatctcacatcgcttaaggaaggtcaagtttgatgattctgagactatgtaggtatgggacacaaagttgaaaaggacttaaatggattgattggtactgcctatatcagcaaggtgcatctattttttgatagtttatcacgaaagaactccacagtatgcttaatttggagtaatttcaggatgagtgaattcctatgaagtttttccaagaaacgtgcaagtgaggacaaatcataatggaaacaggcgtgttggtctgtagggccagtttttagtccaagaagctgccagagtgatgtactcgtgtataagagccataaattcgtgggggaagatacaatggaggcttgaagctagccaggacattacattaaaccaatggtggtcgaggccctttgaattaaggaggtgctgggttggctgaaaactcaatcattcatgaagattattttggaaattgatagtcttttagctgttcaagctatatattaggagtaatttttatttgttctctagttttggttttattgttcatgattgtcagttgttattaagtttttaaagtattgtgtctttatatttttgttaaatggtctatcaatcggatcgctcattatctagctaggcaatgtcaatgttgtgttgatatttttatgagggtgattttccctttgatttgttatcttctatttggaagtttgatctttcattcaaaaataaacatttttataaatatcaattaatcatgtaaacaaagcaattggttgataaaagtgatatctacttttttattgataataaattaattatataaaaaaagtatagttttataagagcatacaacttaagagcatctctgcaaataagtagtgaaaaattaattatagctcatttaataaaaagcgtgcttcaatagtatgttaaagagttatgtaaatttggcagatattaaattttgtgccaaatt

SEQ ID NO: 224463 - DNA, 2680 bp, Cannabis indica
gtatcaatgtatcatttaaggaggtacattgtaaaatttctctatatttttttattgtcaagaaaaaaaaattgttacgtaaatatttagatttaatttttagttataataatacttttttgtaagtatttagtttttttagtgataagtaaattattacatagcaattttttattagtatatgtcactaaatttttacttttttaaaaaagaattagtttttagttctaaaaataaactcaggtagtagtactgttagaaattaaacttaagtatttatttgtaaccgaaagttaaacttaaatatttacgttgtaaattacttttaaaaaaataataaatatttaaaaactaattaggatttaatgtaatattaatagtaatggtaatgataatagtaatagtaatgtaatagaataagaatagcattaggaattgattacgatgtttgatttgttgttgcaatgaaaattagaataagtgataaattgacaaaattatctcctactttattttttaaatttatataaagagatggtattatagtcattttaattttattttatttagtcatttgtgatgtaatcctaattacgtaactttttgaatgtaatggagattctcatcactatatcactttttaaagcaaactaaatattgtaagggtaatcttgattctattacgatcaccattacaataaactaaatatgattgtgtcctccaaatttttcaaacaatcaataattcttttttaacgtgaattgtttaattcaaatacttgtttccaatattactaataaacatctgatgtggatgaaaatttaaagaatataattttgctacatattaaaatttaagagtataatttaatacatataaaaattaggagtgaacgatttgatacataatatccttgtatatttttttttttatttaaacattatttatatatatatcctccaatatttacattatgcttatttttgttgaagtgtttacatatattattttagatgtttgaataaaacatttgttataaatatattaattagaaaacccatataactactaaattataaaggtaacttatacaatgttatctacatttaaataataaattaacttaatagaatttccatttacttaaaaagaatagcaaaattaacttgtataataataataactagggtttttttcctattaaaatgtgagaactattctatgatcataagttagaatcttcttctccaagtttatgtataggaaagtaaaaatgaaatagtaatatatataccacctacctacctagctagttaattaggtaatattattatactacttaggctatgggtatgggtttcaattggtggtcaaattacgaaactacccccatacttgtacgtaaacattaataatatgcatgtatgtcggtgaacatagggcagagtcaaaattacatgggaattaaaagttagcatttaaattagtaatatttatataaaaaaaggaatataattagtgggttaattttgtttttgtttatattaattaattaaaaaaattaagaaagagagagatggagagggaaacatgggagtagccgaggaaggagtgtcgcctcctataatcttactttttttttttttttttcaaatattgctttaatttagaataaatatatgatttttgcctctcaattattacttttgtagttttatccttgtactttttttcagttgcaaaaatcctttcaaatcatacatatcgttacaaatatttttctttaattatatatatatatatatatttgtaggctaattaaaatttttatttcttaaattttaacatgtattaaattatgctccctgaatttttctgacagttaaaaatttttgttggagtactgagattgttagatttaaggacttttgtctaatttcattcaattttactatttaagtgattgtttatgtactaaatcatagtcctcaactttgatatctaacaaatcatgtcattcgaactttgacatgtactaaatcatgctccctgaactttcatccatgttagatttttttactaaaattggacaaaaatctttaaattcaacaatctcaatagtttaatagacatttttaacgaccttaaaagttcaggggcataacttgatacatgtcaaagttcgagggataaaaatcctaattaacatatttttataataatttacttatgtgattatgggttacagatataactgtagcacaaaggcttatttaataactttaagctatttaaaattcaatttattaacactaaacatacaaataataattttaagaataataaactcgatattaaattacatacattttaatttaataataatatgataaatagttatatgttctaaataatggagcgttgtggttgtggggtccaacttgtgatatatagccttattaatggagttttgaaaatgaattagcttagttgcaaaaagtggggctgttttttggagatttaattttttgcagcatatatatatatatatatggtaaaacttggtagcatcaatttggtaatgatgatgatgatagagatatcaatttcaattcacagctagcttgagagagagagagagagagagagagagagagagagagagagagagaagaacaa

SEQ ID NO: 224464 - DNA, 1454 bp, Cannabis indica
aaaaattaaatcaataaaattcttccatttaaaaaaatacaaaaacaaaactaaaattctaatcgacatgttattgcattatattggaaagaggaaagaggaaagagaaagagaaaagaaacaatgattaaaatctaatagttaacgtttgttaaccttgttgtagtatgtttttataattaatttagttttgccacgttaaattattatggatggaacaagatgaagacactatttgggacaacagattaccctattggtctcacaatatatataaatgtgcttagtgagtttttcgaaaatcaaattaaaagaaaattaagttcaaaaaataatattaagaaatttacaagaagagatttttacgtagttgaagtgttaaagagtcttagtccatgagtcaatattattaaatacttcagttataaagtatttaatgcttttttcatacaagaattttttaacactttgcataaaggggtgaagccttaattataggtattttagctaatgagtcgggcttactcagactcattagggtttataaagtagaaaaggcccactaatatgggaaatacaattaaatattaattattgggttgggtaggtaaggctcaatgtgtagacagtcattgttcgtacacagacgtacggttgacgataacagcttagcatgagttatcagtttggtgagggaatgttcgagtggcgagcgttggcccaaaaatgtgatttctttttgttgtgtgccttttcgaggcccgacagatgggacatgtagccaaatttttcaagattcttgttggaagagtgtcacgtaagatgatctctcggacgcctattcaacttccactcccgaatgactcttgaaggtatccatttttacctctttgaatgcatgttggttgaacgttagattatcttccatactatatatctgacttaatctttgggaagcaattatgagatccagacacctttttctggcttcacccatgggttgggtggttgatccatttggaccgagtagctttaatgggctatcttgaatgcccatatgtcatctatcacaaaatgaaataccaacaatattatcatgtaataataaagttctaatatgatctaacattacatcaatatcagtacatctatcctcctttaggaataattagataacttctagacaatcagatttaatgctagtatttgttgttgaattcccatttgtaagcctgcctaaattgcctgccaataactctacctgtaatggctgaagtacttgggtaagcatcatggaagaagcaaacatcacctgccccctctcatcccaaactacacaccccatatttgagttaccacctccattttgcacacctgctgtaatatccagtttaaaatagtatttattttttttttgttggatattaattgtacgaggataattatctcattta

SEQ ID NO: 224465 - DNA, 2016 bp, Cannabis indica
gtggattgctttcgcagaagagttgaggaagggtcatcactagaaaagttggaagaccaagcttctaaaatgacatcgttccaatgtggctcagaaagccaaacatttttcaaaaagaaagcgtttatctttttttcctaggacattgagaatgagggtttggattgagggagagttgtatggctcgatggtcagaaccaaagaagtcaaggtgatgtaaggtgctgtttggatactggcagtgccagatgctgttgccaacagcccaatcaagacgttccagggttcttcgattgccatggctgttgttggtccaagttaggcgaggaccaactggttgcaaagcttgaaaatcgaatttgtttataaaagtgtgaaaaagaggggaggggccattgcctagatttctgctagatttatcctcccaagttaaaaaatcattaaaaatcgcctaacacacaccaaggaacagaaatgcacgagagcccaatcctggataataattcccaagtatgagatctattagcaggattaggagcaccataaaaagcagtaaaattaaaactagaaaaaccagcagacgagataaaacagtgaatgtgattaagagaatagttagttatagttacatccgaatccgagttccacaaaagaaagagtcccccactaagaccaacacgggggacttcaaaaccaaagtcaaaacctaacttaaccttaaaacgatcaacagagttcttacacattttagtttcactaacaaaaagtaaggagggcttatacattctaactaggagggagagatttcggaatgctcggtcactcccaagcccccgggcattccagctgatgaaactcattcctcctggcaggcctgtgagtccacaggtccacagggcctgcctcatcacttgaaacaacctccaccacatcctgtcctgagtgaggtctgtgtcgcttcagcatctccctctgctcattccccaccgtagccaattgccttttgaagccactggagggaatggattggttcttcttctgggtggacgacggggtggcacatcgttgctgccaatagcaaatgccagagatgagggaatgtcagcaatgtgggccacaggaagcgagtccagttgggcagtggaggtggaaatcatcaggggggcttccagctggctagaggatggggaagatgaacctctggaccctggattggatgactgctggggagagacagaacatgataaaattccaccagtggccacggataacagagctacaaaatttggccctgagggtgcgagagagtgaagctgtccagggggcgcaaaggagtgggttggtcctaagttggaggggcctgctccttgatccacgagtggggaactccccatgttttggccagagctcagaaacagccctgcagcatcagcgtagtttgttgggttgttgtggaaagagaaatcttgttgcaggacttgtccacgtgggtgattgattggtattagattggtggtggatgggttaagtgtaggggcatttgggagggacactatggctggtgagttaaggataaaagggttggggagtattccaaaagggccatggtttgggcgtgttgttcctctcaagacattttcataggggaggggtgggggttgggtagattcatcagaggctctcatgtactcagtgcaggaggggtaagagtgtcctagacggccacaatagtaacaatgatcaggaatatcctcatatttcaattcgagccaggttggggaagctaggccaggaaacactattggtatgccacggggtaagggtttggtaacatcaaacatgatacgcactcgcatgtaagagccccaagtttcaagcaaagagagctgatgaatttcaaggagggtgccagcaatttggcccaacaatttggcaagagaaatggaccttcgggagaaagggatattgtgaacttggacccaaaagggaatttttctcatagtttctggggataag

SEQ ID NO: 224466 - DNA, 4691 bp, Cannabis indica
tcgcatgtgtccgcagttgataccttgttggctgattgagatgccaccattgatgacctatggatgcatctccttcgagcccagcagcgaatgaagcatcaagctgataagcacaggcaccatgaggaatttcaagttggtaacttggtttatctcaagcttcgcccctaccaacagctatccttagccaggcgtcgcttcgagaagctcgctgcaaagttttatggcccttttaaggtgacagagaaggtaggcgcagtagcctatcgactagagttaccagcttcctcatctatccacccggtttcccacatctcgcagctgaaaagagcacatggctcgaccctttcatcggcaactctgcctcctttgacacttgagttagagctgcaagttgcaccagaagcagttcttcaagtgcagcagcaagctacacatggcctggatgatgtagaggtcctcattaagtggaagcccctgcctgaatttgaagctacttgggagagctttgacaagatcaacacaacctttcctgaatttcaccttgaggacaaggtgaaagtgcacccccggggtattgatacaccaccaattaggtttacttattctaggagacctaagaaataagctgtaaataatagcagtaaataatagcagtaataatagcataaagaatagaaatattagctgaggtggcagttttatgcatgtgctatcaaaataattagttaatggttttgatagtgttgtctataaatattagtgaggattgtaattggacggaaggaaaaagagtcacgttgtaacaaagtcttgaactcagggagaccccaggcttctcgaattgcctggcaccattgttgcttgttgaaattcaataaaacttcaattgtttctactccattcttttacctgtcctagtgtgtatcacatacccctttttatttgctatactccactctttaatcctagggtctaacgtaggctaggctctttgaaaactataagaattcttgtattgcgacagtcgacctcctacacttttatttagttttgcactgtccctaaatgtgttgaaactaccgttttgcttccaatatatatagatagattatatgtatatatttcaatagaaagttagctatttaattttacattgtttgcttactgaattatgttttgatattagtttttcataaattagataatttgacagttaattataatggtcattttggttctcatcctacttatcagttgagctactctggtaataaataatttatcaggaggcaatatgatagtttctataagttagggaaagaagcaaaaagagaagcatttgaaagcagtaacatatattgtcccttttagttattgttgcatcttcaagagctaaattcctggtatttatgcagataggactgaagatgagctctattgctccatctgatttttattatgatatggaatactgcgttgactattcaacttttcgctccattgagatcggtaagttatttcatgcacatgatgtatatatatgtatgtatataacttaagtttgaggaacattctattgtttcaatgatatctttttattattattattatgaaataaaacctggaatatatacggaaaagatatgacgacatgatgtcattaaatctccttcataccagcaaaataatcccttagaataataaacatacacgttcaaaataggagagtgagagatatcagggtatatcaaaactgttttcagagcagagtaaaacatatgaataaaataatatctattccctttaaatcaagaatcatatgaaaactcccccttaagtttgggatagatgttaattattccaaatgttgaatatacaattaattgtaatatcctaactagaaattaaataagcaagaaatttgtcagctttatcatacggtgatcctatgatttcttagctgtcaatactccccctcaagcttgactatagatattgatgggtccaagcttggttttaaggagatcaaatactttttcaatttttataaaccctccatcgattttttccttaataaagtgatagtctacttccacgttctttgttctgtcatgatgaactgttgtgagcaatactaatagtagattggtggtcacaataaagttcgactagagcttcatacttagttttcaattcttccaatagtcttttaatccatattgctttgcacactccaggggccatggctctgtattcagcttctacactgcttctcgcaacaacagtttgtttctaatttcgctaaattaccaagttgccccattgtaaagtacaatatcctaatttagatattttgtctgatttggcctagtctgcatcaatgaatacttcaactttctttcatgagttctcttgaaaaataaccattcacttggagtttgttacaaatacgtcaaagctctatatacaacattgaggttaccttggcgcgggtcatgcatagattgactcactagactcccgacaaaagcagtttttggtctagtatgtgagagataaatgagctttccaactagctgttttgatatcttcctttgtcaactagttttcctttaagcacttggtctttgttttcgagttcgattggagttttgctggccttacaatctagcaatgcagtttctttaagaagatcgagagtatactttatttgtgatacaaaatacctcttttgctccaagcaattttcatacccaggaagtatctcagtgttccatgatccttgacttcaaactcttttttcaataatcctttaagtgacatttgtctccttagtattttagccagtgactattatatcattcacatatacaatcacgatagtcatttctccatttcttgtgtgtttaataaacagtgtggtctgttgtgtgtagccgagacccttgattacttttgaaaaacaattgaaatgcccaaggagattgtcttagaccatagattgtcttggttggctgctaatgaaagtaaggttctgatagtgttgagtttagcaacaggagtgtgatgagaacctgttacagattaataagcaagtttccaaaccacaaaaatagtagcaacaattgttaggaaaaacaatggaacaatagcttgagtatcatgagaatggggagttgttattgaattaatcgaaaacttgagactagtgtctcttacagtggtagagagcaaaagctctccatgatgcaaagagattttactccaaactttgcataaccaaaaaaaatgatagttgacgaggggttaccaggtggatgggtggagagttggaatttcaaattcagaaggaacttaatggatagagagttaccaagccttgtttcattgatgcaaaaggaagccttttctttacatttcccctgggtggtgcgtttgctgcaaaggcagcggagaagatgttggccacctgttcgtggattgcaaatatattcgacgattatggagatatgtgttggcagagtttgaattgtcctgggttatgccaaggtctgcttcacaattgatagcgtccaagctaaccggaatcaaacgcagattaaagctttggaaaacagtgatcttagcaacaatctgggccgtatggttagaaagaaatgccaaaatctttgaagggactactaaatcagaagcggatgtgtgggagcaagttaaattttggacagctacttgggtctttagaaccaaatattttgaggatttatcatttttagatttatgtagagaatggaagacaattgtataggggctgcaggtggttttgtttagcttttccctcttctggggcaaagcaggggagtactcttgccttagaatttctattttgttattaatcgtaaccatggttttcctccaccacaagtgaggcttttaatatataatggggaggatcctgtctaagacaagaggatctctcctctatttcaaaaggtggaacatgtaaaagtattgagtatctcagatgatagctgtatttggaaaccagatccatctggagttttctcttgtaaatcagctttttcctggctgacatcaaatccatcaactaggggcttggattggacaaagaccctatggaaaagttgtgttccatcaatagttaaagtgtttggctggcttgtggctttggacaaaataaatgtccacgacaaagtgcaaaaaaggaagccttttctttatatttcccctggttggtgcgtttgctgcaaaggtagcggagaagatgttggacatctgtttttggaatgcaaatatattcgacaattatggagaaatgtgttgggagagtttgaattgtcttgggttatgccaaggtctgtatcacaattgatattgtctaagttaactggaagtaaacgcagaacaaagctttggaaaacagcgatcctagcaacaatttgggccgtatggctagaaaaaaatgccagaatttttgaagggactactaaatcagaagcggatgtgtgggagcatgttaagttttgaatagctacttgggtctttagaaccaaacattttgaggatctatcttttctagatttatgtagagaatggaaaacaattgtataggggcagcaggtagttttgtttagtttttttttagttctcttctggggcagagtgggaga

SEQ ID NO: 224467 - DNA, 3045 bp, Cannabis indica
atggttgagacatagatttcaatcaaatgcttgctgggaataatggtatttatttgagtttgtgtcgaaattttttgaaatagatgggcattttactgattcgattagctgaaaattttgaactaatatttggatcaattttattgaaggtcattaattacaaatttaagggagtagggatttatatactcatgtttctcccacaagtatatttaaaacaaaatgggataatcttcttatcttttgatgtttattaatggcaatttgcttttctgtaactgctactaagtcacatgctcaatcaaaaaacataaatattaaaaatatcaaagctttttttcattgatggatcttttaggtttgaaatcttttaacgaagagtttcttaaaagactctacaatcagtttatatatataattctgttgaaatttgagtggtgggggtgtattataaaaaataaataaataaattaaaaatatctattttagtcattttattaaaggttaagtatgtaattataacaaaagcataagaatgaaagttaggcgtgcgtgattgctcgaagctctcttccatggcgaagaagaagcgggtaatttgaaagccagttcgatttctgcaggcaactgatacagatgtggaggagaaaggcgaagcgcaggatgaggaacgaattgcgaatgggtgtactgaaggtctggatctgattgctgaggcattaaacgccggtgagatacagtgcgcaatgaggagaaaggcgaagaacaggttagtgattctcgtactgttgtaactctgatttaattgaggaaggagaacagaaatctcctcgaaactgggtagatatagttgataaggaagatttgcaatcttcttctcaacacaaatggaaacagttcacagtagagaaaatctcttttcgtgaacctaatctctcctttgctgaacctctgattaaagaagggattaagatagctcagatagatgtggaagaagtgaaaatgcaggctgctaattggagtacggaaattatctgtatggtggttggagctaatccaccattttcaatttttgaaggtttcattaggagaatgtgggggaagttagggattgctcaaattgttaggatgaatggaggctatacaatagttaaattccaagatgaagctacccgtgatcatgttttggagcatggtgtgattcaatttgaccaaaaaccagttattacaaggccttggaccacagacttggatgctcttcgtctcatcaaatcggttcccttgtggattcgattacctgatctagggctccagtattggggaaacaaatgcttgagtgctttggtcagcacaatagggaaacctatcatggctgacaaagtcaccaaggaaagatccatggttaagtttgcgcgggtgctggtggaaatggacattatggactcaccacctaaggtgatacactatctaaatgaacatggcagattaatggaacaagaggtagtgtatgaatggctaccaattcaatgtaagaagtgtaatggatttgggcatagtgtaagtgactgtaggaaggaagagaaggaacaggggaagaagaagaaagagtttatcaaaaaagctcaaggagaccaaaaagacagcaataaagatatgacaagagcagaggttgatgttattaaacagaaagcagcgtcaagccttgatgaaaataaaacaacagaaggtgatatgacagattctatgataggggtggttgcacctgaagctgaggagagtcaagctaagaatggggaatggctcacaccaaaaagaactcaaagaataaaagctaagcatggagagaatgttgggaaggaggtggttggtactagttcctcaaatgtttttgaagttttacaagggcaagaggtaggagttaaaggtgtcgtttaaactccaatataaaccatgaattgctgtaatgtcatgtgttggaacataagaggcctcaatagaagaaagtaaacaaagaggttgtcttagacttgtgtagattaaaaattattggtgtgggggctttgctagagaccaaaatgagaggcaataaagttggagaaatgatttctaacagatttcctgggtgggattactattctagtaatgttgttgaaggcagattaatgttgatttggaggaaaggatttgttagggtcatagtcttggaagaaaacaagcaatatgtgcactgctatgtcaaaatggtagggcatgtagaggctttttgtgttacttttgtctatggattaaatgctttagaggagaggaaatctcttgggttggtcttagaaaagcttaagttttcctgtacaagccttggatttgttttaggtgacttttaatgttttatatagtatggtggatagggtagggaggtaactctcgtctcggctgcagaaatcaatgatttttaacaatttggctttctcttggtatggtgggatctaaaattcacttgatctaacaaccatggagtgaatgatagaatctactcttgcattgatcatgcctttaagaatgaagaatggttggacctctaccctaattcttttgctttgtttcaatgggaggttgtttcggatcactgtgtttgtattgtctcttcggaagtggtgcaagatataggagttaagccgtttcgtttcttcaatttctggacagatcatgaaaggttcaaggagattgtcatggcaagttggaacaagcctattaaaggtgacgggctggctgccatttactttaaaaccttgaggcttaaacacctgctaaagagttttaataaaaattagattggagatgtgcgggcaaattatgagttggctaagagtcaatacctggaagctaagaacatggctcaagctcatcgaggaatagctgtttggattgagaaggagaagatggcagcatataactttagcatgaaagagaagatgttccatagtttccttgtgcaaaaaagtaaaataaaatggctgagtaaaggtgatgagaacactgcctattttt

SEQ ID NO: 224468 - DNA, 1183 bp, Cannabis indica
aatcacgatgggtgaaaaaaaaggttaggggaaaaaagttcctcacaaagttatgcgttacttcacactcacaccgagactaagacgattatattgctaaagacacaccgcggaggatatgcggtggcattactcacagagaccgaaagaagacggtgtgcttaggcattctgcggatgctgaagaatggaagtggtttgaccgccttcatccgtcttttgctgttgaatctagaaatgtcaggctgggattggctactggcggttttaatctatttggcaacatgagcaactcttacagcctgtggtaagttatttgtgtcccatataatttgccaccgtggaagtgtatgagttctgaattgttgttgttggccttattgattccacgtccatcatctcctgggaaagacatagatgtattcatgagaccgttaattgatgaactgaaagagttgtgggagacgggtgttgaagcccgagatgcctacaacggaaccgtattttcaatgcgtgcagcagtgttgtggacaataaatgattttcttgtgtatgctctaatgtctggttggagcacaaaagggtatatggcgtgtcccacttgcaatgaacacactccttccattgacctaaatagtaagattggatatgttggccacaaacattttctcgaaatgagtgatccaagaaggagaagcaaaagtacaatgtaagcgtgagaagagagcgccacctccagtattgacgggggatgatattttatcttaattagaccgaattccactgagtttgcctaaaaaacacaaatagttcaggagtgtgaaacggaagcgttctagtgaagagctaaattggtctaaaaaaagtttttttttagcttgagtactggaagcatttgtccttacaacataatcttgatgtaatgcacattgagaaaaatgtgtgtgacagcttagtaggtactcttctaagtatcgacgagaagtcaaaggataccgaaaatgcgagaatggatttgcaagacttgcgaatatgacgtgagttatggtcgtatgaagatcgaaatgggaagtggaaaaagcctccagctagttacacacttagtgttcaagaacggattgaatttgcaggcttcatgaagtctgtacgattttcgaacgattttgcggcaaacttagacaaaa

SEQ ID NO: 224469 - DNA, 1932 bp, Cannabis indica
gtttaaaaaccttgacgctctgaaacaaatctgtaacaccctaacaattaggcacaccacgacacagattatgaaaccctaatcccctaaaatgggattactagaaggttaagcgcgagaaatttaaacttaattgaaacataatgaaaataaacttgtaataattttaaatttaatagtccactaaaagagacaagtttcgggatcccgcaaatatttttacaaaatattataagtctattttacgtgttgacctaagcgacaaaatcaagattacaaaatacaacactggtagaccccaacccgcttggtctagtatggccagaacatgtacaagcatcggcaagctctcccactcatggctgatcatagatagatttacctgttcctgcacagtagagcacttgtgagccaagctcagcaagataacatagatatcaattaacataacacctatataattaagccatttcacttattgtctatttgacataaacctgcatgttacgctcacatgtctatttatttatgtctatgtggcatagacacacgtgttacgctcacacatctatttatgtctatgtagcatagacccacgtgtttccctcatacatctatttttgtctttatagcatagacccacatgttacccacatgttacactcacaaggccttagtagagtttatcttggttatagttaccgagtctaacctgattatgccttgcccacataatcctattcatatatacataatccacatattatgttccttcagtggtttatcctgatgatgtatatcaggcctaacccggttttgtcttattcacaaaaccgttgacatatatccacacattcaacatcttcaacatatactataatatatgaaatcttagggtaataacgctaacttgcatactaattaattacccatataacatactttatgacatgctcaaaataacgtatatagagagtaataaccctacttcatgcttttacttgattagtaaaggttactatacatcattgctttcttactttcatatatagcctaaggtaattaccctagaccacattattataatacttagagtactagcttaccgagtctaatatacttatgccttgagcacataattctttatttcaacatatatagcatggtataacattcaaaattatttaatcgctagggtaataatcataggccatataaccgctcacttcaggataataaccctaatccccattcttaattaatcataaccataatataacacatgagtgccaccgcgcttgactctacgtgcaaactactatcttacttgatgtctcgtaaatatggagattccaaatccccgggtgttcacgagcaagcgttggtagtcctagtcacacattcttggcatttcacaaatagggttaatcccaaaattcactttcaataatcacataattagcattacatttacagattaacatataaagcttaaaacgagctttccaacgatataaagaacatccaaaatggagtctcaagtcaaaagttatggccaaaacaaaatttggtcttccccaatacagtccaactggaatttcagttggaacagccttgaaccaaccggaatttcggttttctgggcagaaacaacttgaaaaatctcaacttttaagcctccataacctactaaaatcttccctaatcaccaccaaactttctagagcatcatcatataagataataaacatattttacagctcaaacacaataaatgtaccaagaatcaaaaagtgccattgttgagcaagctttgagttcttgaactcaaacttgctcaaccacataattaaacaataacaacaacttaattaggtctaaatctttaatagtacataacccaattgagtgaaaccaaaaccaaatcaaaaa

SEQ ID NO: 224470 - DNA, 2269 bp, Cannabis indica
tctgggtctgggtcagggtctcattcagatttaggttccgagtttcgatcctcgtctgggtgcaggcctcggttaaagtttaggttcatatctagatccctatctaggtccgagtttaggtttcagatagggtcccaagtctaggtatgggtccgagttttggtccgggtcttagtgttggtctgggtacacgacgtgtcagggcccaacttcaagtcacggtttgggtttggggctaggcccgagttcagttctaggtttgggtcaacttcctagtcacggtcctagtctggtcctgagtcttggttttagtccaggtcgcggtccgggttcaagtccaggtctcgatccctatctttgtctaggtttaggttcgggtccttgtcagggtctggatcctggtctgtgttgcgagtttcaggatccggtgagcgtttaggaccaggtcaggtacaggtcccggtcctggtccttgtccatgttcaagtcttaggtcttaggtcccagtcctagtcaaggtctccgtccaggttttggtctgagtttgagttatggtttgggtttggttatcgtcttaggtctgggtcctagtcacaattccagttctgattctgggtccgggtttggttccgggtccgggtctgggtccaagttggtgtcagggtaccgagtcttagttcgagtttggttacgggtttttcggatctcggtctggatccaggtctgagtcaaggtccacgttcgggtcttggttgtgggtccctagttcgtgtctgggtctgcgtctgcatctaggtctaggtcccgtgtttcaatcccggtctaggtctgggtcggtatttgggtccgtgtatgagttcgtgtccatgtctacgtctgaattccaatttaggttaggcacttggtctgggtctgggctcgactcccgagttcgtgttcaggttctggttcaagtctcagtcctagtctgggtccgggactgggtctgggcccgagttctggggctaggttcggtttagttctgggtcgggtcaaggtccaggtcacggtcccggtcctgttccatggtcctgatcaccttcttgttcaagtttcggttttgggtcctaggtttgggcctgggtctaggtccttgtccagcttcgggtgcttgttcgagttcccgatcaagacatcgactatgggtcttgtccaagctccggttctctgatcacgggataagatctgcatcccaatcacgggtcctagtcttgtttcaattcatgtcccaagtcagggtcttggtttgggtctaggtccaagaccgagactggggtccagtctgggtttcgatcccagttctgggtcccgagtcatgttcaatgctcttttctaaatttaggtctttgttcgggtctcaagtccttgttcgggtttggatttagattttggacccaatcctagagtggctctttgaccgagtctgggtcttgttccggttacaggtttggctctatgttcatgtcttggtcatggtttattcctctgtcctaatccgcttctagttcgattccagtttcaagtaacgggctacgggttttggtcgagtttggatccgactctgggttcgggcgatgatttgagtctgaggcaaggttcatttctgggtttcggtctcaggtagggttcgaggctgggtctgggtccaggtcttggtcccggtcccgttcaaagatcttggtcccgttctaattcatgtataggtttttgttcccgagtgtgggtctgggtcttggtatgtgtccgggtcctagtttgagttcgagtttgggttcaggttctggtctatgtccttgatctagacactgagtagtggtcaggtccaagcatcgatcccggatcccaggtcccgacgtgggtcctatgtccaggtttgggtctaggtttgggtcctcgatcccgatcaaagttctgagaccaatttctggtcctagttcaggggcccaattcctaggtttgtgtcccccatctatgttcaggtcctagctcccgttccgggtccaagttcgtgttcaagttcggtccgagtttagttcgtggttttggttagggtccgagttcgcatcccaatcctagtcttggtctgggcttcgtgtcccaagtctgagtctggttctttggtcttgggttcggccccggtgtccaggttcgggtcggagtaccgtgttccgatttgggtctgggtttgggttttggtctgattcctggtctgagtctgggtccaggtcct

SEQ ID NO: 224471 - DNA, 1220 bp, Cannabis indica
cataaaacccaacagaaggatgcggtggtttcatctgggaactgaagaaaggttttggacgttatgttcctgtgatctggacatacagggtcaatctgagagtggtcaacactctgcccgaaggctgtccaattacaactgctgaagggaactccattgctaaatttactgtgactgttacgaggcacacctctaattaaactctattcagtcgtaaaataatggcacagaccaagcaaactatcaaataaccttcgtccgccgaccctcatatcgcttgactggctaccctggccaagggagaacaggcccatcctgctatcgaggaggaggagattgctggagatgttgaagtccaagaaatgatggacgagggcaaggtccgtcctggaactccttatgaggccgagggcaaagaggaagagggggtagctcaggttctgcccctcggtggcttcaacaaaaaggtagatcttgtctctgagacaggtgaagtcttggatgctggttaggactatgtcgaggaggagtatatcgaggctcgtcccgtaagcaaaaaaggtgcaacaagagctcgatgggtttctccaccattcatcataactttcaagagattggctaatctctttgaagatggtctcctggggcaggtcgaatgcttccttccctctcctgggcagctggcaataggccttggagagggttactgtgcttggttgggttatcatgccaacagggtgcaatcctgtctttgcatctgtatttcaaggagatggccaattactaccatattactctgacccaattcacacctagggtttgcaccctcaccctagccctaagcccagagagcttgcggttaaccctattagatcgcctcaggtgcatattctaatacacttgtgaccataactttccatcattagaatctccaaaaataaaaattaatgctaattacatgcatatacatatttaaaaatctttatcaaaacctatcatgcttctctaacagcttgcacactcaaataagtaggtagttcaagcgattaacaaataatctaataatcaactaacaattaacacttactataccatgagttgaacgagtctttacaaccaatgtaaatatcaagccagtcttcaagatctttaaacattagtccctctgataccatgttgtaatgtcctatcccatatggacgccacgtatgtgattttat

SEQ ID NO: 224472 - DNA, 2766 bp, Cannabis indica
gtaagtttctcttaattggtttgcaattaaattatgttttattttaattgtttgatagtttaatgtttgttttgtaactgttccttttctgattttcatattgtttttttagtctcccagaatccaatccaggtgttgttggtgaaaagacagctgccattcctactgatgaagaagctgaggacactgtttctgatactcctcttttggataagagaaagcgtgcaccgacattgaaatcgctttttgttgaatttgggtcggctggtgtgagaagcactccaatggaggtaatgtcatcaggttctcaatcaggaggagatgagagggattttaagatggttacttatgtgaagggcctttacgctcttaacgattcatttgctaatcccgtctctcttgaaattgaggcaaaggtttatgcccaattgtaacgaaatttttgtgggctttacttcaccaatatccaactttttgaataccaaaagcggcattaaatttatactagccccaagatcacataaagacttttcaaatgtcaaacaaccaatctcacaaggaattgaaaaactacttggatctttaagcttttgaggcagcttctgctgaattgtggcactacattcctcaattaagctcacagtttcataatccccaaatttcttcttctttatcaacacctccttcataaacttaacataattgggcatatgctctaatgcattaatgaaaggaatgttgatgttgatttttttgaaaatttctaagaacttagcaaagtcctcatcaagtttcttcttcataaatctttgaggataagaaattggcggtttatacattggaatatcttctttctttatagacttttccgtaggcttgtctttaagagtctcttctttggcttctactgtgtcttcaacctcaggaccagttgacttgtcatctacacccccatcaagtactttaccactcctcagtgagatggcattacattgttctttcgaattgataactgtgtcactagggaaactactatttttctgcaaagcactcataacattggccagttttcccacttgcacctctatgttcttcatgaaggttttctattttttattagatttgtaagtttatggtgtgaaactatcctaaatgacattcttatctaccatttacttaagcctaacgttacatgcctataaagtcattttgatctacacgactttggtttacattagtggagataaattggttatgcaattctatggttatcttgaatgttttgtggtaagggaagtctttatgcaatcatagatatggagtttgtagccattacctacaaccaatttctctttgcctttgtaggaggatgaagaattgagattggctgtgtcgaaggagacgtggtgagaggctccactatccacataccaatttggatcggaaacggaagctagtgtagaaatcaaagcttgaggagatttcttagtagaaatggtttctggtccaggatttttgtgcttcaccttaataactgggattgaaatggtgataacacttaagagaaacatggctaggttttccacatacttgaaaaattggatgattagaattatgatagccacgaccatcataaccacgattgtcactccctcgggactgattgtagcctcgtccacgacttccttgattgttgttattgttgtaagactgttgattaccactcttcttggtggttgaggcgtagtttgtcgttggattttgaagatccatagcaccagcaacaaagtgttgctttagtctcatctcatgattctgaaaactgaactgaagttctagaaatgtgactgattctcgggcagtaagatttacctcaaccaactcattctcagggccaagaccttgaaagatgtataggatgagctcgtcatctgcgagagtttgtccagtcgccatcaaagcatctagaagaaacctcatcttgagaatgtattcgtcaataggtgtggaacctttctttgtcatttggagatgattttgaatttgcaaaatttgagctcgagaatggctagagaagagtttctcaagcttagaccatatgagcaaaggaaacacacaatgcgacgtgtccaagaattttctcagagatagaattgaagagccagttcatgagaaattgatccaaatgaagttagtggttgaactaaggatttggaatctgtcatgtgcgattggttggatcttgaatggttgacggtggtcgaacgctttctctagtgagaaatccctcaagatcatatgcacgaaccgatggaagcacttgggatcaccaataggggtaatttgtgtgattgagtctgagattcagaggagccatattcactgggatgactagaacaagagctagatttggatttggatttggatttggatttggttgtgtatttggacgagggctttctggtggtgctgccattacagagtgaaaaaagtttgtcaagaatcgatgagagagagaatttgacctaggtcaatctaatacctgttgagaaatattagaatgaatattctgagtattctcattaaagaaaaaatctttatatacaatcaatggctaatgaaaaactcttaggaaatatagcaaattttgttatttactaataacctaacaaccactaagagacttctaaaaaaggagaaaactaattttcaactaattgatcatagtcaaaaaaatgtgaattagatatattcttaaataagttg

SEQ ID NO: 224473 - DNA, 1164 bp, Cannabis indica
tttcttttggcaaccgctcaatgtaagaagacctggacagatcaagagcttttaaattcgttaactgaccaatcactgctatgtcttctagagaagaaccacgcagacataatgttcggagattttgaagagaagcaaaagacgaaggtaatgatctctggcgtgtaccattcataatcaaaactttaagcaggccagtttgcttaaaaaattcatctggaatagattccaaagcagacctactggatagaagaagcaattctaaactaggacattccaattctggaggaagattatcaaaatcatcataatcaacaaaggaaattgctttaaaagctttagtactttcatcttcacacataccaatgtttttcatcatcctatgcccatggtcttccttcgcaatgtgtatgcaaacgtctcgaatgacatcgtgcatcttcactttatcagtcttagttgcatccaacaaaagacaatgagatttcaatttaacaaccaacaaattcaccctgtttcttgcatcttccactgtctcgatgtcttgaagcaagcgccaacccatgctgtatcttgtcaagtgttccacatgtatttcttcatcttccttgtgtaaagcacaaagcaataacaatagtttggcctcttcctcctgacttcctagaaaatcgtaactcaacttaatgctggagtagacttttttttccacataatttgaactctctagtcgtcggaatgcatccttccatatggcctcctcttttttgtttttcaaagcatgtgccactgttgcaatggcaattggcaggcctccacattcatgaacaatcttaagtgccaaatctttaatgtaatctgcttcaatgtctccgatgatgctcttaaacaaatcgatggcttcactcgactgtaaagctccaattaagaacacattactctcagccacacccatgaagttgcgtaaaacttgttgatctctagaggttattagcatcctgcactcttcctggattccaatagcttctagatcaagttcattccaaatatcgtcaaggattaatagaatcttgctttcgtcttgcttcaatcgcattcgaagaagttctgctctcttgcccgtactgtctttctcttccaacttcaaaccaagcttttcggcaatat

SEQ ID NO: 224474 - DNA, 1800 bp, Cannabis indica
ttttaaggtgaaggaggtcctattaaatggaaataaaatagtccaaaaaatatagaaaaatacatttaggctagttttgatcatagatgataatctaatggtgaaaattaacttttgaggttgatcgaaaaatttcagagttcgagtcgcgatggcgggacccgctcttaggaagttgcagcttaaatttgtaactcacttaagggagaaatttggtgtcgatagcttctgaattgcaattgatttgtaagacataacttgataaatgatttaaataacttcaaaattccagttgaagcgtcaattggatctatattgagtgagttatggccattttaataaaggttgttttgggcctagtgctaagtttacaatatcccagcaaccaggttgacatccaacacccacgttgacatgtgatatcaacctggacattgggtaagtgggaaaaagtgctagggatatattttttgatgcctaagtgatattttgacatcacttagtctatttgtgtgttctaacaatgctaatcaacaatcctcagtgatgttgttattctacagaaatgagagacttaaaactacctagtttctaagtaaattaccttgttagaaaagtgaaaatatgaagtagtgaatttgactcttttgacttcatggctcttagttattgtgaaaaactagataaaaggttgagacggaatcaaaattggataagcagaacctagcgtaccaggccatttatcatcctgggcgtaaggtgctcatttcagagcttctagggtgtcattttgattcttccaaggctctacaacccaaggacgaggtctctaaccctatttttgaccatttcagagagaacgcttggagaaaaatcggcatttgagtgatcgaaaccagtgcaccaagttgattggaaacctgggcgcttggcctaacaccaagtcaacctgggtgttgggctcagtatccaggccctcaagattgtggttttcttcttgagtttgctagtatctatgttattttttatgacaaaaaaaattctcggaacactttttcgagaaattgattggaagtggcaaaggttgacaatatgttaatctgggcgctcgacctagtgctaggtgtcaacctgggcgctaggtctagttttaggctgcctagaaattttgtttagtccccggatgtagttgaatcttaatctttgctgaaaacagagaatatgcatggaagactttttgaaaaaacacctcggaattggcctaggttgacaaaatgtcaacctaggcactgtgcctttgctctggcactcatgttgggttgtttcttccctgaaagaacttggagttggattttcgatccgatgcttggaagtggcccagattaacagattgtcaacctgggcgctggggtgcctgggcaccgggtggggtgctaaaaaataaaagttctttgaatctaattttaatgcctcaaatatgttcgtggtatgtctcattcatgtcctaatgaaaagtttgatctattttcactaagatagtcctggaagctgaaatcctagttaagttgttaacttgggcgctcggtgaagccctaggtgcccagtttgacttttgaggtgttgttttgtttatttttcgattctggggccttgacttggttgctccatgtatttatggtacaaaatgctgaaagatagtgagttagaaacaacttatcaaaatttgaacattcattccggagttcttagagtaaacctaggcgtagggctaaggacccctcctaggtcgattgttatgac

SEQ ID NO: 224475 - DNA, 2149 bp, Cannabis indica
aattgaataaagtttttttttttagaagtttcaaaatggatagaaattagattagtgcgaatagattatcaccggaatatagtgaaggtgttgaccatttcttggacttttgtcagaagtatgccaaaaatcctaaattgattatttgtccttgtcttaaatctgataacatggagcatatagatattactaggataaaggagcatttatttaggaatagaatagacaagagttataaggtttgggttcaccacaggaaaaataatagagttctgggagagggaacgtctaagtctaacagggttatgtgtgttaattttgactatgaagatgatcacattctagaaatgataggagatatacaatttaaattaaatgtcgatcctttgaaatttcaatattttgtagaggatgatgagaagcctatttaccctaattgtaataggtttactaaatcatcaacacttattagattatacaatataaaagcaaaagatgggtggagtgataaggcaaagaagataatttcttccttaggcatgcaatatgaaaaaaatacatgcatgtcctaatgattgcatcctataccgtaagatgtttgtggatgcaatatcgtatcccgcttgtggtgagtctaggtggcaaaagaaaaagaattttgaagaggtaaaggttggtgtccctataaaagtgttatggtacttaccccaaatacatcatttggttcagttctttcgaaatgtcaatcatgcaaaaaatttgatatggcatggcagtgatagaaagttagatggtaagatgacacatcttgttgactcacccgtttagaaatcaattgatgctaggtggcctaaatttagaaatgaacctaggaatatccgtcttggtctttcagcgaacaaaatcaatctacataccacacttagcagtaagtatagttgatggcaagttttgcttgtgatgtataacttaccaccttggttggtaatgaagaggaagttcactatgcttacactgttgatatcaggcccttcacagcctgataatgacattgatgtgtacttagcccctctagttgatgatttgagtcaattgtggtatgagggtgttcctgcatacgatgccttcgggaaagaagaattcaatcttaaggccatattaccgtggaccattagtgattttctagctttcgaaaatctttctagagacagtgtgaaagggtacaaatcatgtcctatttatgaggagaaaacatgttctatgtatttaaaacactcgaacaaaaatgtgatacatgggacaacctccaaaacaccctgagtgaccgggtaagctaacagatcatggtcgttatgtcaaaccacgacaaaccagctcaatcattaccttctagaattctgtcaaaatgtgatccaagtcgtccataatccaattccaggttgcttatgatctatttggcgtcaaagattacactatttggcttgttaaaaaagacattcacaaattgtgagtttggtgcaagtatgatttataattcttaataataaatttgataatgttcttttgactatggcggttattaattatgactttttatcatgcacataaaagaaagactgttgaacattaatgggctgaatcgagtatataaatttctaattttgggtgtgatttccatcgatgctggcactactataaaaaacagaatttccgacggtcgtaaaaataacttttttggtggaccgttgctaaaaaaattatttgagtgttcaaaaccgtcgtctatagtatactataagcaacaattttcaacactcgtatagattaggcgacattttataagtgcggagatgtttcttttaaaaaataatgcactattcttggaggtttagaactgtcgggcgaagtattggccacagttttaaactgtggcccatactttgtccgacggttcaaaatcgtcaggaataaggctaataaaataaaaacaccttactctcattaaaatctttagtcacgatctcaaaccctcacctctcactctctcagaccctttttctcaaaccccaactcgcgctaccctcaaatcctttttctctcttttctttctcgccgacggaccacattacatacactctctctctctctc

SEQ ID NO: 224476 - DNA, 3070 bp, Cannabis indica
atgagtatttttttgtgttttttttctccatttagttaattgatgaaactggttttaattattttcattgtatatcatttttattttgttttcataatctttattattgttgtgtgacgaaactagttccttgatgaaaaaaccactttcttggtgaagaaaccagtttcttgatgaagaaactactttcttggtgatttttccagtgattttcctggcgacaatattaattttgacgacttttttgatgccgacagcaacttcagtgacttttccgacaccaacagttactccggtgactttttcggtaccaacagcaaactctggaatagtcatcgaaatcggcattgtcgctggtaaaatcaccggaaaaatcaccaagaaaatggtttctcttcatcaagaaaccagtttctggtgatttttcttgtgatttttccgatgataatgctaattccaacaacttttttggcaccagcggcaactccggtgactttttcggcactgacagctactcctaagaattttttggtgctggtagcaaactccagtgacatttccagcacgagtgacaactccgtagttttatttattatatttttttaaaaaaataaatatgaagagaattttaatattttttatggttattcaatctcatatatattaagtttttatttttatgaatcttaaattcagattctctttttaatgttttataattttttttttaaaacaaaaaactatatttttagtttgattggttagattatgctatatttagtggcatttactttttatgccatatttaccataaccttaataattttttccatattattgaaaatagcccttaaaaaatttaatagaaagtagagatggaaatttttacgtggtttgggtgttaatgagcctagtccacaagttagtcatatttggctaaatagtcttgatgtattacaatggagttctttacaagcttaagaaccctagcttcttgaatagggtgaatacataaaatacgttgactttgggccaacggaccaaggctcaactgagggggcagaggcaatccgtatgcttgggaccatgcaatattgacagatggctttcgtgcaccgctcttgtgcactgtagtgtcaaagtagtggccgtcagacaaaatggtaattcccatttggtggtacgcacattcttaggctctaacacaggggacaatcccctaattcggtgggatttggtgtcagagggctgccacatcatcccaggctaggtctccaaggtgcctcttggaatgtccatctagatgtatcccatatgcttattcggagggtcttagctgcttcatctttttcgggcgggatgcccttctagatccagagagatctagtcttggacataaacatcatggaccttggatgggtgcaaggcccatccttcaatataaattgagcctgctatcttgttagagcttttgactatgccttagatgattaattttgaattaggaatgcagcatgtcccccttctagaaacacgaataacatttaccccaagcttttgagacttgagagtcgtggaggcttgcattcttctctctaaattgtcatgggcacatggagaattcgaaaaaggagtgacctttgttattttgtattatttggtcgcagacaactagggaattttgggtttcagctagtggattacatgtggcattgactccttggttcgtgaacttcacgtgcattgggaaattgaatgacgcttagggtagcgttgacagttgattcatgtcatcacttgtgctgaggtgaatgttatgatttgcaaacacctcaattccaatatcatgtattaaattctgacccttccattcccataccgttagattaactttgtattttctataatgcaatatgggtctttgatcaaagaagcacacagatcgtcactatttccttataaatagagtgagcaaatataattcattatttttgcccattttctattttgagtttaaattttctaagagagaaaaaatcaaaaattgcttctggtgaatgtccaatctgtacgacgattgcctcttattcttcgtattcgtgcaagagaaaacctaggataactaccaccaaacttgaagattcctcttctaaatctgtcgaggatagtgaatctccaaaaagagatcaaaaattaatcgcatgggctcgcaatcttcaagttagacgtcgtcgtctcgacgaggactctgttacagtttgccaccgcgaatctcaccacccccatagttttcacctttctcaaataagtactctcgccactgaatctccaagtagagatcaacaaattaaccgcctgtgcttgcaaacttcaggttagacattgccatctcgacgaggactctgttacggtttcgccactataaatctcgccacccccacagttttcacctttctcaaataagtactcttgccctttttgaacttatgacttcttctatggttaaaatgcttgtccaaattctaggtaggatagaagccttcttcgttgatgatttaggtgatggtttgcatgtgggctataggagatagtgggtacaacttaggcttctcggggctattttgaaactgtgccattatttttccatgcatgttgtctgtaatgaaagttaggatctataaactctgcttgtcatttatattcagtgttagttgagcttagagcgtcgttgagcgtattcaaaacttaagctcctatgtctgaaacccctatggcccatttggtacgcaggactggattcgattagacaggctaatttatccaattcagtgtttgggcatgttggaaatttggataacttatccagctaatctcatttgtctgggattatttatcccatccagcagggtgggataaataatcccatacatgtgagattttttttattgtttttttaattttgattttgttaatatattttaaatttaataagaattttaataaaagaattattaccatttatttataattttttttttatcaaaaacttattaaaattagtgaaaatgta

SEQ ID NO: 224477 - DNA, 1647 bp, Cannabis indica
aaatataaaaaaaaaaataaatttcaataatacaataattagtgggctttgagttggacattcacatattggacctaattaaataaaagaaattagtatttttataatgtgcggtgcgttgcagtttgaaccgcatattaaaaattcattgattaacacccctaaaaaaatatacacactaatgtaatgtttattgtaaattaaaattttttaatatttactaatataatttattgaatttaacaaatatttagtattaaaatattcttattatattaataaaataatagaataataaagaatataatatttagtgttgtggttggaattgaaaaaaaaaaaatagtgttgaaatagtaattttttggtgttgatttaacactatatttggatttctccattggagatgccctaagagataatataaaaaagacttttatataaagaaaaattgtttaaattaaattttgaagataactcatttttattttaaaaaattttatggtgcttattttaaaattaaaaatgaaacagttttcctaaagattgtttaaaaaatatgccttccttaatattttcaatttttctaattaaaaaaataaaaaattatttaaataattattaccaaatgtgctctaaatggtttactactaaatgaaataaaaattctacatttaaaaaaaatgtaacattgatatgctttccccataggaacaagtatgtcataaaagattatgttagtattacttggtgatgtgtatctttttaggtgttctttaaggttatttttctgaagaaaaaaaaatgataaaaataggttgataggtagcattatatgtttgaatctttatcggatttttttgacaataacttaatcatttccattatttaagcctttaaccgtagagagcaataaattaatcgatctttgattttgtacttattaccaaagtatcaagttagatatcaactttggaattcaatcaaatctttgatcaataaagataataagatatgataaaataaaactgtttatgcaaaagagagggagaaagagaaaagtcaagaaatctaaccaatgactaattctcattgattacatatgcaaactagtaaatgtgaaaaaggttcctcacaacaacaaaactaatcatgaataggtcaatggaatttcgaagagagaaagaaagatatggtcaactgaccactgtaaagaggtatcaaaagtggggacttaaaatgatttataagctttgctttgctttggtggtgagttgagtgttgaatgttgatcattgattgaacagagagcaacacaacacaaaaacaaatacaaagttccgaatggcaatttagaaaaaacagaggaaatagtcacatgcttttgaaacagtggtaagtaaattttgtgtttttggggaaaaaaatgaaaagaaaaaaaaaaaaaagaaaaagaaaaggtcagtagtcactagtcagatatgatttctcagtacaaagataacaaactctggcagtaatattaatacatataaaaatcagaggcaaaggcaaaatccgtactttttcgacccacatcccctcgtgaatcgagggacagtgattttcactttatcaggctcaataaaacacacctttctttccttt

SEQ ID NO: 224478 - DNA, 1995 bp, Cannabis indica
ttttatttagtttttttttaattttaaattattttaaattaaaattataatttagactaattatttatcgacatgtggcattttgaattagaaaacggatccgttagaaaagaggactaacggacttacaaatattgcgaccttagggactattaccgctaattttcgaggttggggactaacctgcatcaaccttaagtttttggggacttttaccgcaattatccctatttaaaatatagaccattatatttaatataatttaataaatataaattgtattaagttagttaaataaaacataaacatattaaatgactcacaaatgtattataaaaagattgtaaaaatattaaatttattataaacattttaatgagctgataagttaatcaaaatttaatatatgatcctttacatatttggatataaataggttatacgagtcggatcaagtcaacttgcttacaaacgagttggatttgagttttaatttttgacacaattaaaaaaaataagttaggttttggcatttgtttgtaattcttaagtctcaacacgagacgaacacgacccataagattaggacgtcacatttacatttgaaaacccacccacttgactcgaaacccagattccctaacaaaaaggtttacaaaattataggtcgggtttgggttacattcgatcacccatttggctgggtttgagtttcattaattcaaaacccaaaaaaattgaattacactcgaacccacccaaaattcggatgtatattattttttatttttttatatacattttctattcagccctagaaacataaacttaaaaaaatctctaaacaatgattttttattttctttcatctcactttttctgttttttttttaaataaaaaaaaagtgtaaaaaataattttaaaaaagtatataacaaaaaattttaagtgtataaaatacaaaacattatatgtatatgataaaatcgttttatgttttaaaattttatacacttaacccctttaagaaaatgataaaataaaaatgaatattaaaaaataaatttagaaataactagaaactaaattatatctattatgtaataagttgttgaaagtgatgtggtattttagttaagctataatgttttgattggttttgggatattgagacacaaaaaatgcaatcgtgcgagatgttgagttagtgaatacgttagctgagctgtaattttgttagttgtacaattaattccggtctgttagttgtataatttgttgctctcatctaagagttcaattaagctgattgtaattgctatttatagcttgtaaattctctcctaatgaataatacaaattcattcaattcttctaatcttaacaagaggataccatgtttctataattctatttccattggccaaacgaatcagcacctgttatggctataactactaagagtcaaaaattaaaaggtactaccaacaatgtcatattgcaaatgatacaattaaatattaggttttatataattattgttatcacaaatctaaacctactacgtactgatgctagtagtggtatctaataacagcctgtctttgaatactggaaattgtagaagaagaagaagaaagaacgaaagaaaaatctaacaattaaactttgttccaccattggatcaatggatctcttgtgcatgagtgcatctttttggagggagggagagtgatgaaaggagaaattgaatctcttatttggtaaggagagaagggagatgagagatgaagggaactttctctctccaaactttaaaaattggaaggattgttgaaaaagaaaaaaataaaatttgttaaatacaataatatcttttaaaaagtgataaattgaaaaaaaaaaaaaaataaaatacaataatatgtttaaaagagcaacattgtaattttactaattaattttctctcaatctatccaactttacatctaat

SEQ ID NO: 224479 - DNA, 2245 bp, Cannabis indica
ggtgatgatatcagagatgcttcgttttttagatggattcgtctaaaaggcttggggtggacaagtttactactaggtttttattaaaagaattggcacaaagtgggttcgaacattattgtcgcagctctcgctttccttaatgaggaatcaagtttgaaagttattaataagattcttatttgcttgattgctaaagtttataaccctattagaactattgattttcacccaattagcctttgtaattgtttttttacaagattattataaaggccatgactattcgtatgcgggaggtgctaagccatgtcatttctgatcactgataatgccctcattggtttttgactgtattaatgatttaatgaagaaaaagaggggagatggcttctgcgcaattaaccttgatatgtctaaagtttatgatagggtgaattggagatttttgaagagaatcatgaagcttggttttcaagtggattgggttagaaaagtccttgattgtatctcttgagtggagtactctattattttgaatggggtgattcttgattctattacctctcagtggggtcttagacaaggagaccccatgtttacttacttgttcctactttgtgctgagggattttctggtttggtaaatcgtgattgtgacaatagtcctttgttttgttttcttgtggaagaggtgggccagtggtttctcatgtctttttagctgatgatagcctcttcttttttaaggctttggaagtgtgttgtagatgcaaacaaattttgagttggtatagtgaagtttcagggcgactggttaactttgctaaatctgcagtatgcttcatccccaacgttgggagccttgatagagaaagattggtagccttactgggagttgtcagagtagattgtcatgagacttacctgggtcttccttgttttactggacataacaaaagttggattgttaaactcaattagggacagaatctggaaaaaacttaatagttgaaaatccaaattattctccatggcgggtagagaagttctgatcaaggctgttattcagtccatcccgacctacactgtgaacttatttaaacttcctaaacgtttcgttaagaatgttcataggacgtgtgctcatttttggtggggagggaatgatgtagaaaaagaaaatacacaagtgtatttgggaaaaactgtgccttcataaaaaagatggtggcatggggttcagagacttgtatttgtttaaccaagctcttcttgcaaaacaagcggctaggatttacaatgttcccacttctttggcttcacgagtgctaaaaggtttgtattttaggaaccagaaggttggtgatatagttcggtccaagcaaggctcctttatgtggaaaaacattttatggggtaaaatgtttttttgactctagagcagtttagagggttggcaatggtcataatatcgatatctattctaatttttgcattctctctacctctcccactttggtgttgtctcctcattttcttggaaaaggtaacaaagtttctctgttacatgaggcttcaggtggctgggatttgggtttggttcgtggcctcttctttcctagtgaaattgatgctatcttatctatatctttgacctcctcagataaggatggcaaactcatttagaattttgaaaagtctggttggtactctgtcaagagcggttactggctggctcttcgtaataagggattacggcgggcttctccctctaggagatactcggattggtggaaaaaaaattagtcctttaatatccctcctaaggtgagactatttgcttggcaaccatcctctaattggattcttacaaagattataatctggctactcatggtcttttatcagatggtgtttgtcatctttgcaagccatacgaagaaactacttatcatgccttgtgagggtgtctttctttaatggcttgcagaaaaatttgtgatcatgatttgggaaaccctctttctaatcatacatattttcttagctttattcacaattttaccctttgctaaaggataaaattgaattagttatgatcattttatggtgtatctggtttaagagaaataaaaacgtgcataataacaataaattgcctcctgacttggtggtgaattgggctcatgaatttctttggaattttcaacagctgggttcggactaggctctctctctctct

SEQ ID NO: 224480 - DNA, 1667 bp, Cannabis indica
gattgaaaaatctaaaattcccacttgtgcggattggatgttgtttgacctcaaaagtaactgatccaatccaatccgcacttaattatatatatttataaaaaattataatagataataaatattaattttttagtaataatatttaaaaaaaaaacacaaacttcaaaatatagataaatatatatatactagcttatttattttagtaatggatacatttagtgtaaattcaaatatatatattttagtaatgattgttttattttaatttcatctaagatgagtacgtgtgtattgatttgatttgtacacaaatggagatatattgagatattattggagaataaaaatatagtcttttcttttaatttttttttccattttaatgaaaaattaaataatttatcattaagaaaaagtaaccgatctaatctgcattattgcagattggatttaaattaataagcgaattgaattggatccaaaatataaaattcacacttagtgaggattgaatattgttttataaaaaaaagtgggaattgaatctgatcaacaaccttatataggataattttatattcacaatttaacaattgaggtggcaggtactactaattaaataattgtagataagatttgatttttctaaaaattaaacaattggaagcacaagccaagattatccacagttgtaaaatcaaatcttatatttattattaagagtaaatactattttggatcttgtattttgcaaaagttatcaattggactctctattttattaaatgacattttcgaccttgtatttttcaaaatgatacaaataggactctgaattattttttaatcaaaataaaacttaataataatccgatctagagatattttggtaaaattgattacattttcagtatctatttgtgttataaattgtcttcaagttgcttttattaaaaaaataaaattgtcaaaaattgagttccggatcctattattactattttaaaaaatacaggatctattttgttatttaacaaatcaaaaacacaaagtccaaaataatatttaccctacaattaattgttaattgatttgaggtggagggggtcaagtgaaaaatttgaggtatccacaattgtaaatcaaatcttatctgaacaattgttaagatttgatttgaagtggtgaggcttgcagaagattcagacttaataaacacgtgattcatgtagtgttgaaattaattaataaaaaaagggctttgttttgtactactaattaaactaattcacaagtaaaggaaaaagtgatgtatgtgatgtagtgaattgaagtgcttattaggtgttttggatcacttggtttgaggcaatattgagtaatgttttggggaatgtaagaaccaataagtttttggtcaatgcgtggaactactaattaagctatacaaaacccacaaacccaacccaactctctaacaaagcaattaatctttgatccgtacattctgtgaaaggttcttcttcttgcttcaaccaattgtctaactagctaagctatatggattccaagttccaacccctatgcacttgctttccctatttttattattaactcattatcaaatcagtgctgttaaccatttattagtttggttgaat

SEQ ID NO: 224481 - DNA, 1495 bp, Cannabis indica
aaataatttccaacagattatacatgtcgaggtagtttggcgtgaagcttacgatctttgggaaagttgtattttgtatagtcgctaggcgaaaacttttgtatcaaatattttgtaattcagttgtaaatattttaaatacgggatcctggttatatataagttacttactttcaattttaaagagtatttaaataaagttttaaattatcacgattttcaataaacccgttgaatagcaacaaattgcacaattaatgttaaatcacgataacacgcctaaactagtagggtattacaatttggtatcagaaccgtcaggttgtcttctgaagatcatcacaacatgtacaatcatcatcagagataagctcgactcacggttcagtaagcctttattgctttaatagtttgtttaaatagcatgttataataaaagcctgataagaagcatattagtagcctgatagctgaataagcatatattttaatttctaaaataagcattaattagtaaattattcttgatcacgatttgactaggctagctcttggttttgtaaattgttctattagaatggacgcgaggcggaacacgagaagccatggaaattcggtcagatccaatggcggttagggagtttagtttcccccaaatatttgtggccaaggtagaggcccaagaggcagggcccgtggtcagggagatgttaacccaccgcaggctgcctaagattgggaaaacaagttttcagcaatgcaagctagaatcaatgaacaagatgaagaaattagatgtctaaggcagcagggtgctcctgcaatgcctgctcctgaaatgtaggtggaaccattgtacgaaaggttccgtaagcaggcacctgcagtctttctgggaggtccaaatgtgatgaaagtcgaatagtggctaactattattacatggatcttgaattttatgggagttatcagcaacgacaaagtggcttgtgccacattataattttaggaggatgccctggtctggtgggatatggtggcttttacttaggatgtcactaccattacctaggaagactttcaggagttatttaatgcgaagtattacaacgaggcagtttaaagtgcaaagagaaaagaattcactcaactgactcagaaagagaatgtgaccgttacagagtatacaacctagtttgatagattggctaggttggccttgagaattgtgccaaccaactttagtaagaaagaaaagtatttggatggactaaaccctaaaatcaaacacgacctgatgatcacaaccaatgacaacaccacctatgctgatatggtaagaaaagcactgcgagctgagggcacagttaagagcatcctagagtcccgggggactcaagttgttggtggagccactgctcctcctacctctggttatgccaggggtggtagtgacttgaccactgatcaaaaaagaaaggcaccatctgcacct

SEQ ID NO: 224482 - DNA, 1487 bp, Cannabis indica
tttttcacagaaagaagtacatgcattcaacaatttattcaactaacaagttgttgatcaaaatgagtactaattaattctttgtcaaggaaatgaccaagttgacatacttccatttttcattggccatagactcattgaccttatcagcaaatctattaaacaattcatccattatagtctcttcaaattgtgtcaccaaaataggctctgcaacagctcttatgtaatcagacacatatttcccactgttatgcttatcattatcaatattatcactagtgatgaagcctgcatcccaatctatttcgaaagtattaagcttttgtagagacaaacttctttctttctcaatcacatctttcacttcctttgcacttggaaaatatgctggcacgttaaaattctctacacattttgcttcaattatattctgaattattaataaacaaaacacattaatataattcaaattaaagaaacacaaatgtaataagaattaatacatatatatatacctctttgaccatgtcattaagtgttcttcccagtatttcataaatattgttaggagaatgactttgaatacttccaaggaatgttaatatcatgataccaccactcaccatttcctctgaacgatatcttaagaaatttgtgaaatccttttgaaattgatccaaataagatttgaacacaatagaaggacttgtattcgtaatgtaaatatttcctttgttatgtgcttctccactttcatcattcactaactctcttggaaccttcattacttatttgtaatattaatttatatatacaattaatcgttataatattatataaatacaattgaacatttaaatattcaaaattaatcatcctcatctcaaaataatacccaaattaacttttcgatcagtataatagaaaagcaattttattataattttttttttacttttagttacacaattaaatttgtttatgactcaaagcaaaaaaaaaattgtgactaattaaattagtaataacttgtattctaaatactactttttagtgataattaagctagtaattttttctacccttaaaattttgatagtagtcactaaaaatctaataaattgtgactaaaaaattattcctaaatagtaattttggaagtgaattttatagaatttatagcattttcataaaattgaatgacttatatatatacatatataatcaaaataagaataatgctagagacacataaattacacacactttctacacgcaattaatatattttctcttttttttctaatttatacctggatatgatcataatctatcagttttaaatatgtgaatttgagattaattacacatgtaaatataatcctaaattaacactataaatggtgcatggacacaaaatttatacttttcattcttaataacaaactaataattaccttagacaaccaatgcaaactgtaaga

SEQ ID NO: 224483 - DNA, 1293 bp, Cannabis indica
taaggtactaaggcaacattgaactgtcgaggggctacgagtcagaatgatcgaggcattagttcaacaacttatcaaagtgaaatttggaatggagggaccgtatgcgagtatgctgttagcttgcgagctatatcttgaggggtattcctccaagagagaagtttttcccaagttgaattggggagcccactaattcatgtgttggaagaaccacggtaatttttcaattttggtgtgtgaatccagagggaaacactacaatagatgggttgtcacagtgcgaagacttgcatgattgctgcaagctgtaaatagacaatatgcaagggcgtaggctgagatcaagactgagctagttttcggcatgtgtgggcattttttgtgtttatgggcacactactgttgtatgggacactataagctgaatggttcaaagagcatatgccgatgggagatagtggattgggatgactgcaattcttaagagtaagactgggtgttatgaagtttgtccaaaagttagcgagtcatcagaggatgcagggttgattttgggagatggacttgtgacacagttttgaaagccaacacaagcaggagctggagggcaaattcgtagttttgggtgattgtaagaccattaaccacatgaaagaagctcaggggagcacgtatgtagtgggtcagtggcaccttttacatgaacccgtgggtgtacggtagggctggatggccaatgttgagaacttcgcgaagaaatcttgtgtaggagtgcacttggtactgcattgggtgcagttggcttgcgagcctcgtccacgtggggcgcaccaaattttatcatgtgattagagtgtgttgctcaattgccattaggaggacaatgcgcaatggagttggcgtgtgaagtttccagagggagtgttctgtaggtgccgttgggtacaattggtttacgaacctcaccttgaggggtgcaccatacttagtccttgtcaaaaggagtatgcattggacgattggcgggtgagctactatcagaggatgtgttagcttcagggtcagtgttgcgagggatacttggttgattggagggacgttgtgatggactcggagtagttcatgttggggtaagtattctagtgcggaggcactactccatgggagattctgaatggcaacagtggcgtaggttctttgatcaagtccaagagtgggcgaggaagatcgtcaccaagaggatgtttctacggaggtagagggacaagtgcagacttaggattcaggaga

SEQ ID NO: 224484 - DNA, 1463 bp, Cannabis indica
aaatatacagctcaaaaaaaaaatacacaaataccacttacacagaccttcaacccaggatccgtgcaatctgggcaactatcgcgcaaccacgcagcaacccaatgcaaccaaaataaaaattcaaccagaatgagaaccaccattaattctggcaacttcacttgagaaagcgaccagaatcaatcaaaacatgacctgtttcaacttcacttcaattttcaaatctatgaaaggcagatctcaaaaagtttatctggagttcctaaacaatccaactcaagtataatccaaaaaaaaattacatcaataccatagtaaaatatttattctggtgtattttcgttgttttccaaatttctaatggtaaatttgttcatattaaatcataaagagacatgtaaaatagagttacatatgtggaaacactgttctgatttttaatgtttcacactagttgcattacagttgcataaatattttgctaacagttatttcgtctgattgaaacttccatctgatgcaaccttcggccaaccacccagcaaccacccaaaaacttttatctgattgaaactttcatctgatgcaaccttcggctaaccacccagcaaccaccctgcaaccatcgtctgattgaaaccttcgtctgatgcaaccaccacgcaatcacacagcaaccaccctgcaaccattgtctgattgtgtaagtgatagtgtaagtggtattttggtaattaaaattatataaaaagtataaatgttgtctacactttatagaggtatttttataaataaagtgtcaattattcatttaatatgtttatttaaataatgtagaaaaatataaaaaaagtcgttatataatataataagtaaaaatgtgaggcaaaaaagaaaaaaaaataaaatttaaataatagagtagagaagctgatgggagtgctacaatatgcggcttcttactacaataattatcacttttactgtcatatttggctaggcaaaaggggtggcttttaattcctaatttaatgtaaatgttgccggcaaaaggtgtaggaggcataataggaaacactcagtattcgaagcagcaatatgaaacacaacaactctacttgaaccgatttcattatcagtttgagtatctttctcaacttgttcctgttttcaacttgcctgctatggattcacttccaccattccccactcttcctggagctagattgtcattacgctatctgagactcagattaacaacgacgatgacattacctgtttgtagaaccacatatatatatattttataattaagttaagaacttggcttttttctactcgaacatcttttaatattttactttagtacttttgtttagttgctagctttataactcgaacatcttttgatagtagctcgatcgaaatactatttaattatatatatggataccgctttt

SEQ ID NO: 224485 - DNA, 1594 bp, Cannabis indica
gagagaatgttcttgttaaagccactatgaacaagatgtaaatgccatagatgtattgttgttgttgttgtggtcttttgatgtttgtaattcttaggtctagttacaacaaagatttatagaatagtacaagtgaattttagtcacaaaatataaaactcatgttctatacatttacatacagtttggatctattgatagaatggatattgacaacttataaaagttataccatagtgtttaatgtattatggaaactgaaattaaatttataaatagaatataaaatttaaagtcaaagacataaatttatactaaatatttaataagtaattattctagcttggaccgccactaaaatactaattcatctctaagttcaagttgtcttgataagcatttgtaaagaattacaaacatggattatagaatctaaattaataattcaaatgtattgtgtcctttataatacatgttttagaacaaaaaaattggtcttaaaaccttgtatttagctactagatataaggcaatccaatctctgtgcctttaatacattcatttgtttgcacaatacttctaaatgattgatattaatttcagatcattagcaaaatagcaaatgttcaattaatttttagtagcattgtaagtagaagatttttcttaaaattcaagaattgttatcattagggcatagaatgtttggaatatgttcatctacaccactcattttcatagaagaaaatagagtgacataagcagatgtcttataaactttcttgtctaatgatatactatcttaagcaatttttaaataaaaaagctaagaggcaagctaaaaggcaatttcaagtaaaataagaatctaacaatgtcccgcttaggtgagagtcaaagttattcttattttatgagttttctattatttcagtattgtaaatcctagtctaagttgttatctattagggatgagtcaactagattttgcatttacaaacatttatcagtcatgatctaaaacttttagactgtttaacagatggccatcaattggggatgaatcccattaaaaacaaccaactaagacaatgtagttcaaaattgatactaaataattaataatagaaatcaatgatggtttaatataaactcacacacatttttataaatttgtaaacatttagcaagtaatgaagatataaaataataaaatagaacaaacatatctcaaatattttttaaggttcttaactaaatgatatagtgccctgtaggatgcaaaaatatcaccagttaaatagagtagtcagctcatctagaatggaaactattttagcgaccttttattcgatcaaaataataatttaaccttttagcccaaattaattataatctattaaaaaattaacattattaattttaaattgatattaggttcaaatatgaaaaatacaatattaatgatgaatagttttttctacacagtctttcacacaaatttgagtatttcgtcgaattgtgtaggaaattactaaatgctatagaactttaaatttgagagagagagagagagaggggagagagagagaga

SEQ ID NO: 224486 - DNA, 1892 bp, Cannabis indica
aactattcatgaaaccagatttggtctttctaatattgtgattgggaaagacaatggtgttgtttagttagatagccaagattaataggatgagtggaatatggttgaatataaataggtaaaaaaggtaattgagtcattgtatggagggtggttattgattggggaattgaaaagtatatatagttgagtaaggggtagtgtggaatatgcaagaattgagtgttcgctctttgcatcatggatattaggcctctcgaatgttatggttacctcattgtaattctattcattctgcaatatcagttcatttgatcttagtgctactgctatttgttctattgctctgttctatcattttggttgctgaaatcggtgctcaagggaattggttcacatcattcttaaactgcgatttctacgaaaaataacttaaagtttgaaacctcttcatataatttttttaagcatggattaatgaatagtttttggtatgaaactgatggatgataatatactttgagagattcaaatgggttgctgtatttgcctgttctgcagggtgtactgaaggcgataaacgtgaacaagcttacctctgctgggtgcagagtgaaaatctggattgctgattggtttgcacagcttaacaataaaatggggggtgacttgaagaaaattgagactgttggccgctacttaattgagatatggaaagctgttggtatggatctagaaggaggcaaagtggagttcttatggtcatcaaaggagattaatgcgagaggggatgtgtattggcctattgtaatggatattgctcgcaggaataaacttccaaggatactcaggtgtttatatctgtatgaaatttgtattttgggatatatcgtatgactatgatggtgctgattatttgctgatttttgattataggtgtagccaaattatgggacgaagtgaccaagacgagttgaccgcagcccaattttctacccttgcatgcaatgtgctgatatattcttcttgaaggtacttgattttgtgctcttaattgttattattgctcggtgtttagggaacatgaactaagtcgcatttcttcttgtatctgatgtatcatatgtatttttttgttaaagatgaatgacaaatgatgtttatgtaagctttctcgctgaactaatgtttttttttctttttcccttcctaaatgtaggctgacatttgccagttaggaatggatcagcgaaaagttaatgtacttgcaagagagtactgtgatgacatcaaaagaaagaacaaaccaattattttgtcacaccgtatgtatacacaatattcaattctgcttattttgttttcaaatgtttatgcagtttcatgattttttttttttatttttttgtttgcttaatggcgttgtgtagacatgttgcctggattacagcaaggacaggagaagatgtccaaaagtgatccatcatcctccgtctatatggaagacgacgaggtgagttatagatacaaagttgttaagattatacatatttgacaacgagtgcctgctattagttgtaccggaagtttttgaactgaggatgttacaatttcattttttgcaaatttgaattaatatttttgttctgttgaatttttgaagtgggaagatgttacaatttcattttatccaaatttgaattaatttcttttgttctgttatgttaggctgaggtgaatttgaagataaagaaagcttactgtcccccaaagattgtggaagggaatccatgtctagagtacattaaatatcttgttttggcctggtttaatgagttcactgttgagcgaagtgaacagaatggtggaaataagtaagtatcacaaacatg

SEQ ID NO: 224487 - DNA, 1207 bp, Cannabis indica
aggaattcttttcagctgctagaagacattgctgaaagttcagaaaagattgaagaagagatcaacacaagagagggggagtaccctctctttccaatggataagttcctttgttggaacgtccgaggagctaacaatcaacataaacagcatttaataaagcaatttatctatgcccaacatgttgattttgttggtctcctcgagactagagtaaaggccccaaaacttgggaccttgtactcaaatgtgtttgagggttggtgtttctcttcaaatatagctggcatgctggggggaaaatagtaattgcttggaatcctttcaggtttactgttgacatcattaaatgcactagtcaattaatgcatttaaaggtttcaacagtagatggatttgatagcttcctaacaataatctatgcatccaataacagaattgaaaggaaggctttatggaaggatttaagtgaactagctactgttgaaaactggtttctcatgggtgatttcaatgatattcttgctaaagaagaaagaataggacacagagttaaatcttatcctgattcggaattcttgcaatgtgttacatggtgtaatttggaagatgttaaagctagtggcaactttttcacttggactaataagcagcctgggaatgatagaatctactctaaaattgacagaatacttgctaatcaggcttggatcaataaatttgaatttgctaaagcggtgttcctcaatgagggtctatttgaccattctccgggtatcctcactctacatcctggtgtggtaagtgggaaaaaacctttcaagtattttcaaatgtggaagtcacatcctatgtttgagacttatttgaaggaggtgtggaatgcaaggataaaagggtccaaaatgtctcaggtggtgtccaacatgagacttttcaaggctaagctcaaagagataaatagagatggtttttcggatttacagagtttggttaggaaggctaaagctgaccttgaggcagtacaagaacaattacagcagcaaccgttgtctattgagttacatagcaaagaaaaagtagctagagaaatgctaatcaaagtacagaaagattactcatcctttctacaacaaaaagccaaactagcttggctagagaatggagataccaattctgctttgtttcatgcttgtgtaaagcagag

SEQ ID NO: 224488 - DNA, 2123 bp, Cannabis indica
agaaaatagtgtatgttgggtaggtttttctgcctataatgaacttacagatgtttcaattgtgtgagttttccaatactcgatggaattgtgccagcgatatcattgtttctcagttctctacaagttatatatgatgagttgttaatttgacaataatccatgacattgattttgtgttgagaaagagtgttacttacaaagttacaagagactttatattggtgataaatgcaagaggggaacttgtattagaaatatcactcaaccgcctacataaatataattcacagtcacacttaagattattagctataaaaatttgaagatgaaaattctattgagccctgttactcacaattgtactaaagaagttagagttgctaaggttgatggtataggcccttgaaaagagttcccttgcaaagccctgtatcaacacaaacaagtagctaactattgtgaatatacagatatagacattgcaaactaactatacagttcaacttttcttacaagttaataagatttgaccaagttcctatgaagtgaggtatcttgcctgtgagttcattatctgatgcataactggtaaataaaaaatcatcatgtcataattagacaacaaactttttaaacttattttaaatcatatcatatcatcatgagaaaagggtacatataataaacagtttacaagctttttatgctttgtagattttcaaatgttgaaggaatctcgccactaactccacaactgggaaaactactacaaaataaacaaggaaaagcaaaggaatcagggtggatattgggaccaatttacaactccattactcattaagttgaataggaaatcttaaaggataaattgttaccaccaacttacaatatttccaatttggtcaaattccctagttctggcggcaacggaccagagaaattgtttgatagaaagtacctatatacaaaagtatttccaagaattaatgtcaataataatgtgattgaattggtcaatggaaatttaacaacttacaaagatgatagctgactaagtagtcccaattcctttgggacctctcctgacaatgcaatcatactcaagcccctagaaagtagtaatcccaaagagaatatatataaagaaatgaacaagtatagagaaatatttgaatatatcataccaaatctatgtaagtatgcttacaagtactgtaagttagtgaggtttccaattgatggagaaagagaaccagtcaagaaattgcagcccaaattcctacaaaaaatgatgatggaattaaaacaaagtgtaggtaataataaattaatgttgactgaagaggtaatgataagcattgaaaggtcagaagaataagcacatacagataggagagataggtcagagtccatagctcttctggaatctgaccaccaacatccattttaaaaatattcctgcattgtgattataaccaaaactaaatcacaaaacaaagttggatcatatatcactttaaaggatgttcacaacagcctacgcctacctgcaatttctattattaattttaccattaaactctggaaaattacagttatcatagacctttacctctaagcccaagaagccttcaaattgtttttcttttacaatttttttgaatattagtccataaaaaaggcctatttcttttttgtatctattaattaaaaataccatcatgttgtattttataaaatacacccatttttacgagtgagttgtccaatatataccatcattttctatttatgataaaaattaaaataaacctaatgagtaagttattaaaaaaagaaacacataatgtcatcaagattcaatactaatccaaaaataaagatatatatataaatgtacatacagttgagtaatgtgacatagagaaccattattaaaagtgcagtcgcatttgataaaaggtctcaaagatgagttattgatgtagatggagttgtttatggcggcaccactgcatggttccccacttatgttccactcaaaattagcctttatcttccattgctcaaatatagagttcaaagctctcactacaatacaaccaaattattttcataat

SEQ ID NO: 224489 - DNA, 2168 bp, Cannabis indica
aaaaaataaaacaaaaataaatcgatctaacatatactattgagtattgactaggcataattatattagtttatttttcttttcttttattgtttctttatctttatatattaaaagtggctatctaacggcaattcttggtttaacgattctttttttttaacgtccaatagaacaatttttattttttttaaactgaaccttttaacgccgttaactatgttattataaaaaatatataactatattcttaaatatttcgtctcatctcaattgttattttctattctcaatcgttatatttcgactcattttgtgtatttcttttttcaaatccatcctcgtgaatggagcttcagagatcagtgatgatgaggctctttctagggtttctgctactgtctttcacacatatctcaattcatggtagattcgtggtggagaagaacaacttgagggtaacatcaccggaccgaatcaggggaactcatgacatcgccattggaaacctaaaaaaactcgattgaaaattgccatcgattatcgtggaaatggtgatgtggtcggatttcagattccattggccggaaaggggtatacctgccacatttgaggttcagaagttgtgtcccttagaatatatggtttaaagagatttgatgtaagaaaataaaatctgtatttgatatattaaattcttgtaattctatggctaacaattttgttttgtttatccaagcccatcaaccttgtaagtagtactgtgcatctgttaattttgcacatcctctgttttgttttcttgaacaacgaagctttactttttccttgatgtatatatagcaagcaagctacttttcagttttttggtggcagaggctcctaacttataaagtgatgactaagagcataattcatcaaataatactgttcggcggcggcgattgctccgatgacggcggtgaaatcgccacgtcacgccagcgaaggtgtcggtagtcctcaatcgcatcgcgccccgagggctgctgaaggttcggcatggaaccagattgttcgaggtgaatcagagccgatcgcgactgtaccttcttcgacttcagctgtaacggagcaagtagtcaccccgatggttgctgctactttattttgaatttgtatgaactatagctcatcagttgcaaatggcatatctttttagttcaaattttctttgatataaactttgcaactttttttataaactcatttttcttcttttgagtttatttctaattttagtgttgaaattgtttttacagtgacattatctcaattgggttgtccaagcttatcaggtacaatagtcttccacttctaattttacttgtttgactttgcaactcagtatctgttttcatctagcttgatttctttagtaaaatatttccagtttcaatcagattttttcttcttttcatgtcattcattctagaacctttatcataggattgtatccttacacatgcagaacacaactataattttctatgacattaggattggtgatttactatgttcctattgtagttttctttgtgtttgcaaggctgaatgggaaaattatatcaagggaattgaatggggaatacacttgtgtgtggaagcaagatggttgggttcctgcttactatgctttagcaattctaacaatgttgtggcctttggctttattggttgaagctcatgtgtttgtgattaatgggattgttgcacagtggcacttttgtaaggaagagtcaactctcaaacgtatctataagaagctctttgaggtgaacatactctgttaaactctttgtttatatgtgtttacaatttatggttgtattcgtacatagctgcaattgttttgatcatgtttgtgaaagttgacatgacatgtgttgcaatgttcaaatctgaatgaaatgaattacattttttaatacttttaaaagtcatattgtggttgaagctttggttttgtttatccaagcacatcaaccttgtaggtagtactgtgcatctgttaaatttgcacattctctattttgttttcttgaacaacgaagcttcacttttttcttgatgtatatatagcaagcaagctacttttcagttttctggtggcagaggctcctaactta

SEQ ID NO: 224490 - DNA, 2049 bp, Cannabis indica
ctaaacttcatccttgacctcaaatttgttctatcattgtaaatacatcgctaaatatcataaaatatcgcaaaaaactagtaaactagaagaaagaagcgcgaaaaatgagagaggccgtgagagaagatgacgtcgaggccttgcgaccgagaatttgggtctgtgtgttcaacagtaggggttctaggtcggggttaacgccggagagaaagagagacatggatgtttggtttttatttgtttaagggtaaaattggatgagaaaaatagtgtgagtatattttgcatgatgcaaaatatgctagcatatttttagtagatcaattaattttaagcatataatatcaaattttgtcttattatatcctcatacgtaattatatatatgtaaaagaaattaattataattgtcaaaaccgtttatttttgtagtagaattttcatatatatgttaaaaataatatgttgtgttttggggattttatcaatattcattactacacatgttgaaagttttcattataataataactaggtaacaaggtaacaaaagggcctttcacaaggttattatattaattgaaagaaaaaatttaatttataattattttaattttttaaatatttttaaattttctatgtagttattaatatttttatttagtaacatataaatgaggatctcttttataatttcaaaattatttttaataataattgaataatctttttatttctatttcattgttttaatttttattattttttaaattattattaaatattattatcaatttatataaaacttgactacctattctataatttaactacatttacattgtgaatatattctatatttatttatattttattgttgtacataatatatttttgtaagtaaatctaagttcacttaaagagaatgaagacgaggtcttcctttatgcgtctattattatccatatgatttggagggtgcgaaatgacaaggttcataataatagaatagataatatgaatcagtgtattaactatgtttctcactcttatgcagattataaagattcccttatcccctccccatccccgacccctgccccgctatttggtgtcctcccccttaagactggatttagttaaattgcgatgatgttagagttggtggggagcacatgtgtattgcagttgttggtagagacccctggagcaaggtgatttgggttcattcggtgaaattggacttttttgatgctcttcaaggtgaagttgtcgctgtttgtttggctcttgaagcggcgaaggactacgaccacaagtttatcttggttgaaaggaattcttgggtagaactattccttgttttgtaaaagagtcgtctcttcctttattggttgtttattttattactgttagaaattataattttatgactcataatgtggttgattgggcgtttgccggcccataaccaattttggcgacttgctctcacgtctattcctacgaacctcttttataatgaccgcgaaatctaagttttattttaattaaacgtctttttttatatataaaaaaaagagaatgaataaaaaaaatataaaaaaattaaagaaaatagaatcctaaaataaatataagatgttaattacttcattttttttaaaaaaaattataaaaaatacattgaaaaaatgtgagatatcacctcattattcttaaacttttttttatatatatacacagaagattacaaatgtattacaaagtaaaataaaaaaaatatatatttaaagattttgcaacaccttaagtatttttaaatcattcgagatttttactaaattagtaaaaataatataacctttttatttagtgaaaacttaaagcatcctaaaaattgtaaaaatatattaaaaatatgtaaaatatcattttatcactacttatatttaatataagaaaatctaacatcacttcacatgcatatatatatatatatatcccataaaataatactttatgtatttggtgatgtatatatat

SEQ ID NO: 224491 - DNA, 2214 bp, Cannabis indica
cttagcctctttcattccaaatttttaacatagtattagagccgcttgtgatctgttgttggtcgaaaaagacgagccaaaaactaaaaaaacttttgttgtctcccttcaacctctatttaggacctttcggccaatgtgtgccaattttcttatggtctttgacttattttaaaattcacaaatttcatgatgtgtacacccataaattctgcaatttggtcttgtgagattctttcaagtgttacgttttgactctgtggtcttttaaaagttgtttgttatacccacacttttaggcctaaacgtgaggagggtatattagagttagttttacattgctaatgtatggaaataaattatcatatataagatgaatgagctactcctctcattgtcaattagttttgagatggaacctcattcatcttaacctcttttattctaaattctaacagtatttgcggcatcaatacctaaattttttcaattttatacacttatatatcacatatatatatttatatatttttgacaaattaaatacttatgccatgtttactttgttagaaaaggaatgaggtgtaagagagtattttccaatgaattatttactcagtaattataaaacttggtggctcctacctaaaggagaaaaataagagagaacttcatcacccaattggtcaagtaatgacattacgggtaaaaagtatattttttttaattttttatatgaaaaaattaaaagacatatataccatctaattatttataaatttagttttatattttatgatttaattttaaaataaagaaataaaataaataaatattttctgtgaagggtaatttagtctatctaaactattccgattatctttcctaattttgtaagcaaaataaaatgattttgattccctttcattccatcacttccagtttgttaaatcctattaaaacagattaagttgacacatgtcaacatattagtggtccactcaaaatatttttaattaaaaaaaacttatgaaataattctaaaattaaaagaaaaataaataatgataaaattaaaaaaagaccaattacattctaaaataaataagttataataaatctaaaaaattaaactctctttatttaaaaaaaaaaatccatttcactccgtcttcttctcttcttacacaaaccagtatcatcactaatgatgcgtgtcatttgtcacaataaattaaccatttttttattttaatattacaagttactttagtataacagtaaatacaagtcgacccacgaagaatattatcaatttattattcaaaaattagaattaagaattaaaaatgggagttttaaatataaacattaaataacataaactagaaagcaaataaaaatagcaatatatctacaccctcaatgatcattcaatatcaataataataagaattattttaatttctcaatcaaagtattaactccggagaaaacgcgtctattgttattgacacgatctggcgggttcagaatgataaggtacataataacaggatggataatgtgaatcattgtattgactctattcttcacttttatgaagattacagagattcccttattccctccccatccccaatcccttctactgtttggagccctcctcctcaagactgcctcaagttaaattgtgatgtaaaagtaggaggggagcacatgtgtattgcagttattgctagagattacctgagtgaggttgtttcggtcaataagaaaaaattggactttccagatgctctttgtggtgaggttgtcgctgtttgtttagctcttgaaagggctaaggaaaagggccactagtttatcttggtgaaaagtgattctaaggtagtgatcaattctttcaaatgcatagatcctagatgagaaattaagaattattccttattttgtaaaacaattatttcttcctttgttggctgtttattctgtattactacaagaacatgtaattttatggcccataatgtggccaactgggctttcgcccataagcaatttgggcgactagctatttcgtctattcttatgaacctcttttgtagcgaccgtgaggtctaatttgcttatcgaatgaatgattttttcaaaaaaaaaaaacccccgtaaaaaataactggaagtagtcaattttctcaatctccctattac

SEQ ID NO: 224492 - DNA, 5525 bp, Cannabis indica
tatatataaattaaaagaaaaagtatcgatctacatataactttacatttttacagaatattaaaacgccaacctaataaaaaaaatattcaacacactaatataccaataataatgaactactataatgatgtatatatatatagttgtcttaccttattccgcaaatcattccatatatattaatattaaataatctgattccctgaatccaatgatccattcaataattgaagaaaaataaagaaaaagaaaaatatataaataaatacttaactacgtaaaataaaataataataacaatagctaggtagatatatctttccgtcaatttttaagtaactcccccttccacgtatgacgtacctttagaccatttctaaattttaatgggagatgtaaaaatataataaatttacattaaattttaaattttaattttgtacttcaaggtataattacaaaattttaaaattttaaatgtaaaatttaatatttaattaatattttattgaaaaaaatttaataattttataattaattattttaatatgtaagacaataaaaatacaatataaatattttataatttaatgtgataattaaatatattaataaaatgtaaataaaaatatagtgtatttattatagtgtaaattttacattatagtaaatgttgtgtcaaatttgacataaattttattatgtattaaatttacattattttttatcatactattaaagtacattttttattaaatgaactatattttaactttttcaccacttattcacacctccaatgtagaatgctcttctaattaattccctctactctagtttgaaattcaattttacgaataaacacaatccttttctttacatacaaaaagcaaactaaattaaatggaatttgaaacgaaattaataaaagacgtgagaaaaagagaaaagtagttaaccgtggtcaggtcagctaattaaccatggtttcaggaacccacgttaagcaattgtgagttgagtgagagactatgtatctgtatctctatatatacatatttgataataataataataataataaacatatgaatgaattgaagactatgatataatgtttggtgaagggagctttaggaaacgaaggccggccacgtggatgtcgatggtggacaaagtggtggtggccgtgaaagctgagagagtcatctccaaggccgcacttgcctgggctcttactcacgttgttcatcccggcgattccataactttgctcgcagttttaccctcccacacaaccactacaagtacgtaattaaactactaccaattaatcaatttattggattttaatttcgaataaataaaaatcatgttccttatatatatcactagggaggagtagattctggagatcatttccgatactggcgggagactgtgggagcagccaccctcaccgggagaagctatgcgatcggattagtgagatctcggagtcatgttcccaaatggtgcttcagtatcacaaccaaatcgaggtcactcctcctcatcctttctttgactttgatccccataatttatgtttaattttactaatgtaaaaaaagaaagatgtttttttaataattaaacaacaaaattaagctggtaattagattacaatctcatttttaaaaataaatattttttcaaattgtggtttaattatagttattttttaaatatttgggttaacagaaaagaaccatgtgaatgtgatgtatatatatatatttttacccccctctttttttttttattttttaatggagactataataattaaagatatgcccgagctctaatattgcttttaagctggctcattgtcattgtccaaacattatttgataattgattaataaaggtaataaattatgtcttgataaagaaatggaattgcattcttgcaggtgacggtgcgggtgaaggtggtgttagatacactagcgggtgctgtggcggctgaagcaaagggcaatgaggccaactgggtcatactggacaagtaattaacatagaaaaaaagtattatttcttgtttctgatcagacctaattaattaattaattgattgattggccacctctacattcttaatttattacctgttatttgcattattgtattgtatttgtatgtactactggtacctattttccattttgaggttgtggtgagggcagaggaagtttcaccaaaatatagaggcccttaattatatattacttgttctgtattttacatgccatactcatagtactgatagatcataaattaattgttctgtttctggggaatctgttaataatgtaattatattaattactattgaatattgtcttggaaaaacagaaaattgaagcaagagctaaagcactgtgtagaggaactccgctgcaacattgtagtgatgaaagggtcgcaaccaaaagtgttgagactcaatttaggatgctcagaccatggtggtgggagtgggctggaaaccccattcttttcagctgcttcttcgccagttatggacattcgaaagttgaaattgggccataagatgaagcattccactccggtgagcagccctgaagaagaaacaactacatcctgcgcaagaacaagagaaggctccatatcgagtttcaacagcgccgcctctattttccttgtctacgaacagaatcctcttttcgaaggtccgcacaatgggacttatagactaattgatgaggagcaaaatgatgatttggaactggaagaatcattatcagctatggactcaaataaacatgaaagtgttataactctttctaaaattccaacatctgtggcttggattccacaaagccacgcccttgagcttgatgtaggacagctgcctattaagcctcctcctcgtaataatggcaacaaaaatcatgtgttttcctctgccactactagcagtaatagtagtagtagtactctgttttatcaagatcatgtgacaccagctgcaggtagatcaataaagaaaagggaatatactatcaattcaagcattagggatgccgtttctctaggaagaacttcctcagtacctcctccactttgctcaacatgtcaacacaagacaccgatgtttggaaagcctccaaaacaattctcgtacagagagctagaggaagctacagaagggttctcacaaaaaaactttgttgctgaaagcgggtttggtgtggttcacaggggaacactgagagatggacaggttgtcgcagtgaagcatttgaagttttgtgggtctcaggccgatgctgacttctgtcgcgaagttcgggttttgagctgcgcacaacacaggaacgttgtgttgctaaatgggttttgcattgagggcaatatgaggatgttggtttatgagtacatatgcaacggctccttagactttcatttacatggtataactaacctcttaatccaattgcatgttaatgcttcatgcattgtcccactacttattctactactgaactgaactttgatctctgctaactaataaatgggcattggcaggaaacagtagcccctttagaatggcatgcgaggttaaagatagcaacaggcacagcccgtggcttacggtatcttcatgaagattgtagagtggggtgtatagtccacagagatctacgacccaataatatcctcctaacgcatgattttgaacctatggtactacctactaaattcaaaccaaatttactccatcttgttaatccagtccagtacaacataagtaataatcattattgtacatgttgtgttatttgtctatacatatatataggttgcagattttgggcttgctaggtggcactctgagtgggacgtcagtacggaggttcaagtgtttggttcagcagggtacactaatattatttctaaatttacccattaattatttaataatttcatgattggattaaattgggtatgtatgtatctgatcaggtatcttgcaccggaatatgtagagggtggagaaattacgcataaagttgatgtgtatgcgtttgggttggttcttttggagctgatgactgggcgcagaatcagggagttgcaacatgcaaatgaagagctttttttggctgattggctcactccattagctactatggaatcatcatattatcagttacttgatcccaccttggctgttattagtacttctgaccaatccagtactacttctactacttctactactactgatttccttcgtcagttagatgccatggggcgagctgcttccttgtgtcttcgtcgagatccagactccagaccccaaatgtccaaggtactctcttttttatcctgcatatgcatgccattactgttactattaattaattgaattatatatatatatatataggttctgagagtgctagaaggaggagatgtagtggttccagcgggttcaacctcaatcggtagtagaagtggtcacttgaatggtttaagttcacgcccaaaacctgaactcagagtcagtcattctcgtaggctgtcacactaattaaaaatagatttcgtacggtataacaatgaatctgtggtcgtggattggaccttgctctttatagtttttatatataatttatgtgaaaaaaaagctccaaatttattcatcgttatttattaccattggatttgcatttatattgggatagttgtactactattatgattacaggaaaagaaattatggtttagccataaatgtcttctacctatcgtagcattaatatttgttgtcacacgtgatatacatatattactgaaattttaggctttgtaggagtggtttatttagtgatgttcacactctgttttcttttgtaacattttcgcaagttcattatatataattaaaagaatttcttcacttttttctcttagagttagagaaatcaaactaaattatcctatcctctcaaatgtatcaccaaaattcactttacattttattccttttttatttcaaagttttagtgagggtcggtttgagatggatgaagttatacatgcaaaatttgttaattttctattttttttttatataaaatgatatttttttattttttttgaaattatacataaaataatatttaatatgtaactatgatagtaacatttgttgtagtcttgaattgttattcatcagttgtgattaatttaaaaattaactaataaaataattactaatataacactacatactacatgcatgttggcacttaaaaatggccaacgatagtgtttttttatagctttattaatcaaacaacactaagaccagtgttgtgagccaagagtaaagtataaagtctaaagagagccttagaacttaaattctaaaaagagaagctctaaaaatcagaattaatgaagtgaggaaataagcctcttaattataagaaatgatgtcctaa

SEQ ID NO: 224493 - DNA, 1292 bp, Cannabis indica
tcaaaaagtttccaaaagcttaaaaattgctttaaacttgttaatggaaagtacaaagaagagatatccaagaagagaaaatgagatgtatatagagagagaagatcaaagatccaaaagcatgccaagaaaaaagctaacacttggctagacaaggctactcaacagagactgctacaaacaagatgatagctagaaagtctctatccgaccagatgtttgaacaatgacttgggggataaatgttattccaaaatttgtccacctgatgtggcatgtccacgtaagccaaagatagagtacatgtggaatacaactttacagggtctccatggaaggtatggcaaaactgttaagtagcaactgaaagaagtgaagcgagccatcaagaggttgtacaaatatatatggctatccaagagaagcctataggctggctaaagtgagcttgtatggccggccaaggtctgggaacaagctggctggccaaaaggtaactgtcagaccaagggaacttccgttcgacaaaaggaacctgacctctacaaggaaacggtgtacaaagctgtcctccacttgccaaaggctggcctctacatccaaaagttaggctcctcttggtagagctacagtgacctctaagatcttggcaggcacatgacctgccaggtcctggtaggagcatggctggccagacctcaacctgtagaccttggccggctagaccatatcctgcagtgtatgggcggccaggattgtcctggaaggactttatgtacaacctgatacatggacaacaagttacctacaaattaggcccttaacaacctaacaaactaatgaaaactatctactttctaggggaaatttagtcttttgtatttaatcaatttatatgtaaatatctaagggtttaagttgtaaattagggtttaggttttcctatataaaggccttaactctaacatagaaaacctaagtctaattctagcctgcaaatcactccaagtctaaaaccctaatctcttctcttctctctctctcacttgtacacgcctaaggggctcttctcacttcatctctcacatgccactaaggcaatacctctctcaatagagattttcctacttgatccatgttttgtaaccttatagagagttatatcatatcacacctataatgatcttaataatattatctcttggtatgaatacaaccataataggagttggtcattacccgctaactaagggggctggacctctataaaaatccttgtcttatttacttta

SEQ ID NO: 224494 - DNA, 1659 bp, Cannabis indica
ggacttggacctaaacccgagaccggactcggatgaggacccagacataggacttagaaaatataagttagtgataagttagaaaaggatagcactcaactctctctcttttcctttctccttgcccgaaccctaagttaggttgcaaccaagggattttcttctccaattgtcaaatttcagctgggttatcaagggttagcgactgttcaagctttgaggtaagcctcctttgtgaatatttaaggattttataagttttaagttagttttgggttagggttttagaaattcggggctgtgatgttaattaagattagattatgtttttaggtttgttttagggtttgtaggaatttagattgggtgattttagtggctgtttggttaggtttcgtttagttgaggattttttgaattttatttcacttgagtgtgcaattttgagttaatggatgaattgttgtaaattagtgcttggaatacattgtatttatggtattgtactgttttgggaagtttgagcaggtttggatgagattgagatttgtgtggttttggggtgaaaactaattttctgtttctgccagctgagaaaccggttaacgaattttacaggtgctgtaaaatcggtcaaccagttttcccggcaggggaatttttttttttttagcctcgaaatcagcttttgttcggggtgttcttcagaacttaaattagggtaatttagaaatattttaattgttccaatccagtgggagttagatgtttggttatggagattatggtttgattttggagttttgataagttgtttattggattttattttcatgacataggaccgggatcgcctacctggttttccactcagggcggcctgcaaacttgagttttggacagaggtaagaaaagtgttatgtaacacttaggattaagtgattaacaattgaattgtttaatctcaattatgatcgagatccagtttatttgtttattaagcctcggttatgactgaatgttgggaaatagtcattactcttatgagtaattactcttgaaactacggataggtttcttacttatcgtttgctttatcgggaaatgatagtgacatattcaccttgtggttaacgagtggtaagggtactttatgtaccattgtgtttacaatgttttgtaaaagtttaagcatgttaatttaagtgtaatcgataaatgttataataattatcgttttattcacttttcttgttgagtctctgtgactcacgggtgctacatggtgcaggtaaagggaaggccaaagttgagcagccatgagtttgaaagtcgtaacaacaatgtacatatcagccgcggtgttacggcccaatgattagggtcttccatcctgattgtatttttaaatataagcttacgttgtaaaagcacggtgaaactggctgtaaatattttgacaatgggggtccccgtaaagattagtaattatctttaataaaagttttgtgtttatttaaattaaaaaagttttaattaacctcattttttagtataattatacttatgagcaagtgtaaattttataagaacacacacgtggcgtccctgttgaacagataattaacagattaaaaaataattaacaggtgatattga

SEQ ID NO: 224495 - DNA, 1868 bp, Cannabis indica
atggaaattaaacttttgaacatataatcatgattatattccactatgatgacgatactgtaatcatgaacaaatatatatatattttagacttaatagaatttatacattaaatataatcataaaataaattatgtgaaccatgcaatataaaaacaatttttgatattttattaattagtaaatctgattatattgaaatgagttttatttagggcagacaacccaacagttggaatatggatgctttaacattttctatgtattgatgtcttgaatcaagtagtttattgtatttttcttattgaaatcctttaacctttatattagtaatggaagatctaaacttgtgaaaatatcaatttttttcatttcaaaatatatagcattacatgaaaattcaacaggaacacttgtttaagatcctactaaataacaaagttaaattacgatcttgaaccaaagtaatacaaaagcaacaacaacaccaatgacaatatttctacaaaggatacttttaatattttcttggcagctcgaacaatgaggagctcgaacactggtactgctatcatggaagctctcacttttgcacaggtttgtaaggtaaggttgctcatgtacttctcacacttctgacctagaaattattaatatttcttgttccaattgacgactcttcctcaacagaccaagaatcacaatagtggcacaatcatacataggaggatagatccattcccaaaactcacacccaccacaatgctgctagccataaacattcccacagtacagtgaacaaaaatcaagaaaagagaaaaagaaaaaagaaagagaagaagagaaattacgggaccaagagggcactttacaaatcttcttccttgattcgaactcatccacaaggtataaatttttaggattttaggctcctcgcaattgcaactcatctttcggaccgtcgccatgttcttcttctttgcacaataatggtgcctggtttctttctctctctttgaccctcttctttctttgttttttgtttatttattttcatttattttttaaatttcatcttaattggtttcattaattatttttagttcgttaatcatctacccagaccttacgtggagaatttcatgtgacatggcaaagttgatatgacaccacataggagccatctggcacataacggagccagaccaacggaaagactgctcttcaaaatgattatcgagtacagggagtatagccctaattttttgagtaagggggttaatccgtaacgaacctcaaagtataggaagtttggctgcaaattacccttatgaatattataatacattatcttttttctaacaaattatattacactacgtaattaatcataaacttgatgaataatttgttgatagttttttgcactactacatatttatcattatttcaaaaaattatcatttttataataatatgaaaaatcgtacatgctacaaaaattaatatttattggataaatataaatatcattttaattacagtttttataataatatgaattatcatgtatatacataggtttaaaagactagcgtgaagtgcggtttttgttctctaatttattatataaatgttaatttaaatagcttgggaatttaattttgaatggaaaattatagtaaatgactccaaattataggactatattagtaaatgtcctcatttcaaaacttgcaacaaaataacccttttagattatttattatttatattttctttttcctatatacaaaaattaataaaaaaaaatttacatattttttagtaattagaagcaaattatttaaagtattatgatacatttt

SEQ ID NO: 224496 - DNA, 2991 bp, Cannabis indica
atccgattctgattttgtctcgagcgctcatctagtttttcatggtaaatgagagttatgaactcagacaagtcaaatttacaacttaatattgtaacttttcggcaaagtgacttagtcgcaaatcgggcagttttgagtctctcaattttgcaaaacagcaacatctctgagaactggtgaaagactttacaataacacggaaacaagttaagtgatctctaaatatcactttggcattaaaaagtacaccttcaacacatttttcccttggcctagcgtctaggttgacgtcatatgtcaacctgggtgttgggagcagaacaaccttcagtagaacgatcataacttactcaatattgatttgattgatgcaatttaacttgcattttaaagctatttcaatgctctatcaagtcatgtctcacactccaatcaaaattctaaagttttcaactccaaattttatcctcaagagagttataaatttaagctacaacttacctgaagtgggtcccatggacgcggctcaagcttcaaaaattgacgcacgaccttcagagtcaatttcaccgttagatcattataaatggtcaaaactaacctaaatttatttttcaattatttttttaaaatattttaatattatatatatgctataatgggatgaaactcactttttaattataaataattcatgtgaatagtaagtttcccatgttgtgtcaagttcgcattgaagaaaaagaaataatggttctctccaataaattgaaagaatattttcttaaaatatctcctaccaaaaagtttctattgtaacaaaaaatgaaaaggacaatatataagatgggtagaaaaaaattatgatattcaactcgatccatgatccgaaaccacaagatataaatagaaataatataaataaaataaacacaaacatacctatttaatagaatatgggttaacatgtagcttactccaatcagaagcttatattcatgcataaacataataatatatgattaaatacattatagctatttggaaatagattagtatttgttattgggatggatctctttttatggcagatattgggggtatatacttctttttttctagaatgatgcataattatttttgtatcagtctcctcctttagtctattgaaggtttggtaattaagtttaccggtccaaagctatctgcaggatccctaaagcgaggatctaagtctgcctcctcgctttgggctaaacttttttgcccttggccggactcttcactaaagctctttgcatgtatttttttttctttttaggctttggataaagccaagttgtagcagtgtcgggcagtctgttgatctccctttaggcatcctaccccatgtcttgttgggaactttaggcataggtggtaaattgacgttacaactttcagatcgtacagggttggtcgaccaatcataacattgaacgtcgatggcacatcgatcactatgaaccgagacatcactatccttgttgtgggcctttctccaactgttagaggtaatcaaatgtatcccaaaggcgcgaggccttggccaaagaacccgtacattagttgtgcgtagggtactagatctatcaactggagccccatcatctcataggttaacttgaacagtatgtgtgaagaagctttattgtcaattatgcacctggcaactgacatgttccttatctgagcaattatgaccaatggatcattatgagggaatttgactttggcagcatctccctctgtgaaggagatggtaggctcttcaagctttagatgtttaggatcttttcctctacagccagaatgtcgcagttttgctcgtgatggagagtccaagcgtagcgctccctagctttgcttatttccctacaatatgaggtctgccaatgatgacccctaggtgaccgacaacaggtggttgcattaggtctttgttttgggcacctcgtgcctatatctggtcgtcttgcacgtaacgatataggtggggattgttcctcctgattaggaactcaattttcaactttaagtgcttgcactcattggtatcatggacaaaattattgtgaaattagtagaatttggaagtgtccctcttgcttatgtctgtcttcatgggatgaggcttcttgtacagaactatggattgtgtagccatatagactgtttcaggagtctctgttaggagagtgaagcacgtaaacctctcctccttatcctttgagtcttgcaacgtaagcggttgttaaatttcccctttttgccatttcctcggccagagttattggtgttatgcttgcctctattattttgatttttggagggctggctggcattgcacatgctggcaggtgtattgggtagaactgagggttgttcgccagtctgggcctgtccggcacccgcctatctcctagtttgggctcgtcgaataacttcttcaagcttaaaaaagccttccgcccgatcaaggaagtcggctatgttttgagtttagtgtcaacggatatcttttcataactcacccaaagacagtacgtcactcatgatggttgtgtaccttccttccttcgttagattcttaattttggtagcctcagtcataaatttttcgaggtagtcttttatattgggtaatctaactatatttagaacattatatcttatcacattttgatttgtgatagtatacaatcaatgaataataagtgagataaaacaaaatcaatttaaaatgattttttactaatattagaaatattataatattaaatagaaatattctaataagtcaaatacatgataaaatgaggagaattaatgaatacctcaaaatcaaaacacatgataaatatctaaaagattcaaaactaaagctcaattattaaaaatttcatataggcatacctaccattgataggtgtcacgggccgcctattt

SEQ ID NO: 224497 - DNA, 1596 bp, Cannabis indica
ttttacaggtacctgtaaaactgattaccgggttttccccaaaaaaaccaaaaaaatacaaaccctaaccaaaacgattccaaactcaaccaaaatttccagacctgcatattatacatatcttccaagcaacaaaacaacaaccaaagctcaaaattgaaaaacaccattaaagctccaagtttgagttctaaaactcaaaacttatttaaacctaataacaaccattaaatcatgcttaattcaacatataaaactataatctaactccagaaacacaattcatacaccaataataaccacaacagctaataactcaatttcatgcaaaatctatttcttaaaattcaagaaaactagagaaggaattgctagaagcttaccttcgcttggattcattaagaatcactagaaaatacgcaatttgatgaaggaaaacaaagaaccctagctggttctatagggttcgaatgagagagagagcttgagagaaaagagcttttccttgatttttccttattttgaaaaatgagtaaatgaattttgttttatttaaaaaaaatatcagcttataatccatataaaaatcagattattaattaacaccaagtccactaaaggacaaaatacaaatggcaaaaagaccaatttgcccttcccacactaaaagtcataaaataacacttaagggtattttgagaaattctaaaatcacgactattcccgacatttgcaatgtctaattttattgtcgcattatactaaaaatactaggatgtgattctaatagccaaacaccgcgtttcaatgttgccgggcacaaaacatgcaaaaaatatgaaatttctatatgacataaaaatacattctgaattcaaataagtcatcacaaataaataattcaatactaataaataattttcataattaagccctaattatttgctaattttcaaattatagctatgcagtctttacaattatccccccttaaaaggatttcgtcctcaaaatctaacctgagtaactctggatattgaactctcatgtttgattctaactcccaggtgacttcctccatcctactatttctccagagtactttgactagagctatggtcttgttccgaagaaccttatcatttttgtcaaggatttgaactggctattcctcatatgacatgtctggttacagctcaagatttcataactaagtacatgagcagggtctgaaacatactttctcaacatagaaacatggaatacgttgtgaactgctgaaagagctggaggcaaagctaatcgatatgccacttgtccaaccttctcgagaatctcgaaaggtcttgtaaatctagggcataacttgcctcttttcccgaaatgcttgatcccttttatcagagagactcgtaggaatacatgatcccctacttgaaactcaacattcctgcgttgcggatctacataactcttttgcctactctgagagacaagcattctggttttaatcttctcaatcgcttcattagtccgttgcactgactccggacctaggtatttcttctcccctttttcatcccagtgaatgggaga

SEQ ID NO: 224498 - DNA, 1765 bp, Cannabis indica
gcaattaataaggaccctaccagagttggctggattcgagtagctagtttgcatcaaattaatgaatggctgattagtatctttttttgtttttcgatgggctataaatatatgaagcagagaaatgttttcaagaacaaaaaaaaaaaaaaaaaaacaaagcaataatcttacaaaataaaagaaaagaaaagtgcgattataaatattaattatgccgacggggccagtgaaactttttcaagggtattcaagcgccaccgggagcggtcactcgactgcagttgtgggagaaagcagtactgacggagtccaatgccatgttacttacaccatttgcgatggcgagaagtcactgatgaatttgatagacctgaatcagtctgcgaatatcgatatccttagtttggtatcaggtcacgagaagtttaatttcgtaaagagtctgaatatcaaggaaaaggacttgttaattgttgtgcacgctcgaaaagtggaagggaaggaagttcagaccatggctagattggcatctgatatttctgttccgatcaccaataatctgaaagacttctttctgtattatggcgactcatatgtttcgtcgatcacacgtgggggagaatatattggagtctactcatttcactcagaaaccaaaaatgaaactatgaagttggagttggagctcaaggccaatggagtattcaagtttggctccctcgatgccgattttaaaagtaaactggaaaaaacccttgacagtgttgagtcacaggtttcattcaagcaaatgatgttggggttggacgatgtacccttgcccaaaagagaagacatggttgagtttgcccgcacgtttcccagccaaaaactcaatgcgcccaaagttcttgcatttgaaaccatgggatatgaacacgtcgttgggagcgatttttcgtgcatcgcagtaaatcgagatatgttagtggaagtggcaggaaaattggacaaggtatcgaaactcatccaacgaatcaacgaaatacaatccatctatgatttttacggtggctacgaagactctcaactatgcaatgtcctcctccaagcaaaaaaggacttggtgtcactgaaaacaaattttttagattttcaaaaagatccaaccacgcctatcaccataccggagccgccgtccctttccaacggtatgccgcacatcacatacaaaatttattactcagaggagtatgggagacgtgatgaggacaattcagtcccatttaacttgttcacaacggtggatgagtacatcaagtataaaacgaggattaccgggattcagatgcaaaccatgaattatgagatccactgcatcaccgttgatttcgaatccaccactggaaggcgcacggagaagtatggcattgacgaaggatgttcgagtaaaaagctggtgctcgaagaaggtgattttatcaagaaattaatttataccagatcagccgacaataataaaattaatcgcctaggcatatttgtcgatgaaaatagatccattatcgctggtgtcgatattggaacagaacaaacgtttaacgttcccgatggtagtttcattctgggatttacggtcttctattccggtgtaatcaatgagctccagatcatctatgcggcgttccagccggccaaatggtcccaacttatttgaaaaccaaacacatgcacttgaatcaagtgttagtttttctttcccatttaattatatatgtttgag

SEQ ID NO: 224499 - DNA, 2278 bp, Cannabis indica
gttaatgcttctctgtatatgttgtgtctttttaatacttgtcatgttttactttgtcacgtaaataaacacataataaagaacatgagtaatttaggcctaattcctaaataatctttaaatgactttaaaaaatgcaaattttgtagccaagccaagactactaaaacaccacataaatcagtgatagaaaacgaaactgagcctctagatttaatccattctgatatttgtgaacttgattgaactttgactaaaaatagtaaacgctactttatcacttttattgatgattattctaactttacctatgtgtatttaataaaaaataaaagtaaagatcttgatatatttgagatatttgtagctgaaattgaaaatgaacttagtaaaaagatcaagaagtttcgtagcgatagaggcactgaacatgattccacagctgttgttgaattttataactcacatggaatcatacacgataagacagcaccttattaacttaaaatgaatggcataactgaagaaaaaaagatagaactcttactgaatctgttgttgctatttgattgaattcgggtgctattttaaaaaaataaataaaaaacattttgttggcaaagtatatttcaccgacaaaactaaaagaaagttttttggaaagttttgccgatgaagtaagctacgccgacaaaacttttgcaggtaaataaatttggcgcgaaagttttgtcgacaagtgattttgccagcaaaacctcatatcaaggacccctcaactgacacctaattgtcaacgagaggacttatgccggccaatgaagttgccggcataaaatattttaccagggatgtaagttgttttgccggtaaaacgccttatgtcgatgaatcaaacccaacaaccattgccagaacaaaagctcgccgacaaaataatactgatgattgatgcctagttttccagcgagaaaactcaccatcaaaagttatttctcttgtagtgaatattcatctacaaaagattcttcatagaaaatccaaactcactcttttctttgtacctttctctttctacctctcaatattttctctttctaactctcaactcaatttgatcgttctgtttgaaatgataggtgttggtggtatttataagcttaagatcaatattctatagtcaatggctgcaagaagtgaggttgttaagttagttaggtaataaacaacttaaccaattctccttttagagagatctcaacgttagcataagtatgtgtacattcgggagcttgtatgacggcttttggaactgcggaccaaggcactcgctaaaggagcatcgcggataggaaagagcaaactgaactcaaccatccaagacttccttctaggaagaatatcttactgtacactcggagtggacatgaaagtcatccgaaaacttctttctggatgtcaactatcattacataggacttctttcagattgataggtctgttcgggaacatacttccgagagacagataacttttgaagaataatttttggagacctttttatttaaaagaactatattacaggcagtttaggatgccatacaatacattatacggatgcaatagttagtttttttttcaaatattatttatttaattaaaatacatgtcaccatagtaaattacaagttaacattttgttgggattgaaatcctctgtcccaataatcaaaaactgacacatgtcttcgtaattaattctctattaagatttgtttggaaagaaaaaaccttcattttttttcagaaagaaaaaaccttcaacttttttttcaaaaaagaaaatcatctttttgtttgagaacttcatgcgtgccttttatttttctagggaagttggaaggcataacttaataccaatatataaatcaaataataggatctcaatgcaatatatacttagtattatttccacatctcatatatatatataaatacatataattctgtaaattttcatatctagatttggattctgcaatgttgtgaatgatgttcaattaaaattacctaaagcaacatgttttaatctatatgcctaaggaaattgatgcacctgtaaaaaaaattagttaaatgcatactttttttagacataatatatattaaaaataggtatgattcaagagaatgaattctatatatattaatttaatttatggctgattaaaaaaaaacttatgggcaagtaggattagttccatagattatcatcaga

SEQ ID NO: 224500 - DNA, 2273 bp, Cannabis indica
atagaagctgatattcaaatgatattggctgttgaagttcacctcatcaccaagaacaacgattgtcagatggagcattatgtcttcagagcagaagcgacgagatcaacattatcaacctcggaaagatatgggaaaagctccagctcgctatcaaggtcatttgtaccaagaacctgtcgagacatcccagaacgttatgatttataacgtgtttaatacacgattatcttgacccagtaaaagcagactaatcacatctttgtgatattcaaatattaaccgcgtttattttatgggatatgttatcaaaccccactattttaagggataattgtcgtaaagaggcaagttagactgaaaaagggacaaaaaattcataagagaaaaggccctagaacaatatcggaaatctaataagattaactcgtggactacgtagaattctaactgcaaaaccacgtaaaaaccttcaagttcattcttttctttttatttctctactgtttttatttttttgtgtaaacttatcatcgttaaggcaaatatctggttaacaaaaatatgcgttaacatttttgtgctttcattgagaaccttcgtgaaaagctcagaaaaaatcatccttacataaaaaaataatagtcctctctatggctgacaaacgaagaaaataatcctcacgaagaaaccactcatcgtcctggaaaagatccaagagtccccaaggatcctttgacttatcatttgaacggtccacaagctccgggaaaaccaagaatcttggaaccaaacttgaagggcctagaatgaacgatggcagttcaattccaaatctagttgatggggattgagcctatgatctgacaaagtatataccaatcgttgaattataaaaccgccatctcaggcgtcgattggaagaggcaaaccagcataatgcttaattagagtgtgacgcacctgtagccagggcgacacaagggaatagctcccaaaatcaacctgaccctagagagagagaattataaggctaacctcgagactcgcaaaccagggggcaggaggcagcctgaaggaatccccagaacgcttaggaaagacaacctggggaaactgggggataccttgaaggcgagatgccatatgatcaaccatgaacctgggaaccaaaaattcctcaaagaaataagggaaatctggggacacaaccaggggtacatgggtcatcgttaagagatcgccaatgttctttcaaaacttataggaaaggagatcccacaaatctcaatagagggaacgagatgaatcatacccaagagagaagagcggggcgtgaagaggcgagtattaccacgagacacacaataacccatagtcgatcaatgcgaggaggagagaatactcgttacaacaatgatcaagaaggcaaaatacggtctatgggtggaacgagatccgccagccgtcatggccaatcgaacctacaagaacgcttgaaccagaaaaaaattgatcttcgccaacaacttggtccaaaaaggggattcgatccatttgcgagtagacgagttggagaataagttcaagaagcatcgagtcagggagctaggaaaacaatcgggatgtgattttgtggaggaatttgagtcagaagcttattggtcaaagaggaaagacgactgtaagaggtcgtccaaagataagaaataaaagaaacacgataaataggtacccatttatactatctataccgagcttaatgaaactccggagagtatctaccttgtgtatgaacagaagggcgctttcgataaaccaaagcccatgaaacccccgagacataaaagggacccaaccagaagatgtgaatagcatggagatattgggcatacaacagaagaatgttgccagttgaaagatgagatagaaggcctcatagcgcgaggacacttccagcaatatggaaaggggcatgacaatgtccatgactagcccgatctacccagtaacctaagcgactagggaccataaccttcccctgtaggaggaacggataccctggttatctctggaggataacatattgcaaagaaataacgatgatgccccaaaagaaggatactataggaggtcacccagcattaattagacaaggggcaatcagtccggtcaagcaattatgtaaaagtattgtgatgtaatcaaataccgactcgcaatggctgtcgtataaagctgtgacacagtaaagccagtcgtcaaccaatggc

SEQ ID NO: 224501 - DNA, 2496 bp, Cannabis indica
aatccacaatcaacgacgcccgctgatggctcagccaagaaggtcagaaagccctatactataaccaagtccagagaaagctggacagaggaagaacacgacaaattcctcgaagctcttcaactgtcagtatatataactatataaatataatatatatttttttcaatatatatgtattaactgttttactttcagttctcaattatgttgatttgaattgaattttgtacaggtttgatcgtgactggaaaaaaatcgaagattttgtgggttccaagacagtcattcaggtttgtaagctatggcaatacaattttttaagagaacaaattacgagtttcttcgtctcgtttttgggtttgagttgaattgatcttcttctgcagattaggagtcacgcccagaaatattttcagaaagtgcagaagaacgggactcttgctcatgttcctccaccacgcccgaagcgcaaagctgctcacccttaccctcaaaaagcatccaaaaatggtttgttcatgttcatgttaatgttagaagataataatatgccattttgtgtagaattcaagctaaacaagtattttgttttatgatttgggttatcttgtattttcagttttggttccccttcaagcttccttagcttatccttcttcaatgaatcctatggtgcctgcgtattcaccatgggatgaagtttctttgttgataagtcccacatcaagtaaaataacatcccaggaagaatttggtaatcttcaagcaactgaaggcatgcgttttttattttctttctgtgtgttctgtattagtcgtagttttgtggttttgaattttgttaaaggggactttcaaatgcttattatggcatacaacgttactgattcagctgatattgcatcaaagggggctgcaaggaatagtaacaacagtatttgtggcattgcaagctcaagtagatcaatactaggttctgagataccaaagcatgggaaacaaggttctgtgctccatggtaatcatccaaattataattaaattaggctgaattatgttgaagatgattaggttgtttgtcttttatgatcttttatttttcctatcacaggacccgattttgctgaagtttatagctttattgggagtgtctttgatccagacactaatgaccatgtgcagaaactcaaggagatggatcccattaattttgagacagtgagtttcttcttcacctttttcgttccttcattagctcttctttctttctttcatctagaagcttaaaagaactagttgcaggaagtatattttagttccagtaattttctattgccagtttgggattcagacattaatgctttatatgtcttctcttgtatcatgctatctgaaactggagaatttttgtcactctaataagaaagtgtacaagaaatgagcattcctattaggtagtggcatgttgcaagtgattactgaagttcccaaaggtagcataaagttatattggcaaccaattgtcagcagctactatgtaaaacattgatcatgaacgctagaatattatttatctctggggctcagtaatagtacttttctttgttctgccttattttatgaattggatcatattgatacaacttatagatctgatgcattggttcaactattaaaagcaggtttggttcaatgaagccgacttgtctatatagtgaaagttgtcacaagtgaaacctcgtgttacttttaagttatcatgttagacttcagaacagaagaggttactggataatgtgatacattttgtattgcccacattagcacataatttattcatttgactaaatttgcttcaggttttcattgtagttacatgcatctcatatttctagatttgttattgttaaaggtgccaatctaatgtaaattagtacattaactgcataatttttgttgcataataaaattgaacatttgaagtaatgtgcattattgtattggcgattcttgcaggttttaatgttaatgagaaacctcaccttcaacttgtgtaacccagattttgagcctattgtaagtattaccattccttcttactagaaatatgtctatatgacccgtaaaacttttatttaatacacttgcgctactattttcttgggatgatgtatgtgcatatctatatacaaacattattaagtagtaattgttttaattgttatttgtaggtacgtttagtatttttggtacatggattagctggaactctattttctttttcatatgacgtttataatgtagttacaggagacctacctctaatttttaggaaattttgaatgatttaagatgtcaaaacagtgattaaaacaacttgctgcatggtgcttgttttgcgcttgaattctgataggaatttcctatcatttcagtacaaacagtagcaaaaatagagataatagagataatatattgatattagaagataaa

SEQ ID NO: 224502 - DNA, 1804 bp, Cannabis indica
attcgatctttgaatggaaggaaacaggcaatttaaaacaggacatggcataggatgggattgcctgcaccacagatttcaagagaatttcttttccacctttagagaagtgctttgaattccatttgttcagatgagaccaggcacgatctgaaaggtagttgaatatctctttcttagttctccctaaagtttggggaagccctaggtatttctcaaaggaatttcgaacagggatgcccgagacagaagtgatatgacattttgtgttctcatcagtattgggagagaaaaagagagatgatttattataattaaccatctgccccgatgcagaactataatcatgcagaacttccttgataatgttagcggagctagatgaggctggactgaaaaggagactgtcgtccgcgaagaatagatgggatataattggggcagtacgagcaatcttgagaccaagaccattgttgcgaggattattggctaaagtcttctgggagatgagggatgaaaggccttccgagcagagaaggaagagatagggtgaaagagggtcaccttgatggatgcctctagaaggagtgacactgcctagaacctgctgattaatagaaaaagagaaagaaactgttgagatgcaggccattaccaaattgatgaatcgaggacggaagttgaattttgccatgatctgattgataaaattccattcaactcgatcgaaggctttagccatatccaatttgatggccatccaaccttatcgcccagatgtccgatgtgataaagcatgaaagacttcttgcccgatgataatgttgtctgaaattaagcggtcagggacgaaagcactttggcaggggatataatgcagctaaggataggtttaagacggttgacaaggactctagagatgattttctatagagtcgaacagaggctgatgggccgataatcagtcactagttgagggtgggaaagtttgggaattagcactatgaccgtgtggttaatggcctcaatgttagcatccccatttaaaaaacctttggcagcctctaggacatcattcctaacaatatgtcaatttttttggaagaaagaacccttgtagccatcagacccaggggctttgtcactggcaagttggaaagctgctctcttgatttctgaatcagtataagggatactaagagaattaaattcgggttcagagaggcgattggtgagtccagagaggacactgttaatgatctcttgctcaggattttgactggtgaaaagttgttcaaaatgatgttcaatcatccgcacaagggcttcagtttccgtgactagagatccgtcaggacatgaaagggatgtgattttgttttacgctcgtcttgaggaagcaaagtgatgaaaatatctcatatttttatctcccagtttaagccactgtatacgagatcgttgcttccaatattcctcctcatataaaagattatcaagctcgagttccagctgacgtccacgttgaagctgagaatctgtaggaaaagcacaattgtgcacctgcttaagattgtgttgaatttctctaattttggaggatatggaaggcccaagagactttttctaaaatagaaaagtgttgggttttatgccctaaataaaactcatttcaatataatcagatttacttattaataaagatcagaaataacatttttgttgcatggttcacatgatttatttcatgattatatgtctataatgtatgaattctttttaagttccagaacatatgagtttg

SEQ ID NO: 224503 - DNA, 2810 bp, Cannabis indica
tgcagttgaaagtttccccaactcagtcctcgatgttataacatcgtgaaaaagaaactagcacctacgtcaattgggaccattgcctttgcactcatatgaaagagagaaggggttttgctaattttttatcatggtgtggtgttgtatgaccataatatgccatatgcctttcctttcttcaagatttcctttgatggaatgtttgattatcttgttgactgccttggttttctcattactttggggttgtgcgactgtagaaaaagatttctgtatccccaagtcgttgcacaatgatcatatttttttacagtcaaactattttccattgtcagaaattagtttgtagggtatgccaaacctgcatattatggctcaaaatacaaactcgcggagtcttacagtagtgatggtggcaagtgcttctgcttcaacccacttggtaaaatattcaactatgacgacgacatacttgactcttcccttgccttttggcaggttgccaattaaatatatgcccgatactacaaatggccatgggctggtgatggagtttagattgcttgacgggctattgacatatgtagcaatgtgctgacacttgtcgcatctcttagcaaaaatgatggcatctacacgcagtgttggccaataatattcttgtcgcataatctttagggccaaggaatttataccagtgtgattaccgcacattctcccatgcacctcacggaggatgtaattgcattcgtcaccatcgatacactttaagagtggttgattaaaacttatgtggtatggttgttgtcatagataatgtatcgagatcctcaataccgtaatcttttggcttcaagcttgttgttaggaagtttactagtttttagatagttgacaatttgagtcatctcggtgacttgatcaacaacatctatttgcataacttcttctcgaccaatggtgggcttgtcgagtatgcgaacgagaattacatcgagtaatttagcttctcgagtcgaggccaattgggctaaagaatttgtatgggagttgtaagcacggggtattcgattaataatatttttcttaaatttggataacaactcccaagtataggcgagttatttggttaatttcccacctcgagctaggcattctccattaacttagaaaattacaatttgtgagtcgctaaatgcttcaagatatttgacctttatttcaagagcaagtttcaaacttgcaatcaaagcttcataattcggttcatttttaaaggcattgaaactgaaccttaaagacgcatgaactttgaatttttttaggcttattaacataattcctcctcctgacccttcactgttcgaggctccatcaacatatagagtccaacttgtgcctttcaaaacatctgggtcaatttgttctttagttatggtagccacctattcatggggaaattcaagaataaaacagcaagggcttggcctttaattgctgatcgtgacttgtaccatatacaaaattggttgggttcatgcaaccacttaacaaggtgtccagatgtatcaggcttgaccagtacttgtcgaagaggataattagttaatatctcaattgtatggacttagaattaaggtcgcaactttcgagaagctacgactaaggaaaaggccagttgttccatctgtggatagtgtgattttgcatccagtaagtgcttgcttacgtaataaatgggatgttgtctactttggtcttcacgaataagcattgagctaatcgcataatctgacactgtgaggtaaagtaagagtacttcttcaggcagcggcttagagagcattgggggtcaccccaggtgtgattttaaagccggaaaagcttcttcacacttatcagtccattgaaactttctatttccttttagaatttaaaagaattatttacatttatcagaggaacgtgaaacattatgatttagggaaacaaccttacttgtaagagtttgtacatccttaggcttagtaggagattgtatctctactaaggctttaatatttgtggggttggcttcaattcttcactggtttaccatgaagcccataaatttactagatcctacatcaaagacgcattttagagggttgagtcacatcttgtattgacataggatcttgaacatcgagttcaaatgagtgacatgatcagtcacatgttgagattttacgatcatatcgtcaacatatacttccattatttttccaagcaaatttgcgaagatcatgtaaactaacctttgatgcgtcgcgcctgcatttataagttctaaaaggcattactttataataatagaaacttcaatctgtgatgaaggaggtatgctcctgttccagcttgtacatcaggatctagttgtatcttgagtacgcgtccatgaagctaagaagcttatgacctatgattgcatcaacaagttggtcaatgctaggtaaggcaaagttgtctttcaaacaagccttatttaagtctataaaatggacacaaatatgccatgagcctttaggctttgtaactaagacaggattggctaactagttagggtagagcgactccttgatgaagccacatgcaagtaagcagtctacctcctctttgagcgcttgatacctcaaaaggttgattttgcgatactttcatcgtgctcatcgcacatcgggatttatgttcaaacaatgacacatgatctcaggcaaaattctaaccatatctaaatgcttccacatgaagatatttaagttttgttt

SEQ ID NO: 224504 - DNA, 1411 bp, Cannabis indica
gctcaagatacacttgggtccattttattaataaaaacttagttttcaaatagtcatttcccagtttttacagtttgttaagactcagttaaataaatctatgaaatgcattagatttgataatgccaaagagctgcaatttatcattttattcaaagatattgtcattatttattaccattcttgtgtccaaaggcctcaatagaattctattgtggaaagaaaacaccagcatctactcaatgtttctaatgcattgttgttttaatcttatattcaactatgttattagaatgaatgtgttgctactaccacttacctcataaacaaaatccctcacccaatcttaaacgcaaaactccttttgaaattttgcatgatatgtctcccaattatgaacacttaaaaggcttttggaagtttagcatatgtgtctacacttagctcatctagaataaaattttcaccaagatatgccccttgccttttccttggttatccaactggtataaaggtatataaatttccagaccttaatatcaatcgatttttctacagtagggatgctattttccatgaatatatttttccttttgtccaaactgaatctttacttgattcacatcatcatttttttgattctgttccctattctacacaaactattttaccctcatctaacgattctactaattcatctgttcccaataatgaaaaattacaacctactacacaagtgtatgtatctagtgagaaaactagacttcctagaactcgaaataagccatcttatctcactgattatcactttttttagctaacttatcttcaagtaattttttaggattctattttggttacaacacatccactatcaaatgccatttattattccagactatctcctacatatctttctctcatatttgccatctctgcactgcaagaacctgagctcttttatcaagatcatgggattccttattggaattgtgctatggatattgagattgtagcccttgaagcaaataatacttggacaattgtcagcctttctttacattaacttgtgattggttgtaagtgggtttataaaataaagttcaatactgatggtccagtagaaaggtttaaagcatgattggtggccaaatagtataaccaacaagaaggaatagattattttgaaacatttgcccttgttgaaaaatttatcactgttaaatttgttactcttgcagccattaaagaatagacattacatcaattagatgttaacaatatttttttgcatggtaacttacatgaagatatgcatataactatccctcaagagtatagtcttaagggagagttaattaccacccaatgccgtatgcaagttaaataagtcattatatggcttgaaaca

SEQ ID NO: 224505 - DNA, 1961 bp, Cannabis indica
tctcgttctaattcagcgtttcgacgttgcacctcttcgagacagtgtctcagagggcggatctccatttcataagttctttctcccacagattgggcacctccaaggttcagatcttcgtccctactcccgagattctgaccattcccacgctgagttctcctgaagcgcattgtccgcgtactaggaccaacgtaaggttgagttcttcgggaacgtgtggtccttcaaggctgcagattggtagatcttctagagcctatgggctcttttccagaacgatggttagtttcctcttgtggggtgttaatattctctggagaaggctttttctaagctttttcacagaggttctcaatgaaagcttcaaactgttaaagtagattttcgttaaccaaatttgagcctcacgattatgatttaacactataaatattaaagttatagaaaaataaaatatgaacaccagagtttttacgtggttttgcagttaaaattctgcatagtccacgagtcaatcttattaagatttctgagtatttttttagggcctcttgcgtaagagtttttttgtccgttttttgagattgttttccactatttataatttcatggtattatttaattacaaggatgaagaaaatgtaattacagtcattatcccttaaatcgtgggatctgattacatattatgaaatataaatgcggtgtataattttgaaaatcatttagctgtgattttcccgcttttactgggtcagaaatatcatgtattaaacacgtctttaattgttgaatttggagatgtctcgacagaaacttgattgtagtgatcccaatggcaagctggaatcatcttcttttcgaggtcaacttgatatgttttacatcgattgctggtatatagaaatcttctgacttgctagggttatgagcctccttcctgttagtttaatggaactatagggagcttcctcgtagcgagatggtcatctcacattcttgttcttcgagccgatttgacttttacacttagtttgcttattgcaagctagggtatgtgttacttttctttagtgcctcactattctcttttagcgatatatggtttctcgttatacactaagtaccatttcgtacattgaatcctcacctaagtccttacagtcagcgggctacaatatactctgatacttacgcaattaatgagttattccataaaaatatacggtaccgattcacattccctttacttgtacatgtgtcctctagccaaattttgggtacaacaacaatgaactagaaaacttctcaggctgaaaatacaaatttagagaagcaaacatttttctttttctaccactaacagtgaagataaaataagctttaagggctgttgtgtgcaacttttttaaaaaactatcttaaaaaaaattcactttttcgatctcataaaaattacacttaatcaagaaaatcttttttcatttactaacactagcagtgtagttaaaataaggttttaatgactgtcgtgtatgaatctatttcaaaacaaattttaaaagtacttaacattaataaatattaactatttttatatacaaactcctaatcattcgtttctacaaatccaacaacaaatatagatgacaaacaagttttaaatatactaattgacaacctagacttttcaagcaaatattgctcaaacaacctccatttatccaatctccaaaaaatccaaatccaaccaaatcatcaaacagggatttcttcaatgatattaaacaatgcaagtctttattgcaccaaaagtaccctaaattaaaataccaaatcacagatattccaaaaaaattaaaatgataaacccaaaacaaattacagtacaatgcacagtcagaatcagaacacatgcatgggtggagagagagaaaagagaagagagagagagagag

SEQ ID NO: 224506 - DNA, 2361 bp, Cannabis indica
gtttgcactgtacctcctgtagatcagtaattataaataataaaaagaggttaatcaataaaatctatctgtctatttaaaatcaaaattattatatatgtttcaatctgcgatataaaattgtgtaacaatatatgaaacagtatgatacaaatcaattgacttaatatgtaactaattaacccatattctgatataaaattatgatgttaaacgcaatcaattaatctaaattataaatattgaaggactgagccgagaaaagagataaagggtcgagcgagagagatatttgaggatatgcgttattctgagcagaggtttatatatgattaatagtaacgctcagaaaaaagtattctaatatcgacgtgggacaatattctctaattcctctcaagatggtggctatttttgctaggtgtatatcgaaagcccattaaggatatgactctgataccatgttgagaatcatgggattccatctcaaaaccaattgactatgactggagtagcccatgttcttatatatgattcaatattttcacatttaatccacatattctccaataggacccatccacctcactggtggccccagcttgtttgttgatgcagctgtaagaggattgctcagttttggggctgccattctttgcaatggtggtgattcttcgtatgacctttttacctcaaagattattatattggcccaaaatgaattgcaataatgaaactagtagagattagttacaagaggaactttcttattaaaataacatttccaaaagtcaagctgcccactgaggctcagagatcatattcgattgagtcaactcaaagaggagacagactttaaatctgaatttaacgaataaccaatttcaattcaaggaagaagaagatatagagtatccaacaatgaaggtatttgatatcctcaaagaaactctcacaatttttcacaaaaacaccaactttattttcttcaccattctaacatcactgcctctgttttgtttcttgatttattatgaaaccttcctccaaaaattcttgtctaaaagtactgaaaatctcccattaccaaaaaagacaggtctttttattccttcacttggtaacccatggcttttaccaattgatatgtttagaaatataaacaagtaccattttaatgagctttttcaaatgtgttttctctatttggtaccccttcatctcctagagttcattaacttaattttcactgttgatttgtcttcaaaaatttacagagaagaaaaagctttgacattttttgatatgtttcatctaaggatcgaaaaagtcagattaagagccacttttgttacatttctctatgttgtgttcttatccacatgtactcttctcgggtttatttggttactagtaacctattctgctgtttttaggctcttcttcacacctgaaagaagtggaattgttttgaataattttgaaagggtatcttcattgggatttaatcttttccatcatctaatttatgggtcaaatctattattcttggtgataatctacttgccttggtgtgctatatggaacttgggtcttgtgatttcaatcctggaagggatttgtgggatcaaagctttaggctcagcagcttatcttagcctaaggaatactcagaatggagttggtttggtgcttattttcactatttgggaattgggtttgagggcactatgcctatattttggctgctataaaacatggtttgggattattggtttgatcagtttgttatgcttgggaaatgcagttaaatgggcctcttttgtggtgtattttcaagattgcatatggcgagtttctaagaagaaaactggtgaggaacaaggttaaagcattgtttgtctaaagtggcaattgaattgtaacaatagattaagaattatttttgttttgatgagaattaaagatttatttaacgtaaagtggataatgtactttttcatttttatatttttaaatagttttttttttttaattatttttacgaaaattcatgtaacaactcatataacaattgaactaatgtagtaatataaatcgcaatttaaattcatatagtaatttatataataattattggagcaacccaaactgtagaaataaaaaaaataaaataaaaataagtgcatatgctatacataatgcaacttgttttgataaagtttgaattttttgatgagaattaaagatttgtatggtaaaatgtatataatccagtccaattctattttttagtgcataatgttaaataaattaacaattaacccaagatctatttgtatataacatagaacacaatag

SEQ ID NO: 224507 - DNA, 1585 bp, Cannabis indica
attttaattagtaatcccgattaggagattagggttcataatcagttttgggtagcgtgcctaattatttagggcgttacagcaagagtgagataataggggtaattctacaaatcgaaatactagcaaaatccttagctttctctctaacacgaatggctgctgaaagaccctcaagcaccagcaaaaataagtagctaaggggacaaggagtcaccttgcctaatactcctagtagaaataaatttgttaaaaaaacacccgttaatgagaaatttaaaggaaatcaagaaaatactcttaataataatggaaacaaaactagaagggaaacttaaatcatagagaatagctttaatgaagctccactctacccttccaaaagccttttccatgtcaagcttcaaggcaggccaaccaattgtccccttcttcctatgatagagaacattaacaacttcattagtaataaaaatattatataaaaagaatcacagtccaaaaggaaagcactttgattttgagcaattagagtgttcaggagaagcttaatcatattggacaaaaccttggcaagtacattataaagagtagaacacaaactaataggcctaaagtcactaattttagaggcattctttttcttaggaacaagaacaataacaatatcattaattacaaagacctcagactcattattaaagacatccaagatagccttataaaactcaggacccaaatttgaccaatttttttttgataaaaatgagcatttagaccatttatctcggggccttatcactagaaaaatgaaataaaatctcgttcaccttagcttcctcaaaaggggctgcaagcaaagaaacctaagagggataaagtctataagagattccagtcaaaatagcagaaatggcatcccaatcagctcattgagatgtaaaaagattagtataagagctaacaaaagtgtcaacaataactctagtatcactaacaaggtgtcatcatcaagagaaatggacctgatgaagttggttttcatcctagcagagacttcgtgatgaaagcacttagtgttcttatcaccaaccttaagctagttagtcctagaatgttgcttccaataaatcatctttgtacaaagctagagataactttgttaattctaagttctcttaatatatttattttacttataaaattaaacaaaaaccatttcataataaaatttatatttttttaataaaaaaaattgaattattttcaaagttgttttggtagaaaaaagatataaattttcaaacctgtcctattattgttgctttgttataaaatcaacacaaattaacaatattgtacatatgatatataattggcttttattttaggtaaaaagtttgttaagcactttttcttttctcatttattttttagttaaacccttataaaattacgaagaaatgagaattacttcatatactattttttaatgctctagtaataggctactctattttgttacttgaatttctgtaaaaaaaaaaaaaaaaaaaaaaaaaaaaaaaaaaaaacttaattaagt

SEQ ID NO: 224508 - DNA, 1337 bp, Cannabis indica
ggacttgaaaattaccaccgatcatgatacgttatacaagaaagtggttgagttggtactaattgctgtagaggtagaacaacatgtgattaaagagcaggctgctaaggatgtcgtcacggcttcaaaccctagtgtgggtggtagtgtcagtaaggggactgacagtggtaacccggaccataagcggaaggctgaagcttccagaataccaggaggtgatagaaagttttgtggaaatagaggtggccatcagggtcgtgtgttaacattaagaacttacctggagtgtcctaaatgcaagaagcaccatcacggtgagtgccgagctaaaacatattcctagtactgtatggtgagccattttattagagactgtccgtaatccaagaaataagaaccaaagaagaacaacaatcaaaacccagggcgtttgtttactatgactcaagttgacgctgatgctagtccattagtggtgacaagtcagttgtctataaacggttgttcttattcagtattatttgattttggagctactcattcttatgtatcaagtagagtaattaagagttttcataaactgtttaatgtgtatgctttgggggttttgtaccctgttaccctctagagacctaattgtatctactcggtggattaggtctttgtcttttttggattgatggttatgaattaacttccaacctgatagagttacaattatctaattttgatataattgtaggaatggatttcttgtccaagtaaggggcaacgattgactgtaagaagaagatggtagtgtttgaacctgatagtgctaatctaacggtgtttgttggtaaggtacacggatagcgtatacctagaataacaatcttaagagctagagatctgatgtgcagaggttgcctaggattcctagtaactacagtggatactagccaacctatgtcaactagacctgaaaatacgtggttggtgtgtaaatttctagatgtatttctaaaggatttacctgaattaccaccttccagagagattaaattcgttatagagttagttccaggagcagaaccagtttcaaaagcaccttatcgaatggccccagtagaattgaaagagttaaagatcaaacttcaagaattactcaacttgggatttatcaggctgagttattctccttggggtgctccagtgttatttgtgaaaaataaagatgcgtcgcttcaaatgtgcatcgattattgggaactgaataatctcactatcaagaataaatattctctacccgaattgatgacttgtctgactagttgaagggtaagacagtcttt

SEQ ID NO: 224509 - DNA, 2767 bp, Cannabis indica
tgagacccacatctagaaggtcaatttaaatttctcctttcaatcatcggggttataacccctacctcattaaatacagagtggagacattcaagaatctccccaagtgttatcattattaataactagtactctatctatctcattagtatacaactcaaccactagagtaaagctgatttgttcataggttatatgctcctccatttcccaagtgagccctacctttcccaagatgtctatggccattccatgtacaagattcaccatatgatcagaccttaaaattattttccatcaccattgtaccattactagcgatctagataatcttctttatcttaacaacatcaatgttctcgtcatccttttcttataaatcattaactgaattattccttaattaacatggttcaactcacgttcttcaggatctatcctttactacctaaacatatcgcttgttatatgaaataacacaactcacttaatcataatctctagtccacctcaaatcccagatggacacaattatacttatatattgttccacctttaagggttctgaaccacctctagggcaagaagattccattctctaaaccacttagactaccacccttaacagtttcttatatcccacaacccacatgataaattaaatacttatcttacttttaaactagttcactgctttatcgaccctttaggctatctattttgtcggctagtttgctgcataacaacacacatcacttcgtgatcatagtagcaataaattactatttctccccaatcattattaaactatcgaatttctcattaaaccgtacaaatttccttattaagttccatactcaatactttactaattgtcatttcacactactcatatttctcaaataacaacaatactaataggcattcctttacgtatcaatcagtcatatagctctactagactatctcaattaatacatagtcataacatactacaattaacctaactcaggtttaatctatatatactgctaacgacatcagataataattaatcatataacaggtaaataatacttactatccatgagtcgaacttgtcttcatcgtaaatgtacatatctagctagtctttaggacctttaaaactgtggctgctctaataccatgttgtaacgccttaatccttaggggcaccacaagtatacatttataaactactttataataataaactagtagtttaaacaaaatatgatttaataaaaaaatttaccaactaatttaaattattaaattatggcgtatctttttactgttggggattccttatttaaaatattacaagacatgcgtttataatattattataaaatacatttaaaagtttagaacattaaaaatgtagttcctaataactcagcaccacttgccaaataagctgatatgtacatttgttggaaaagattcctgattcatggttgtccaaacatctctacctattacctacacaacatagcacccatgagtcacaaggactcggcaaaaaaagaaataataacaatcatataatttattattcaaatatcatcatttatactcagacaatcagaatcaaacgattacacattactcataagatgaaatccaaatcactactaatatctgttcaaataaacgtcaatataaagatattcagtaatataaaatcattgtgctaataatagaagtcacctttatttattaataaagtatttttaatcaatattcatacattactctcatgcataaatccaagtcaatacaaacattcattcaaaattaacattactataaacatttaatgatataccagtactcatttaataatataaattgtatccattacctcataaagtaaccatcttcattatatcacattgtctaatcaagcaagtcgatgctatattgcctaatcaggaaagtatgtgccataacttgatactcacatatactgcattgcctaattaggcaagctcgtgccataacctggcacccatatattgtatcacctaatcaggtgaacccatgttatgagctgacatccatataccgtatcacctaatcaggaaagcttgtgccataacttggcactcacatacatcgcgtctctttattaggtgagcccatgccataacctttcatacattgtattgcctaatcaggaaagcatgtaacataacctggcactcacatacatcacgttacttaatcatgtgagcccatgccataatctttcatccatatatcacatcagctaagcaggcaagcccatatattgcattgcctaatcaggcaagcttgtgccataacttggcactcacatacattgtatcacctaatcaagtgagtccataccataacctatcatccaaatatcgcatcacgtaattaggcgagtccatatatcacattccctaatcaggcaagcccatatatcgcattgccattgcctaatcagacaattgacaatcaagaaacctcccatgccatgtagtacattatacttttcttacctttaatccagattcatgcatgttgaccaactcaagtggagaaacattcctgatgatctcgaccctatgtcacaacaatagtaaaccaataagtgtctatcccaaaatactacttaatatttacaaaaatcagtctagggttttttattcaaccccacggtataaatacactaaaaaaaaactaaaattttggctctaaaacatacaccata

SEQ ID NO: 224510 - DNA, 2574 bp, Cannabis indica
gtatataaaatttcatataatttaatataataattcttaaattatattgctaactataaaataacaagtttagaaagtaacaataatcgtacttaattaaacatataacaaattatcctcatatgtatatattattgtaaactattttattttacaattaattaaagtactggcgtagctttatatatatatatatgttttacgaaaagacttgagatgtgtgaagacaatagtgatgagtgagtaaatttcgacctcaaaaaacccctaaaaaaatttcactatcaaaactatagtacatgctcgaagccaagactttctttctctagttctagtccacacacatatatatatacatatttatattatatatatatatgtagctagggcaatcacagtactcattaatgacagaaaataaagacattggaataaggtgaaagacttggctggctagggattagggtatatacgtaccactttattatactcaatactatagtacttttctttataataataataataataataataagcaatattaattttcagggtcttctttaagcataaccaaagtaatgttttggaacccaaatatgatttttttttttcttatataatatataactatcaacatttatttgtaataattttctaaatttgaaaacagatttatatttagacataaatacatgatagggagattctttggcattatttttgctcctaccgatatgcatctctaatgcctctaaagaaattatatatatatatatttatatatactaggttgaagttacgtgctatgcacgtatattatattttagttatttttttcaaatcatatattataatttttaattattataacatacaataatattgataatttaattaattaaataattttattttaaaacaaataaatatttaatataaagtaaataaaaagaacatattgatatattaaaataaaaacaacgtgtagagttttagaaataagctcttgttgtgatattttgttagtataataaaataattatcaataaataatagtaaatagcctatccagtgagtgttcatactaagatatttttcgagtaaatactattttagatcttgacttgcaaaagttaccgactaaactatctattttgtcaaataataaattagcttctgtattctccaaactatctcatagtttattgatacttgattagagaaaaaattcattcattaattagttgcctaaaatctaatgtcacaaaaagaaaagaaaaaattcaataactttagtacaaggtcatgaacaaatatttacttcccacttgatgcttcttataatgcattgagctgccaagtaactgcaagaaaaattacaattattaagcagaaggcatttaattacagcttaatttttgaagattaaagctaatacaaataaccttgcttactccataagtttaataacacatgaatttactgccaaatgataatgaggaatagtttgctttgcaaataatttatgtgaagttgtgacttattgaaagtatatcagagtataacttcagaaatgtaaacaatagaatgtggtccatatatggtagataatataacagaatccaatcatcttagaataaaaaatagtaagattacttgcagcatagttatgagtttagaaactacctttcctatttgagagtgagggcattgtaattgtaatatacatctgcaggagttgcatgccagccttggcaggtgcctctttgctgcaaggtgctacatcattggagaaaattattatattaaaatctggcattgatctaaatttactattcatcattttagaaaattgaagagagaaacaatacacatgctatacaattaagagaaaaaacatataagtattaaccaaattaagttcaataaaattaatactgattttcttaaactaacatttagaattgaaaagcaaattgtatcattgaattttccatcaaggtactaaattttaaaccataaatatcaccattatgtcaaattaaacatgaaatttaaaatacatatacacatgtagagaaagatagttacttggtggcagaggcagactcttcttcaagttgatttctcatgtgtgcttaacattttacttgaagattgaggtggactgctttacatcaaacttgagaagaagaaagataatgctaagaccaatcagatgagaataaaattattataagccactgaatccaagtcatttttttttcaatttcaacaatataaacaacgctaatcttagtttcaagagttacttgagcaaatttatatagttacaaatactattgtaggtatatacacatctgcaagtttaatactcaacaacattaaaatgaaatgaaagcatgatctttcataattagatatgatacaacaacattccataatcataacccaatataacaattaaaattattcattcattcataattctaaaatataataacaatatacaaaccataccaaggtagaagaggatggtagttactttatcttcaccttgtaattaagaaa

SEQ ID NO: 224511 - DNA, 2324 bp, Cannabis indica
ggattgttctaggtttatcttacacttttgtccaatcaacaatataatattcagattatttatattaccttttaacatgtctattatataaaacattgcataaattaaaaattaggggttttttttcttaatttatatttggttgttttgttttcggtggtttgttggtcttgtttttttttttggtataagtgtggcttaatcgtagttgtattttattattacaattttatttttattattgtggttaattttgtttttttgagatgattttgagtgtttttatcttgtatgtatgatataatttttaagtgttttaattttatttgtgtgacataattttattttgttttattttgttattggtttttctttattctttgatgactcgctatcaaatgcctttttttttttttttgaaaggtaaaatcaaatctttattaaccttcgaaatcagtcaccaaaataggtaacaaatcagttggaatattttccatactgaaagtacaatcaggatgtaatagtgacgctctagcaaactcatgagcgacactattagctgaccgcttaacaaaacaaaaataaacattattgagattagccaacatggctttacactcctgaatcacacaaccaaattgagaagacagaatagtcgagttcctcagggcttgaaccaccaataaacaatccgtctcaatccaaattgagttgtatgtttgatctttgagccaacttagagcttcccgaaagctcagagcttcagcaatagtaggagcaatattaccgatatgtagtttagtacggccctcgataagcataccattgtggtcacgcaccaccaaagcacaaccaaaccgattctgtctttcaaaaatagctgcatccacattgatcttgatactattttcctgaggttttacccaacactccattccatcatagtcttgaagagtagaccattccatcaaattgctattagtagttagaaataataaaggtgttgttatagtagtgcagttacatacttggcataataattgagtgctcaaactataaaattgaatgaacatgttacagtaatttctactattgtatcttttaagccgtaaataaaactggaatacaggtgttcttaaagttaattgtgatgctacaaatttttttatctaatcttatctatagttttttttgtcaaacggtatttgaaaattagacaactgattatttgactcttattctaattctaatccgcttcttttttaattctaattataatcgacacatttcaattggattataagttattattttttatgaatagtattcataaaaatataaaattgtaaaatttattagagaaaaaaaatataatattcagatataaaaatgttaataataattataatatttgggtgacttgatttggttaccccacgagattgcatagggaaaatatacaaattaaaataaattgttttctcttatattaatgcaattttaaaacttaaaacaaattggactgaggcatttacaagtccgtgggtttatactaagcccatggctatttaaaatgatttgttgggttgattagttttaacttatataatataaacaagtgaaaatatgagaaagaaagaagaaaaaatagatggtgttgatgatgatgttattacttcatatatgatatcttaacacttatatcgaataggcaatgatgaaaattggtgtcataactcataattaccttatagtaatttcaaagatgaggtgtttttggtgtgttcattaggtggatatacaaggttgtgatgagaataaaaattgtgtttcaattaattattagtttgtggaataaatgttgagaaggacaatagagaggctattcttaatgtgaaatggcaatttcgtaaattcactcagattcagaagaagaatatagtaaactaagttggcatgaatgattactggtgagtggtgatgcatttgctcttaatggaatttattttcatacaataaaatagaacgagttgcttgaataaaattgaattgagttaagattttatctggatggactaattcaagctttgtagtttgtagggcggtacattcttacttgaaaacccacccatccaagaaacccactcgacttgaaactcgaaaaatgaaagaaaattagtttaaaaaattatacagggtttaggaattacacctagttatccactaagtcgggattgggctctgaaattgtgacacccgaaaactcggatcaaaccctgacctacccgaaaaatctattttttttttatatatatacaactaga

SEQ ID NO: 224512 - DNA, 3100 bp, Cannabis indica
acatttttgcgtttcagatttgcataactcttttgcctactctgagagacaagcattctggctttaatcttctctattgcttcattagtccgttgtacaaattccggacctaagtattacttctctcccatttcatcacagtgaatggaagatctacactttctgccatataacaattcatagggagccatccctattgtactctgaactgttattatatgagaactctattagtggtagatacttactccaggagctctcaaaatccattacacaagctcgtaacatatcttccagaatctaaattgtcctttcggactgtccatcagtctgaggatggaaagtcgtactgaatttcagtttggtacccatagcttgctgaagactctgccagaacatagaagtaaacttcgaatccctatctgatatgatagactttggaacaccatgtaatcttactatctctttgatgcacaaatcttcatattgatccactgtaaaagttgtttttatcagtaaaaaatgtgcagacatcgtgaatcgatctaccacaacccaaaattgaaacccaaattgaatcgtacatactcgtggttctaggtaacccaaccacaaagtccatggtgatattctcccacttccactcaacaagtgcaaaaggctgcaacaaacctgccagtctctaatgtttagccttaatttgctgacaagttaggcactgagatacaaattctaccacattcttgttcatcccgctccactagaagtagggtttaagatcttggtacattttagtgatgccaagatgcaaggagtatggagtggtattagcctcttcaagaatttcatttctaagttcgggactacttggaatacaaaccctggtcttaaacaacaacattccactatctgacactgtaaaatctctggcttgaccatcaaaaacctcttctctgatcttcactaatcctggatcagttaattgagtagctttaatttgttctaacagatcagattgtagcgtcaagttatgaagtttagctacaacaaactcgatgcttgatctgaccatgtcctctgctaattgaggtgaaatccgaatcatactaattacctgcctgggaccattcctacttagggcatcagccactacaatggccttcccaagatggtaaaggattttagagtcataatccttaaccaactctaatcaacgcctctgtctcatatttaaatctttttgagtaaagaaatatttgaggctcttatggttagtataaatttcacatttctctccgtagagataatgccgccaagtcttcaaagcaaacactaccactgcaagttctagatcatgagtcgggtatcattgttcatattctttcaactgacgagaggcataggtgataacccgatcggcctgcattaatacacacccaagaccctgtctggatgcatcacaataaactacaaacttttctttatcagaaggtagggctaaccatagagttgtgattaacctctgctttagctcctgaaagcttgcttcacacttgtccattaacacaaataactgattctttttcgtaagctcgataaagggcgttgaaatattagaaatcccctctacaaactgacagtaatagccagacccaagaaacttttaacctctgtaactattttcactctcggccaatccctgacggattcaatcttcgccagatccactttaattccatcttcactgacaatgtgtctaagaaaggacacctgagatagccaaaactcacacttcttgaatttggcatacaacttacgttcttgaagacgatgtagaaccatctgaagatgtttctcatgctcctattctgaatgagagtacacaaggatgtcatcgataaatacaataacacaaatgtgaggaaaccaggttcataaaagctgcgggagcattggttagtccaaaagacataagcagaaattcgtaatgcccatacctagtatggaaagttgtctttagaatgccctcctctcgaattctcaactgacgatagcctgatcataggtcaaacttagaaaagaccgtcttcccctaaagctaatcaaaaagatcatcgatcctaggtaagggatacttgttcttgattgtcaatttattcaattctcggtagtccatacacatacgcaaagatccatctttcttcttgaaaaatagtacaggagctcccaagggtgacatactaggccgtaaaaaccctgggtcaagtaacccctgaagctgaatttttagttctttaagttctgctagagccattctggaaggggccttagaaactggttctgctccaggtgccaaatcaataacaaaatcaatttctctctgaggtggtaaacccagaagtttatcaggaaaaacatctaaaattcccaaaccaccttgatgtcttcccaaaccctagacatccatcccgtaacaattccctaggtgccagaataagagcccaatgcccaggttgacattttgtcaacctgggccatttctgaggattgtttttgagaagtattccaggcatattctcaatttttcaacaaagattaagattcaactatttctggggtccaaacataacttccaggtgacctgaaactagaccgagcatccaggttgacacctggcagtgggcccaacgcccaggttgacatattataaacctgagctttctctaatcagctttctaaaaaagtattctgggcattttttccaacattagaaataatgagatacaagcaaacatgcggagaaaattacaatttggagagcctggaaacagagcccaacacccagattaacctggtgttgggcttaatgcccaagtcgacaatcaatctggtgcgctggttttgatcactcaaatgccaattctgtaccgagaattctctctgatatggtcaaaaacggggtcaaagaccttgttctcaagttctagaatcttggaagtatcaaaacagcatctgaaaagctctgaaataagcacccaatgcccaagttgacatatggcctaatgcattgtgttctacttatccgattttgattccgtct

SEQ ID NO: 224513 - DNA, 1888 bp, Cannabis indica
taaatgaaaactaagatttaaaaaaataatagaacaataactaatcactatatatttggtataattcatatcataagtaatcaaatgggtttttaaattttggaaatagcaaaaaaaaaaaaaaaaaaatatgctttccatattttaaaatgtttacattgacgagtatatcacaatagtattttgttaggctcaacatagtaacgataaggacaaaattatttttaaacttgtagagaagggggaaaaagaaaaaagaaaaatagaataagaagggaatcaaagatgaaaagagaaggaaaagacaaaaagaagataggagaatgtgggtttcattatcttaacaagtacatatttagtttacatatagctaatgcagattttaatattttagaaaattaattatagatttaaattattaaatttaactaaaaaattaaaaattataatataaatctatatacattacttatatttgggatagaattagaaaaatgctaaaaagtatagtagtatttaatacaatcgaaggagctttatcgctattgatagaattaaaaatcaaatttacaaaaatattagagaagtactaaaaagtatattagtggtgtttagtattattcaatgaattaagtatcattttttttataatattggagaaatattaagtattcggtcttatattacaataattttgaccattttgaatactagccaattattgagtgtcacatgataagttgatgggcaccttaccaaatagcaatatatatagaaagataatattttatatgtctaaaattatatataaagaagaaattaaaaaaaaaacattgaaataattaagaaaagacaaaaaaaaaaaaagaagaagaaagcataagatgacaagaaatcatcaaccaccttatgcacacacacatatatatatttatatatattaccttatgcacaaatatatatattagatacctatatagggatatgattttgtcctgttattgtactttcacggattataatctgtgatgtacggcagccgtcagatgagggaattatttgatctgacggctgagattgatctaggggtaattagagctaaaaagtagaaacgtaccctgacactcatttaatgtaccctgagacccatctaatgtaccacagaatatattccgtaaaagtacatcacgggacaaaatcatatccctaaatatatattgatatattttttttttaaaattaaaaccatgatagaacttttattgttaattggcctcttaaagttgatattcttaggtgtttaaaatattcttacatataccaatatacctagttagttatatttagaaaatttttaaaaagtattagtagtatttaatacaatgaagaatatttatcgttattgatacaattaaatatcagatttataaaaatattagagaagtactaaaaagtattagtggtgtctagtattacccaaggagtcatatggctattgatacaattaaatataattttttagatgatattagagaaatattaaagaatattaatcgtttttagtacgggtattattaattgttcaattaactatcacgtctcctataatatattataataatttttatgtattatatctgatcattctgaatactaaccattgattaatatattataagtgccatatataggattatgagcatcttaccaaacaatgctctatctacatagatagtattttatatgtctaaaattatatataaagaagaaattaaagaaaaaacattaaaataattaagaaaagaaaaaaaaaaaagcataaaatgacaagaaatcatcgaccactttatgcacaaatatatattttaccttatgcacaaatatatat

SEQ ID NO: 224514 - DNA, 1564 bp, Cannabis indica
gaagacaaagaagatgcacgtttttttttaatttttaatttgatacttggaagtggcccgaattgacagattgtcaatctgggcactagggtgcccgagcactgggtgtcagggtgctttaaaatgaaaaatcttcgaatctaattctgatgcctcaaatatgttcatggtatgtctaattcatgtctcaatgcaaggtttgacccatttgcactaagatagtcccagaaactggaaccctagttgggttgtcaaccttggcattaggtgaagccttaggtgcctgggttgatttttgaggtactaatttgtgtgttttcatctcccgaggcctagacttggatgcttcatgtcttcatagtatataatactttaaaagatagtgagttagaaataacttggtggtatacaaacacctaatctggagttcccaaagtcaacctgggcgcaggactagggacccctcccatgtcgacttactatgattcgggactatccaactttgagatgttttctttcttgccacgtgtcaaatattgatgtctacatcatcatgactacttttggtgtaaacatgtgaggttgatttaatgacgtgagctaagcccgtttctctcaaaactaccaggtgggcatcaattttggaaatttcggataattgtttctattcttaaagaattcctactaggagtatgacttcattttcctattccctcttgaatagtagaattcaaaattttatgtataaaaggataacagaaaagatgatcatcttttcttactattaatcttttccttttcaacttaaaatttgaataactccttgagtgatttcctttgatttgagatacttctaaaatgtgtcaacataagaatatcaacacttactctaatctttggttgttgtctttgcattttctctcgtgtcgcactgtgtgtttatgtagatatagatgtagtctttgtcttctcttaggttgtagccttgaagttctttagcattccctcgactgtgttttagtgaaggtggtcttattaatctcctctatttgataatagaggaggcctttgtcaattccttagatttacagcgtaggaggccttcatcatccccttagctttacatcgaaggaggccttaaacatctccttagatttacatcagaggaggccttcatcatctccttagctttaaagcggaggagatcttcgtcatctcctcatctttacagcagatgaggtcttctcggtgactatcaacaatgtgtcaaagtaatcgttggtcattctttagtcaattgaggatgtgatcaactcccaaattaatatactcaagatgggggtgatgtccatctcgggtgcaccatagagtgattgtaggtgcggtctctattttatccttggtcttaaccttagaggtattcatcatcccttctactgtattcacaatggaagaggccttcttcgtccccttggctgtctcgatagtagaggaggtcttctacttcctcttagctattagcatagtagaggaggtcttcctcatcccctcaattgttagcaca

SEQ ID NO: 224515 - DNA, 3466 bp, Cannabis indica
tcaatagaccattataactcatagagttgtcggttctgttttcctaggcttaggtcttttatttctttacaataaaaggaagcaaataaaaatatctcaagactctaacaactttcagctattcaaggaaaaaatatctcaacagaatatagttatttcttagttcaaacaacacagccagcaacaacaaaacaatataaatatgaggttcaacctcctcattggaagagaaccattttcggccagcagagaaataggacagcaacctttgttttccttgtgtaacccacctcataaacaagagagaaaaatagagagagttagtgagagatattgtgaagaaaactaagagaaataaagtgaagaggaagagattacctgctgggttttgtagcatggaatttccatgaacttgtaccggttttgacaatcatagtgaagaatcaagcgtctttgagggaagcttgacggagatgtactcttgatttaaaggggaactccgaaatcaaattttgttgtgttcttctttatttttttgtagtgtatttcgggttttctcttctataactaacaaagatcattttagatctttgttgttactagtgtttcgggtttctatctgtgttgcagatttaaaaataaagaggagcagtaggttcggttgggttgtggatctgcaacaagagagaagaaggaggagaagaggctcggctgagttgcaacaagaagcttgaaggaaagggtgtctcggctggggttgttgctttgcagcaagaagaaaaggaagaaaagaagaaacttaggctgctgcgtttttttcaaagctggaaggaagcggtgttgctgttcaaagaagagagaagaaggaagaagttgaagggccggttgtgaaaatgtggtgctagggttttctaggaaaaagaaaagattgcttttatattaacataaatacaatagggtttttgaaaagataaaatctgatattcaaaggggcatattcggttttgggaaagcatattcccttgtgatccgcaccaagggagaaagtcggttttgcccctagaatgtgactgttggggtgttgggtgtaggggcattttcggaatgccgtgatttcctacattttcaaaatagtttataaagaacaatcttttgttggtgttcaaacaatgcttgatttgttacaaagatttgatatgaaaaagatttttatgtatctctagagatccaaaaccgcaggctacgatcaaaacgataaacccagttcaacactcctaaaattttaatttttaatttgttcactttttataatttataaaaatatacatgaatattatcttgaatatcctatgtgcttcaccccaccataatacctgggccttaatattttaacctatgactttttaaaattttggaatgcatcagtatgtctgtttttggggtgtctattgtagaagctcccatacttatatatggagatgaatcttctttctcttttaaatttatcaaaagagaccattgatggctgtgaatattttgtccattcaatttaagaggggtggtttgacaagtttgatttgtgatgaggagggattgtcccctgtcaattttatttatttatctaattttcatggagtgtggttcttttcaatttctatatctatatctataaaatcttaattctaaatgtattactacaaaatagatttttggtatcagtttgagggacgacttttttaaaagtctacactaaaaattacttcaactctttagtctcagtttataactgacaattttaagtgtcagatagtaaaccaatactaaaagtataaccgagagaaaaaaaaataaaatatatatatatacaaagtataggtgtccctgttcataatcgagactaaatgatccaacaaatagacagcacctcttaaatgtcagttattaaccgagaaaaattaggatatatagaaatcctgaaagcattttttcttcctagaaaaaaaaaatggaaatcattttctcttagacccagctcgcgcgatctctctttctttcgcccaaaaactctcgaaacatctctttctcttcgacccaactccacgccagacggagctgctccagccacaccaagtctcgaaggccctccccacgcaaacccacccgcaccagaatcccaaccctaaaactcctttccactcgcgagctctcattctctctctcgtctttctctcttctctgtcgagcagccacgaccattctcggtcatccccatctcgctctgcctcctctcccgactccgtccgtatcttttcataaagtcaggtttgttttcaagtattatttgttgtttatttaatttctgtgttcataataaaatgtattccactacaactttgattctgcgttgtctactgatatatatatatatgtatcatatattctcaagttcctattttttatattttctatactttgtaagttattgctcttattaacttatttctataattattttttcaagaagttacatatcaaactcatttagttacttagcatgagatttggttggaaatgactctgccgtgccgtttatatatgccaccattcaattggtttcaattacaatctgagtaactcagtggttattttcgcagtagttcttactcctcctcgattacaatactattatcttgctagttagaaataaaattttggttggaaatgtaaagtcaatgtttttagaagtggtttatgaatgaaaagattagtaatttgtgcgctagtttttattatttgacagatccttagcagtggaacttatatgtttgctttcaagattatgcatgattttgattttcatgtctatagaatgtaaaaatgtgtcatttagtttacatgtgtattagaacactcatttacattacttttttatattgttaaatattgtgatagtccaataagtaaattaaaaaagtgagataatttaaattttttcaattaaagtacgaaaaaatacacatgtttttctttctatttttctctctgtttatacatgtacaaataatgtcttcacattttagtctccactctccactcttatcatttccactacagctcgtcggccaatatttcctcctcgaggatgttcttttgacgatcactgtcattttaattttgtaaaagtttgagcactaaaataatggagggaagggaactaaatttggagggaagaaattaaaaccaaagtcattctatctctctactaagcggattctccacaatagtactcctcactcactaactcacccttcctccaattttgctgtaactctgcttgccatccaccatagctttctccccatatcaaggttattattattattgttattggaaaatagtttgaagttgtgtgaatgtgtgagtttaggtctgaatctagattttgaaattgttggtttgagttaag

SEQ ID NO: 224516 - DNA, 2028 bp, Cannabis indica
ctgctatagaaaggaatcaagtgctagatatttgaacagaaggagtccttatattttgctgcacccaatgtaaggtttttttaaactttatatgtgtttatttcattgttttagaattcatattagggtgttaatgaaacatacttgttagtaaatctagatcctggtaaaatatatccaacaagttcctccaatgtgtataaagatttcatcaagttttaagctagttttagcttagggttttaggatttcgagactatgttgttaaattaagtatagtttgtttgttattaggcttaatttaaggttgattagagtttagtttgtttgagttaggtggctgtggtgttggaattgaagaattgagttttaaaactcaatttcttggttctagcatggtgatttgtgcaatttgttaaatttttgtggtttgatgtgctggatatgtatatatttgatattgaactgtcctagaagagtacggtaggtttggtggagcttggattgggtttcgaggtaacaaactagattcccccagggctgcccagaaaaccgttcgaccggttttacaggcaactggcaaaccggtcaaccgatttgctagcaggggaaatctcaagttttctccttgaatctggttttggcttggggtgttttctggagtttaagtcagggcattttttagtgatatttgagttagattgaaccagtgggaattaggtttgtctgattacgagaattagggcttgttcccaaaaatttgattaaggtatttaccgaattttgttatcgcgacataggacccgagctttgtttccactcaggtggcccgcacacctgatactggattgaggtaagaaaagtgttatgcaccgctaaacggttaaatgaaagacggttatgatagttatagtctcaattatgatcgagatcttgatatgtgtttgtcgtgccttgattatgatcgagggaacagatatggtcattaccattatgagtaattactcgttgaaaccgcaaatatgttcactttatcaggcaacgatagtgatatacatagctcgtggataacgagtggtaagggtgctttatgaagtactgagattatgtgattatggtgatgtgtaattataagcatgttaaaatgtaatgtattctgaatgcatatattttgtcgcggtatgattacctaaatgtacatttctttgaattttttcgcttttcttgctgagtctctatgactcacgagtgcttcatggtgcacgtaaaggaatgggcaaagctgaacaaccatgactttgaggtctctacaacagtgtacatatcagtcgcggtgccatgactccagtagacatgatccacccttttgtttgtatttgaaagtataacctaatattgtaatattactttaggaacattatgtacatgggatccccatacctaaccgtggttttcttttattaagttatattttattttaattaaaaatttaaattaaaccgcactttttttgagttaatattaggttaaaacaaatttgtaaaagcacacatgtggtgtccctgtggaacgggacgttacaacatggtatcagactaaccaaggtttaaagatcttgaagactggcttgatatgtacattgactgcgaagactcattcgactcatggttcagtaagttttaattgctagattatttgttaattacctgattgcctgcttatttggaatatgttagttgttagaaaagtatagtaaagattgatgtgtaagtgaatacatggaaatacttattagtattttcatgatttgggatatgttaaacaatgggattatgatctcaggtgtatagatcatccacccgaggcgatctggaaggggtaactgcgagcttgctgggctcagggttggcagtgacagcgagaatcctccaccaccaccaaattgggaagggttatatgtcacgatgcaagagaccatccagcaacaaggcaatcaaatacaagagctgagggagcagcgagcttagc

SEQ ID NO: 224517 - DNA, 1354 bp, Cannabis indica
gtgcaacaatggtgtagaaactgttaatcacttattttttgagtgcagtaaaacaaagcaatgtctaatggaagtcgcacaatggtttggctggggagggcaggctacgacagagctaaaccaagtctccaagtggattaatagaaccaaaaccagcaagttttcaagggaagtgatggctgcttgtttagccagccttgtttaccatgtgtggaaaatgaggaatgggctaatttggcaaggaaaggagcctatttgggtacatctaactgccaaaatcaaagagaatgtaaagcaaagagtcatctttgtatggcctaagaaagttagtcaaaaagatgagatttggtttaacaactgtaaagtttatgtatagatagatataccaaggccttagcaaactttgccaaggtgcttatagattatataaatattgttgtgagcaataaaatttatactgattcataaaaaaaaaatattgaaatgagaaaaaaagagtaatttgcggcataaatacttaagcttaactctcaattgtaaataaatacttaagtttaattttttgtggcaataatagttaggttatatttttagaactccgtaagtacttcattgttaaatattaaataaattgacacttggagatctttgattggtccaggttatgagtttttatttttttttttaaaaaattaaatttaaatatatcaataaaaaaaataatttgacatttaacggttacttataaagtttcaaaatataacttattaccattaaaaattaaatataagtatttatttataattagagttaaatttaaatttgtatgcagcaaattattaaaaaaaaaagttagattggggatttttggtgtaaatagggatatagtccgctgtgcctacggttccaactaaaagtccgaggactttctcttccaccaaaacacccccaaaaaccaacattgatccaactatcgaacaccgatggccgagaaccaaagacccacaaacatcctcgactctttaggggaggagattgtcagaattgtcactccagtctcaatatgcatgttcatggtggtcattttggtctccgttctcagctcggatacttcttcctctgccagcttcagtacaatggccaccatggcatacacagaagcgagctcagattcctcctgggacaaattcgtaggtgcccttttgaactctcttgtgtttgtggcagttgttactgttgtcaccttcgtgttggtcctccttttctatcttagatgtactagatttttgaaattctacatgggtttctcttcttttcttgttttgatgtttatgggtggtcaaatagctgtttt

SEQ ID NO: 224518 - DNA, 1157 bp, Cannabis indica
tcgtggagctgtatcttttataatctttcaagagagctgggtaggaaactgcaagtgagccaaatgtttgatgatcgaaccatcatttggtgcagagacgagaacgaagtagtgtattttttggagaaaggcatttggagtattccgggaacaggagataccaaagtctccttcaagagatggtcagtagaggagcaaaatagggacatcaaagttgaatgccgtggctcttggattggtgtcaaaggcttacctttgaatatatggaacatgaaggtatttcgaaagattggagatttgtgtgggggattgttagacgttgagaaagatacagcagaaatgaactttctccatcatttgaggatcaaacttgagggagataacaatggttttgtgccagaatccttgacattagagtctgaaaaatctgtttttaagctagaactctttaagcttaatgatttgggatacaagtttagtggtttttttaatacatgttggcatcaagactttgaaataggaagaaggatcgaaggtgagagggattctggacatcatgacgaagtcggagaagaagagaggaatcaagagttaggaagggtgtcaggtttccagaaggatgaagccgcctgctcgctagaagtcgaaccagtggagttggatggcagcgatggggcttctggaggagtcgaccgcgagactggtggctgggacacgatcgacgtcgacagtaacaaagaagctgaaacgaatctccccgagaaattactggtggcgaaatcggtggctatggtgaccggagctggagtggagaactctgtcattccaggaagtatggtgatcggtgctctgacagggaaggactcaacgggcagagaggattttgtggttatcgatactgatgtacacgcgcaaattaatggtatggaggcggttggaatttccaaaacgaaatctcagaaatctagggatgtgatatttattcaaaaagtgtttagtcggctgatgagggacctagaagggccacgtgtgagatcatctttgatacctagtacctttatcaacttaaagtatatgtggcagagttttgaagaaaatattggtaataaaatgggccaggaaagttatttttttaaggtgggccgagtttatgaagg

SEQ ID NO: 224519 - DNA, 1559 bp, Cannabis indica
acaacaattaggacccaggactgggactgggacccaagacctaaccccggtctcgataccagacccggaccaagacacggacacagaccgggacctaagatccgaattgaaatgagtctgggacccaagattgggatctgaatctttaccaacgactcggggctcggaaccaacccgtagtcggtgtttggatgttggaatcataccaagacccgaacttggaaccatttccagaccaggacctaaaccctaactcggactcgagacccgaaatcggaacaagaaccagaatcaggaccctagaataggaattggacctggacccaaaactggatctagacgcataactgaacacagacccagacccagaccgggatcgataccaggacccaggcccgaacccggacccagacttgggccaagtgactcgagacctggaccagaacttagacttgtacaagaactcagaaccagacccagacctagaccaagacttggaccaagacacagactgaaacctggactcagatcagacccaaacccagacctagatcaggacccaaacgtggactagtactataactcgtactcgaacccaggagtgggacccggactaagatcaggattgggacccaaacccggactaggaccgagacttgaacctggactaggactagaactcagactgggatcgggactgggacctaggacccgatactcagacctgggacctgagaaccgagccgtgacctagacccagaccaggccaagacccgagatgaggaccattactgaacatagaccgggacctacacgcagactggtacccaacttagaccgggaacaaccactttgacttgaatcggggaccaagacactaagacccgaaccaggacccaagacatgagctagagctacactaggatctagattttgacccgggacaggaatcaagactcgaggcttggacccgacccatagtcggtgtcaatattagggaattcaacatcgacttggacctagacccggaccaaaactagaacccatacccagatctgacccatacccaaaactagaccgggacctgcactaggactgggaccctaacccagattgggaccaaggaccctgacctgaatcagggacccgaacccatgacttaggcccaagacccaaacctagacccaaactttgacataagacccaaactcaagacctaaacccagaccaaaacccagaccaaaacctggttcgtgacctagaccttgactgggccccggtttgggaacccaacctggacccaaatagggacttggactcattctggacccaaacccaaactaacacctgaaaccgtactgggacctaaactcggacccaaacttgagattcaaacccaaacctaaacttggacctagaccaggaccaaagatctagacatagatgggggacttgggccccaaacccgaccatggacacaaattttgacaaaagatccggatcttgattgaggacttggactagaaactaggcaccggaactgggatgaagacccaaaa

SEQ ID NO: 224520 - DNA, 1552 bp, Cannabis indica
tgttaggaagcatgttagtagcctgatagtagaataggcgcatgttttttaatttccaaataagcggcattagtaagttctctttgatcacgatctgaccagactagctcttggttacgcaagttgttcagattaatatggacgccaggagaaataccaggagccagggcaattcggttggatccaatgacggtcagggagctcagattcccctaaatgtttgtggctgaggtagaggtttcaggggcagagcacatggtcggggtgatgtttacccgccacaggttgcccaagctgctcaggatgcccagaatcgggaaaacaggtttgcagaaatgcaagcccgaatcaatgaataagatgaagtgattcggcagttaagacagcagggtgctcctgcagtccctgctctagagacaccagtagctcctgcccctgctatgcaagccgaatctgatgctgcaacgaaccggatggaacccctgtatgaaaggttgtgtaagcaggcacctctagttttcctgggagtccccgatgttatgaaagtagagcaatggctaactgtgatcaccaggatattgaatttcatgggcgtcactggaaatgatagagtggtctgtgccactttccaatttcaagaagacgctttactttggtgggacatggtgtccatgattcatgatgtgacaactatgacctggaagaaattccagcagttattcaatgccaagtactataatgaggcagtcaaaagtgccaagagaaaataattcactcatttgactcagaaagaaaacatgagtgttactgagtacacgactcagtttgatcgtttggcaaggttggcttcggtaatcgtgccaaccgatttcagtaaaaaagagaagtatctggatgggttaaatgcaaagatcagacatgacttgatgatcactactgatgacaaaaccaactatgctgaaatggtggataaggcactgcgacctgagggcgcagttggatgcatgatagagtcggttgggactccagttgttggcagggctcctacccctcctgcatcaggttttagcaggggaggtagtggttctgccatggaccagaaaagaaaggcatccactgcaaccggtggctcaggtcaaaacaagagtatccgaggaaaccagggtcgaggcaatcgccagggtaattctgagacccgatacacttacccaaagtgccccaattgtaagaagcatcatctgggggagtgtaaaggacaggggtgcttttagtgtggcatgccaggacattacaagagggattgtcctcaactcaaaactgaagcactgaagactatagcgaaaccaactccagcaagggtgttcgccataactcaggctaatgcagaagctggtccttcagtggtaacaggtcagctctcggtcaacaactcttttttctctgtactgtttgactctggggccacccattcttatgtggcagccaaaatttttagtaagttggatagaccgaacgatagttataaatctgggtttggaacctttttacctgg

SEQ ID NO: 224521 - DNA, 2844 bp, Cannabis indica
ctaagccttaataaaaaaaaaagtcgttctggtctaagaatgttttgcagagcaaacagcatatacactttttttggtgggagaaggagcagggagtgggggactaattcatgattcgagaaatagcacaaacctgtgaaataatctggccagaaggatattttgccactaatgcaaagttctcaatagcccatggattaggacccgcctattaaccaaaagatacagatgttaatgaatgaaattatgcttgcacataatacagaacagtaagtaaaattctaccagacctgaaatatggtagatttccctccaatacccatggcctccaaatcaatagccatacgaacagttttactccagggatgctgtagatgggtatttcaaattaataagtaagcattttcatgcagagcaacacagatacaaggcactaaaccaaacaaatctgaaacatttgcgtaaactaattggctgcatcttcagcctgaatgttagcaatcacatattctaaatgcttggaaatcactaggatgcccataaagagcttcaggctgtatgttaacaatcacatattctaaatgctcggaaatcactcggatgcccataaagagcttcagcctgtatttcaccataatttgcagtaaatataagttctggttgctgattcaatacaattctgtactctgctttgaagtcaatataagatcttctttgtctcctatcgtgtattgacgatcaaatattctgattttgaaccattatggtagcacaaggttttgaaaaacagtgcaacctcattatatcatatattcatttatagcatgaaagaatgtactttagctttgcaccacatttagatgattatatgaaagatgcttcctacctgagttataaagctatgagcaccattcaagccttcttcctcaccagtattaaacaatatgattacagagtgcttaaatccatgagcccactgagaaacccctcgagcaagttccaacataactgctacacatgagctgcaatctccagcacctcccctgaaacatatgtgacaatttttcaccaacatagaatgacttcttgataagcaataatgtattaacaagaacaatgtaaaacatatgtttttgtgagtaggaggggacaagaattttcaacaaacattcatgtgaaacaatattaatgccagaggaaagaagaacagaatattagtattcataaacttccatgtgtactgcaacaatatagaactaagattgtgatgctctaataaaagtcaaacagctatacatgcccttcatcactagaaataaagagaacaaggatgaaggagcatacgttgagaaaacagtatcgatgtgagaagagaccagaattgcattttctctcgcttgagacacatattttggcgagattcttacaatgacatgatctaaatcagaataaacaagagtttttccattaaacaggccaccagtcattatatttgctccactttttgcattgaaaagttctacttcaacatcaacctcccagtgggctgttttcttgatctcttctgatgctgacaaaacatactgcatagccaattgggaaaaaggtcaaaccaatcacaaatactaatctttaactaaaaatattcctattatgaataattcattgattatagataaccccacgaacatcatgtcttcctctataatcacatcataatttgaaaacacattttggtcgttcacctaaaaagatatggcatacttatgtaatagagtaacaaagcaacaaaacatggataagttcagtctactcataacaaagttacatctttttcaaccatatactagagaaaattcacagctatatacacaaacgcatatatttatgttataatatgtatggaaaggcgccaacctgaacagcatgattcaaagcatcagagccaacagaatgagggcccaactcagtcaaagccctgacatggttaagagcttgaacctctgagaaaccccttttgccagcttggtcggcagtgagaggcaaaggcaagctcagatattggtaatggtaaacggtccacgaagaatagacaattgcgacgaacaaagtcaaccatacgaaaggcgacctgtgtgggggtggggcttttgttggaggttgtgagggattatcatgagaaatgggctgcttcgagtcggccgaggaagatccttcagattgaaacctcttcctcataattccaattccaattccaacgacagaagaaggagctttagtttgatgttgcggagctttccatagctttagttaaaagagttgccaaataaataatctattcaaaattttctcaagtcaatacgactaaggaggttcggattcagtattactaaattaagaaattttaaagactactataaaagtgagaattcgctaccgtcataaaaatatatatttttttttaccctagctaaaaaaattaaacaactgtttaaaatcgtagaaaaaaattagtatttttgatggttttttttatttaagcgtttacatattacaatcatgtataacttaggactcgaaccaggaccttcaacacacacgcaccctcctatggccacttgaactagcctcaaatggtttagtattcccgatgatttataataatgattacaagaataggcgacggtttaaatagaattcgtaaatttattaggcccttgtaagagtccaataaaaaatcgttacctacttctcgccacatttcccacgtgtccacctacttcttttctatttctcacatgcccacctagttcttctcacatatttcttctccatttcccacac

SEQ ID NO: 224522 - DNA, 6329 bp, Cannabis indica
aaaattgactatgtctaaaaaaacttacaggcaataataaagtactgaaacaggtaccgaaagtcgaggttgggtatatatataattattagcagcgagatcgttgttaatgtcctgttgctaataattctaacgatttatttttttattttttttaaatattattagtggtgggctcgccgctaatattattaggggcgaagtctaccactaatagtttttttttttaaaaaaaaataaataagtagaattagcggcgaatcatggttttgccgctaatgctaccattattaggggcagattttgcccatcgctaataatattacggctattgataaattttattgtagtgatagtatataataggaccacatctaacttaactataaaatattagcatgtgagtatataatatttactttgaatataaattattactcattgtgtgaatatattgctccacatacatataaattagttcaaagtttaaatttactaaataaatgagtatattaagttggggtaagttgaaatatacccattttttcaccagttaaccaaaaatagccttattttaaattcaattgaaatgttttccttttataagtccattatcgattataccctcacataaggcaactgttcaggaaggtttttttcattacataagggtataatcgagatataacaaataaaagagggtataaattaaatatatagaaaagaaaggtaaaaatgaaatgggttaacaaaaaaaaagtataaggtgcaatttccttttttttttttcgagtggggcatgggcttattttgtttctaatacatatgtatcgaaaatgtctgaaaaattgaaatatatatagtggtatttgtcaaaagtttatatggtctttggctattttaatttagttaagtggaacagtccaagcccactccactgtcatttttatatggtaatctaaaaccgccgaaaactgccgcgcaatttcattctctctttcttcactcaaaacaacttagtaatagaagtagcttgagctctctcagtggtgaacatcaactcagttatggtgatccttcagcaaaaacctcaagacgatccatttcttaagttcattgattacgcgaggtccgtcctttgccccgaagatgacgaagatattgatcccaatcttaatggaggagacacccgtcgacctagttggacctggattgcctctcgaatcctcaagacttgctctgcctattccagtggtgttaccgccgcaattctactctctgatctttctcaggttttattttttttttcttttcatttttatccaaaaattaatctgcaaattgagaattttgacaatgagttgcgaaacattattaggcttggaatgagcaacgtagagatggggtttctaagaaaaggccggaatgtattagccagttgaggaagaaacgcagacgaacgaagcttccgaacactgtaactattgattctatttatgagaaaaatttcttgtcgttaaaacagtgtattggaatctgttgtggttgatgcttttgttctcccaggtactcatacactactttttattttgatttatgtatagtggcagttcttggcttgttattttgttgagtcttattacatctttctattgtatagaattatattaaattgtgatattattttcgtcatgatgtttagcattttcattatttctctttcaggtacgaacatttacatgcttacgcttggtgatttttggagctctaataccattgatctttatctccatcgcaggtatactaaagataccaaattggtgacttattcaaacagtaaattatttcaacatgggtgtgacccttttatattaacatgtgacagtgttaagaactagtaatgtgtttataccatgtgcatcttaggagaggcctttttccttttggtcatagatatttatattttaaatttgtgatggtaaaacagctttataccatttccaatgcatatttttcgcatgcgcatttagatttcatctgtttgtgtttgaagtttcctgttcattaaaggttggtttgaattctactcatgtataaatattttgttgtagatactatgatttggtggatcctaaaaatggcattttgaagaaaggaagagagattttcctcactgggtgctatcttcgtactgctgctgaaggatatggttgtccacggttgttgccaacagaataccttgtgatattattggatgaagtaaatttttcaactttgtttgttgtccttttggtctccaggattgtttcttactgtatatttaaccatgtcctccctgttttgtataacgcttatattttcattcactgtgcggctgaaatttgttttaaggattttctgtcattattgctaatttttcgtatttattttcaaatttgtaaatgtaggatgaggatgatgatgcaatgattattggagctcagttctgctcagatttattttcttcaatttcacttgatgcagtcaataaaggggtttcttactcgttatatggaaggtacaataaaatttgactgattttgaataataactttctagttttgttggaaattgttattcttcataaaaggatggcttaaatttcaatgctcggtcatcatcaaatgttctactccattataagaaggttgatgaagtaaacatgaaagcattacgtagctattcttgattaacaaaagataagattcctaattagggatgaatgatgatgcatggttgcacctaaactgtctgcttttgaaaagaaaatgacttttccacatttcttcatgccaaaatctcattactttttgaatttatgcataggattgagtttattgggccactggaaattcatggaaagtttggtagtttacagaggaagcaaatcactcttgttgatgatgacggtgtcaaaattaagtttcttttatggggtgagcaagttctacttgctaatcttttcaggtgaactcttgaacatgtcatgtttttcaaaactaagatattagaatcttttgttaacacgtgtgagaaatgttctatttattttcagcattggaagtatgcttggactggatagaccctacatagctagttctcaagagagtgtcattgaagaaagtaatgaactttgtcttgaatatggcagtgcaacacagttgtttttggtgccttttattcaacatgaagaacaagtaagtcgtttttttttttttttgttgatgtttaatcaatgatttgagatataaagttagtttatattttgctcaggtgtgtgtcacattgacgcaaaattggtgtcaaggaacagggcttttgagtacgttagatctcactccaggtccaaaagtttcccaagtttcattgcctcgtgattcacaagggtcccttgactttagttgttatcctttccaagtgagttatttttatcttctattctacattcttcactaagatcttaatgggtgtgctcatgatgccatctcattaatctcttgaatacagttttcttcaatatatctggatgtaattacgacccgaccatcattttctggttgctactatcttatctttagtttagtactatagtatctcttcggtaagttgtaaagagtgtcaatcagttcaaaaggagtcattttttgaactatggtatatcttcagtaagctgtaaatggtgttaaccagtgaaaaacaatgatctttgagtaagattgacatttcttacatgtcataagttttgcagccatttgttacggatctccacgacaagatgacaggcatcagtctctatggtgttgttaccaatattatgaaggacagaaataccacaaaagctatattctctctaaggattcaggatacttctggaacaatttgggcaaaactacattttacaaaatcttggtattgctgtttaattaatgctacattatgtcttccaaaataataaaaaccaaaattttcttgatgcattatctaatttaatatccttccttaggtctttgggaagagtaagcgttggtcacacggtgtacatatctggtctcacatgcactatgacaaagcagaaatggtgaggttgcagaagcaatgttcagttcgttaaacccattttagctcaaaagtactctagtttatctccatttcaaaaatgcacatttttttttcttctaaaatctctagtgtacagcatgatttcacatgtttatatttcaagaatttgcatcaaaacatcttatcaaatggctgaatttttttacttggcagcctggaagctttatggtttgagagtgatactggatcttcgtttatcaatctcagttgcatgccagcactgataaactctccctgtcttcaaaatttgtcaaacctttcaactctatctacccagaccacctgttcccaagtatggaattctatgaaatttcattctgttttctcttcactagctagttttggttaataatttgccatactttccatagcttatagcactgatcttatagtacatgttgatatattacattttgcttttgttggaggtttggagtaaaagtaattaggcttataaaagtaaaatgtgaggatggttgttattagtagtattgcagctttataaatcatttgttagatggataattgatatctgatagaaactcatatgtgcacagatggctcgagtttggctggaaatggcgcattgtcatgtgaatacaaggctttcacacgccctatgtggtcacttggtgaacaggacgcctaatgggtttatggagtgcagtttctgtcattacacttgtgattctgaagttgttcgcagttttcatctgaaaattacccttgctgatgagactggaaaaatctttgcatggtctactgatcaaactgccattgagttgctccaaatatctcctgatgaattttatgagctgcctgaggtaattaaaccaaaaataagtcttgatagtaatattctatgttgctttatttttattccatgtctaattgagattgcatttttccaggaagaacaagttatgtatccttcgtcactagagaacgagaggttcatggttgctttagttaattgcaacatcgagggctatggccaaattagtgataatgacatgatttcatgggagataactcgtgcactaaaatgtgagtaattaattagattcactcaaactcaaatggtaatatcacctctaattatttttttttttttaaaagagtcgataatattcttatttgctttttcgtttgtcttttgggtatagcccacgtattctaatcttgataggcaacataaatttattgattaggttcaccaatcgttgtttggatcttgacttttacgagaaaaaatccaaacaatctcattttcatatgattgaatttaaacattttttaaaaaataaaactaaaaatatttatatatgtatgtatattaaatgttataagatttagaccaattgtaaatattaaacatatcttatcaaattgtaggaaaatgttttatctatttatttatttgtgtattttttttctttctcatactttgaagaatttcaaatgctgacacgaacactacaatcaaagctcgtagtatgtttgtaactaatatcttgtgaaactttagcaaagaaaaagtgcaataacaaattcatacttgaaggtgttcattccttataatggttatctataatattgatcgaaattgtgtttgagagatctttattactattattattataaggatgttggagtgataagaattattgagttccatctcaaattcggttggttatgagtagtgttatccatgttatttttatttttacatttaattcatatgagcaattttgttattatattctctcaaaatggtggttcttttttgcttaccaattttgaattaccgcattacaagtggacatttgcttgcttattttattatgatcaaaagtgtctttttgtactatgcggatatcgtgcaaagaattttctggcttgttatatgaataggtggattgaatgtctgttaggaatatggctatgataacatgacaagaatcatggggtttcatcttaaaatcaattcttgtcatgatatcaaagccaaataaaactctaacgaatatttaatctaaatttaataaccaatcaaaaagacgaattaaaagagtcgcttgtgatttagaaatagtgagccaaaaaagagccaatttgccaaagttccactagtctaaaacatgagctaaaagagtcgcttgtgattcagt

SEQ ID NO: 224523 - DNA, 1090 bp, Cannabis indica
taatttaccattttagagcttgtattttgcaaaagctattaattggaccctctattttattaaatgacaaatagaccttgtatttttcaaaattgtacaaataagaccctgaactaattttttgtcaagataaaacttaataataatctaatctaaagatgttatgacaaaactgattatattttttgtatatgttcgtgttaaaaattgtcttaaagttggttatattaaaaaataaaattattgaaaattaagctcagggacttatttttactattttggaaaatatatggtctattttgtcatttaacaaaacagagggtccaattgataacttttgtaaaatactaggtctaaaatagtatttaccctataaattttaatatttttacagattgaattatatattaaagaagttgtctgatccaattcgctcccatctgaacaaaagtgctgcaccataatttaagaaagtagtcaaattttatgaaggtatgtattcgggcacacttggtattaattatttgtgctatcttaatttatttcttttagcaaaattttttgattgtataatttctttttgctaaagctctagaagtattgaccactagtaatgaccttgtcaaaagcctcactagaaagagcggaagctagcgaaacccaccttgtcttaggtggcttcgaatccaatatctctggcacaggagactgttctaggacatgatccagtcctattactgcgcgccaagaccatttagtggattgcctcagacatcataatggcccaaaggacggttagggaggatagatcatgtcctatatttctccccctcactagagcagcctcctctatcttggattccgcatcagagctcccaatttctgagtccacatctggctcagcctcgacaaaggctgagtagtcttttcctcaactatgattcacctggctaccatggccacatgtggattgtacagaggagccctatgcaaagtctgctttatccttgccattagtacaaggagagcagaagacctacacagttgccacctccccaattcaacatcgatccctacctgcatggaagaa

SEQ ID NO: 224524 - DNA, 1445 bp, Cannabis indica
tcgatcattgttggccaaaagtacccctgttagagtatctttttggataggctttgtccctcgacatggttgccgcaaaagccttcatgcacttctatccttagtcgctcagcctcaaccttagtgacacactttaagatcaacattgagaagctccatctatacattactccatctaggattagatacctagcaacctttcttcttatctttactgctttatttttgccttctggcaaggctccggtttgaaggtaagctacaataagtgttatccatgttggactgtcatccaacatgtcgacttctttagggatggtaatgctgggttcctcaaggaactatattggcactaggtttgccttgtcggcaatggtggtacttgtcagaggggaaagtgcatctgctgtagcatttgttctatggggatctccttgattgtgtagcctttgagctgacttagtaagtctttgatctttctcaagtaggccacagttttttcacctcaagctgtgtatttccctaggacttgattcatgactaattgagagtcgttgaatatgtctaagtggtcagcccatacttcacgtgccagcttgaggtcggttattatggcttcatatatagccttgttgttcaagactttgaagttgaatttaattgctccatgcagctactgcccctcaagtgttataagggcaatgcttgcactgaaaaattagtcagtgcaacttccatcaacatgatcttggttctttaagtttttgttcgtgctcttgctctcgcttcttctctagctcttatttttctcttgaatcttgagagatttcaagagatgagttcgtgcacttagccacaaagtttgcaagggcttgaccctttatggccattcttggtgatatgtgatgtcgaattgtcaaagctcaatggcccacttgagtagttagcctgatgcttcaggtttctgcaaaacctattgcaacggatgatcggtgtacacctttatagggtgtgcctggaagtatggccttagctttttcgaagccaagagcaagttatgggtcaacttctccatgagtgggtactgactttcaacaccgattagtctctttttgatgtagtatacagggtgttgtacaccatcttcttctcttgtaaggacaacactcacatcatgctctgtgactgctaggtacatgcctagctcttcattgtctaggggttttaacaacacaggtggttgagctaattgttttttctagctcctggaatgcggtttcacattcctctgtccactaaaattttttgttgcgtctgagaatgttaaaaaattgtacacatttgtatgtagacttagacacaaatatgcttagtgtagcaatgcatccttttaggctttgtacttccttaatggttgtgggcgacttcatgtccaaaaaggcttg

SEQ ID NO: 224525 - DNA, 10058 bp, Cannabis indica
gaaaaaatttagaaaaaaaaatacattgagtttaaaaagcacaaacagataaaggtaagtaaataatatgcatatactacttgatgtattgaaaagtctatataaacatgaaacaaaagatgagggaactcttcttcttcttcttcttttttacataaagattttctgtttaaatatagaacttgaaatgttattttgagatacagagttctttttgagaggttgaatcttatcttcaaatgcaaagattttttggagagagtggaatatgtccttcaagtacacaccgtttttttttttattgtttagagaggcggagaggtgaaagtgctactgctatatggttgttgttgaaaaataagagtacataattcattgctttcttatacgttaagttaagatactttccaaagactttaaaagaaaagaatttacaattgagtaaagacacttggatgcaatgtttatatatacttactgaagaaaacaaaaaaattaaggaaaaaaaggtacttgacatctcacgaatacgtaccaactttgtatcacatattgttgtttatcaatttcaacaatctaattcttgttagttaaaaaaaataatctaatttttctcaatatgaattaatattagtaagatataacgtacaatacatactttaattaaaagaaaaagtacaataaataaaataaaaatacaagatactcaaaaggactacacttgaaatgatggatattgattcttctttatatctaaataaccattatattttacttttgtggctggtcatcgaccaataatttatccacaaatatatacatagagtaactacaggaaatttagtacatttgttatactctacttatttttatttgagaatatgttaatttgacccttgtgtttagcgcaaataagatagttcacacttcatgtcttgtaaaatataccaaattgataccctaaacccaattttgggcacaatttttcagcaaactaatacattaagcacaatttttcaacggtcaacgaggatcaggactttggattaagtgatattgatagtgtaagatatataattgatattataattaataggcttagtaattgtgaatatacgaatgagaaaatgatctagagatagagaaaagagaagggcaagaaaacaaattaaactttacaatttacggcaggggtgaaaggagaaaatcgcactaggtaactaccaagttcagccaaaaaaataataggacaaaaagtcatattaatggtaaagcttatcaagcacataatacaagttaaactcagaagatgatgctgctattgagttggtaaataatgtgtctacagttgttgatgacagcatttatattcatccaccatgatacctgtacatacacctctagaatatgataccaaagatgatttgaataatgcgtaagaaagaacacccccacaaaattacgtgttctataacatcaaaatctatataccaaaagaatcccaaaattgggtctgagacagttcacttcacttcacttccaccaccagaactgtcgaaacaaatatatcttcctcattcggacattgttgtaagtcaagaaagctctcgctttaataggatcggcattcaaatactcgaatgcatacatctgtttggcctcttccaagccatcgatctccatcacagcctgcaatactcagatgagtcaatagaataattgcttcgttccattgcatcagccaagcgtcgaatgcttgatgccactgccaacattgcgtcttgaagggcctccgaacttcgaggccgttttggaagctgccttagagggtggatcaaaggaggttcttgactaccatctggcatctgggcatactcaggtggtccagtatgtgactctgttccatctgtctcgcttacatcttcagaacttgcagaaacaaacgaagcagagtcatcctcgaaattctttatctcgggctgaaagctcccatcttttaacttagcccagcgactaggagcttgataatttccacagacaatttttagttcatcatacatctctatctgctttcctcgaaattgtctggcatcaggatgtgcctaatgaacaaataatttagaagaaacaaaataaatgcaccaaaggtcaaagcaaaagctaagaagaaaaatatttactcacagctatgtatctcttccaaagctcttcatgctcacactcgatcatctttgtatttgggttccacctaaacccatcatgacttagcatatccttcataatcttatacctcttctttattgtcttgagacgattaacaactttttggttatttaagtttaagttgaaacgagaattcacagcaatacacgcagcagtataagcattttcattaaagcatttatcgattttgtttccattttttgcttgaacggcaagagattcaattagacacttgtccattgcaattgaccacacaacattccttcctttgtgcttcgtatcccttctctgtgcatgcagatcatactgatccgtccctacgtgaaacggcttagccatacaagagattcaatgagaagaatatgtcccagttgggcagcaaacaaaactctcgcccaatctaaggtgtcatggaatttcaaacacaagatttcttctccctccaaggctgcacataacccacaaattaattatcaagcagcaattgtagatgtagtgatttctcaaattgctgttaccccaccaaatagaacttcatgcaacataaagtaattcattaactccacagaatgaactaattcaaataagaaatacgatatcttacccttgtttctaaattttttgagacagaaaatcaaaattatgattatgggaatttgatgattttccattactcaatccctagcactgttttaaagatgagcaaaacatttgaaataaacaacatttacccttgttaattaattaaaagtaattttttgccaaaatggtgacaactctaaatgatgcattgtcacatcaatgttttctagtagtaacagcaatatcatttttatcactttgcttcccaatttcaagttgatcaccgaccagaaatgtttatattaaaaataaataaatacaattttaaaaattaaagcttaccaaggtcaaaatcatgattttaatcatattcaggaaagaaaaatatacacttaataagaaagcacaacatgttgatgtgaacactagtatgcactgctataagaaccacagcgttcaagggacaagataaaacagataaatatttattcaaatatagttcattaaaggatgacatgaagtggcaaacaataactactattaactaaatagtaattgatcatactgaacttacttcaccaaccctacctactacagagacgagtcaccatgagcaatgttccttaacagaattgaagatcgcacaatcattctcatatttaacagaatttagatttgatacttttagccaaattcctaaattttcaatttctttttttttgtttttttttttttgtcgtttacagtagaagatattatagaacatcaaataataataagtatcatccacaatattccacattgtaaatatcagaccagtctctaagggattgcttcaatatattagcatgtctaaattttaaagtgtaaataactacagctaatataacataatagataacttctatgcttcttgtgacaaccaagaaattccattaaatatgtatacataacaactcaacttactgattgacaaagaaattagtgtttgagattcatcctgaatacagacacttactaaacaaagaagaaggaataaacaaagaagaaggaaaaaaactttaaccaatgttttacttttaagactagccgatcaagtataaagcatcttgaatgggagactcaagtaagcagtcattgataaacataatatgtgaaatcaagcataatctacattcttttctccaagtgcaaatatcattagctagcaactgatcactttttaccataaaaacctgggattctctattcagagatcctccaaacagacaccaaattccaaaggaccagagcatgtaatttttcgatgagaatgtactagttgatttaaaaattaaagccagaaattgagttcttaattcatacagacaaaaagttcttgaaaacctaacttacgattctggctgattatcttcctcactcaataccaatttattaaatttgtacatctaatggacattgtctgatgggatgctttattccctttgtgcgtggcccattcaacccagtactataaaaatcgaaataaaagtttcttcccatgtccattgtcactctctctgtttcatttttatttctctcttttcaaaaaaattgcgaatgggaacttataaggctggtcttatcatgattttatcaacaaatctacaaacaacccttagtaatttgcctcaaatttatgacattgtaaactgtactatctcaagaataaaaactcaaaaacagcatgtaaagtagtagtataccaagagttcaaccagctgatttcttgacttttccttttcatagcgaactttacacggtaataatgttagaaaaaacaagtaaaaagcctaggatttctccgatttttagtttaatgaaatatctcttaaataacatataagagacttcaagtcaagtgtgaagtcagatacctcatgtgtacatattgcatccgaatttataactgctcattaacagacttcattcacacacagcccaaaaaggctttcagcctcgagacagtttctgtggtataacagtttaacttcaactttaatagagcaaaacatgtgacaatggcacttatcacaacgtgtctagtcaaataaatcaccaagccaaatttggtgactatcaaatgaaaataaaaaaaagattatatataagaaaaggatgaaaatcatcctataaaatgtcattttcctatcccaaaagtcatactcataattaatttttaagtggagttcaagctctaccggtattgaggaaagtattcatactcatctgaaagttaatgtataaccctaaagaatttacaattgcattctgagtcaataaaaataacattttaaaaaagatgcccaacttatgattaataataagctagtctaaattcaattatgaatcacttcaacttacagcaaagcttcagctaaatttttcccaatcatcagtactacttctagttctgtataaaataaccaaaaatttcaagtcaaagcaactgtaatccaaatctcaagctatagattccacattcagagaaacaaaacactaagatcagtaacacagtgaccccaaacctcactcgtttcccattccgaaaagaaaaagaaaaacgaaactcaaaccctaaatgaaagtcttgtaaataaaattagggtttaaggagaaacttgttaccgtgagaaaccagttggtttagctggtcggctgagaaatgagaaattggggttctgagccacagtactgaggcgtcttcaaccttcttcctctttgcccttatttgcattctgttttctccattgttagtgttggaaaggtcacagaatgtacccttccttgccaattggtcagttgggttttgggtagttttagaaaataatacaatttcggaacttctctaaaaagcccaccacaaccttttgaattgactttccaaccttatttgataataattttacatttagaccctttcgtttagttaatgcttttttatatatataaaataacattaaaatcaaaacttatacatccctttgcaaaatatataagtattttttaattttttttaaaaatttacaatttgagttgctctgaaagtttttatgtgtgttgctatgtaaattttaattgtgatttaaattattttattagttgttatgtaaattttttataaaaatgaaaacggctttaaagtgtaaaaataaaaaaataaaaaaatgctaatatataactatgttcattatatattgcctaatatttaataatttatttattacaaaatttatatttttttgcatatggtatttcccctacaaaaatgaattatgaatacgatttaaggatgtaataaagtgcaaccatcataatcttgcaagaatagttggcaaggcgaataacaagtagtgatagaattatcatttatttattttaatgtgagaattaggatataatttggtaaggtactattaattagttttttttagaggttttattgtaagttatttttggaattttaatctataatgacagggattaaatgtgtataaaagtataggtaacaatgacagtgttctactgttcttgttttaactcatgaataataatgatgaaaaaaatacaatatattgtaactttattctttacataaaaaattatgtttgaaaaatatgtaaatattgctattctctttgtttgctaaatttaatttttatatcagtgccctctgctcatgcctaataatgttgtgtcaattctaatatgatttacaaggagtgaccatgaactagttgaatatgtacaataaacacttgcttgtctcatacaagtgcaactatagttaatgaactatgaactagccagttggcacttttgatcagtaacaaacattaccagaagatagtttttttgagataaattgaactatacctaatgcatgtcatatccacaaaattggccaaatttggtcaagagacatctaaacttaacccaaagctagatatagaatcacattctaaacatcactatcctggtcaaaaaaaagaaaaagttttgccaatttcatgtcagcagaattcgattaccaaggcctatgtttccattagagacctcaccttcctacgttttttgtcttcattcccatgagatttggagtttcgaagacatgattttagtttaggttctagttgtttcctagtcaacaatttcgttttcctcttgtgtttataaatgaatcaacccaataccgaacgtatagttgaccagggaaaagcttcttcatcttagaatgttggtaagccacaacagcatcagattggttaaggaaagccactttggcagaccctgctgaacagaagattttggtgtttacataatcaactgagccaaacggagaatatttctttaccagttcctgctttgatggcagattagaatctacgtagaacttcaagaacagagattttgagctagcgaatctggcgagtgcatttgactgcagaggctcgtgaagcatttcagaatcatgaagtccaacttttgaagcttcagttgagctcacatttttggtgtttttataatatgtaacaacacccttgttgtcgcaaggtttcatttgaattttatcatgatttaggtggagctctgatggctttaactgtgttcctaaatcgttttcaccgttctcaacatcagtagcacgagtagaaactatctcgctaaaatttaagtcagctgcagaagatgagagtgtagtaaagccagtatcaaccttcatatcttcactctgaaatacagttccaatcctaccccttgcactatcatggcaagtgatgagagttctattaggctctttcagaacgccaacatttacatcaggctcttccaacttgacagaagacgtgtatgtatccttcactttaagttcctcatccttgagaatatcaacaatatttctaccatgataagctgaatctttgcagagagaaaaatcagaaacgttgtggaaattttccaacaaactgctattacatgtataggttgctaatatgggtccttgagctttgaatttctaacttatctggagaacctgataagatattatgacttgaattttccttccaaccattatgacttctttcagcataaggatcaatgtgattgtatgaaaagaaaggtacagtaggacacaacttagaagaaggatcaaagaaagaaaggcctctaaaaaagctattaaataaagctacctcagtatcaattctgtttattctctcactaaacttgaaagaatcacatacgacactttggtcaagctgtcctttaaaccttaatttgcgcagaggagaatcggaaacaaagtttaagtcaagagatctcttacagccaagttgtgttcggggcctttccatgtaaggcacaatggagcaactgactgtagtatcacatttatttccaccaccatcaacactttgctgagtcttaaaataaccaaggtgtgaaaagcaggcttctctgtttttcataaaagggcacgttttgtctttcatatataaaccagaaagtttctgcgaaagaaaatttctaaacctcaaaacattttgcttggtgatattgaagcaatttacctctaaacaaaatgaatccaacgcaagacattgcaaatttaccagcatctcaggaactgattgttgatcctctccttgcttaaattgagtcagattattctccagtacacctccattaatgggtttatgagttgggctcattctttttgccatatcggattccacgttcatgttcacaggaataggagacaaatgaccttcaaaattcggttctaaattacacacttcatctgcaaccaaacctgaacatgcataatactgtttgtctaagtgagcacctgagaaaatacaaaaaagttgtgttcatctctaattgttcatgttagaaatgcctccaaacaaaactaagctaaatgcttataacagtttatgctataaagttgtactcaagactgcaaataaataagatcattactaaattaaaaattttacaaaagcattttcaaccataaatgaaaatcacacaaagattgaaaactgaaaaatgtactccaaaacccaattaatcacattccattcactgtgaatttcctcacttgttctctatagcttccttaagtcacattctaaatcttgaaaaccaattgggactacaattatacctctctcaaggcagcggctgccccgccttgcttcccggtaagcctccctctgtcgaatcgcaatgaaatctcgaagaacctgcatttgtgcaattcctctaactgcgccgatgaaaccctcaacttcaacataaggcaaaacagccttgttctgcacgaaatccagcagcgccttgggccgaaacgagctcttcgcctcaaaggcatctgtgccaaaaactgtttctgagtctccgagccaactaccagatatttccgaccggcagcgacatctgaggctaagagcgatcctccggcagagcaatcgcaacgcggaatcgagcattgcattggcgccgctgcagcggtcgatatcctcggtggagaacagttggaggaagttttcactgaaagaacggatttgagagagttggaaacggcgagggtgttggtggtcgaagaaggagaccaagaagagtaagcaaccatgggtaagttcttcccttgtttgaataagcccaggccaccaacacgttccagaagattcatcatcttgtaccttcacccatacaatctgaccaatctccatggtttttttttttctcatcgaagctgtgaagctcttacaggcataactcacactctgtcttttcaaatctgctttgtttcttttatcattctttcacccttaactatttttaatttttataaattttatttacataattttattttatattaaattgatatagtgtactaagttcggttactctttctaatggtgtggctattcgacaaccttggcaggcccctcctagttccaagctgaaaattgaacttttttttttttttttttgagtgtaacatttttacaatcatatattagtttaatagtttaaaatttaatagttttaaagtcttgagctcgaacccatgacctctccctttttatcatccctctttcaccactaagctaactttagtggcttagctgaaaatgaatgcagcttgcgatgctcctaaaaagtgcctatggttcactctgttaagagagtagaat

SEQ ID NO: 224526 - DNA, 1607 bp, Cannabis indica
tgtataccaaataaggataaatataaatatatagatatatatgcattcccaaagtaaaggtagagaagaatataacttgggaaattattatgtatatatttgtagtaagtacttgtgtgagtacgtagtttactaaaattaaggttttacatgttcttgcagcgaattgccagtagcagttttattgaatgactcaacaggaagattactaaaatacaaccccgtatcgaaaaatgtaacagtgcttctaagggggctaggtggagcagccggagtggcaataagtaatgacagctcgtatattcttgtaagtgagtacatacctaagagaattcaaaaatattggctaaagggtcccatggcttttaaatcagaagttattatcaacttcgatggcaggcctgataacattaggaagagccctagaggagactctttttgggtggcagtgacaacaacgaatctagttgatggaactatccctaaagccatagagattaatggaaatggtgtcatcttgcgtaacatatctctcgaccgctattattccacctctattagtgaatttagccagcacggggaacagttttatgtcggatctcttcaagctagatttgttggtaaatttaactaatgaaatctaggggttacaagttctaaatagactatatgtatggttggtgaaaataatgtcagtgaactctatacctattgatctaaacatgagaaataataacaaataataattgtaaaccacataaaattataatgtataagaatcgagtgatctcaaaatatagtagaaatgaaagataaaaattacattctattgcggaatgagaagattggagagaagaaaatgaaaatgaaattatattaaaactgatcaatgaattaggattacagagatgagcctatatatagctcaatgagaagcatatattaacttaccaaatcataaaaataatcaactaactctcattagttaggccaaactaacccaggcccaacggtcatgataacccaactaaccaatgaacaaacagactgtaactaaaataacagaacaataacaaagcgggctgccaacttctcattacgacgaacagccactaggtatcagcgggctgccaacttctcattacgacggacagccaaagttttctgtcggtagggacggagtttgacaaacaccaagtcaccaacctcaaaacggacctcacgacggtgggaatcagccgtggtcttcatgcggtgttgagcacgaaggagacgcattttgagatcatcaaggaaggaatccctatcctccaacatttggtccacggtcaagaccgccgaaacgcctgaaggataacgcaccaaagggggaggatcgcggccatagagcaccttgaaaggtgtacaccccaatgacgaatgaaaactagtattataccaatattccgcccaagacaaccatttagcccacacccgaggtttcccagaagcaaaacaacgcaactaggtctcaaggcagcagttaactacctccgtttgaccatcggtttgtggatgtatgtcgtactatgcttttaaagcgtgccttgctgcttgaacaattcagc

SEQ ID NO: 224527 - DNA, 1663 bp, Cannabis indica
tttatatctgctaggaatttgtgcccctaaggggctgacacttaaagacaagtcatccctttctagtgatcctcccaaaactctatcaataccccaaaaaacataatgaaaggggatcgctggaagaattattgaatcaaagagaataaagaagagagagaaagattcacctagaacattctccgtataagaactctcataaatgacaaagactcgcagactacgattcattaatgtctgaaccacataaaaaccacttgcattaacgctctcatagctctccttattataacatttaattggttgccaaaaatctcgatcaacaatttggtgctttcatagagagaagaaggaagcgtcgttaaaaagaaaatagtcaaagagtcagagtaacaatggtggaaactcgaaacaacacacgttagcctcgtcctccttaggatgctcaaaacccagaaggcgaagaagtgacctcacgagtaaatgtgggctctaaggaacgatgaggcaaacgatgaggaataggaagaaaattttgaagggtacgacacctacgacgaaggtagctatacgaaactactggtcttgaggcaaaaggcggctgaccatgaagccgaacttgccgctaaaaaagaacagaataaaggatgcaagaggtaatggttgccatgcaaaaagccatgaaaacagtagggatacatatacaccctaaggccatcccatcgggacccgaggaaacactggaagaatcctcaccgagtactcagaagcccaagactagggagccaagccctataaagtacccttccaaggaaaacctcaggaaagatccaactttgatcccagggagaaagaagaaggcataggatctgcggaaagtccgctcagatttcctgaaagggaaaggttcgcagaggggcaagctccctcgagcgactcttggccctcaggattgagtggaccgaaagagcaaatctgtgcaccaagagcccggggagagagggagaaaaaattgaaggtaccttccagttgacctaagagagaatatcaatgaaaagcatggtgacttaagagaccattttgaaaagaagaaacacacactgctgatttctgaagaaacgttgaatgagggaatcctggctgagttggcaatactatgcaaagacattgcccgggtctcccagagacaaaaagggatgacttggactctgattgcgaggaccggtaaccatgcgcttggcacatacgggaagcaaagctcctcaagaactttaagatgactgaagaggaaacttacactggagattcggaccccagcgaccatttgtcttggtttaaccgggtgataactttcatgacggttagcaatgacatgaagtgtttattctttccactaacactaagggtttctgccgaggaatggttcaagaagctggaaccaggatcagtggactgctggagcaagctacagtcagtttccggaagcagtttgtcgcggcgagaaaaattaaccttgaagtcagcgccctaattaatataaaacaattccttcaggaactctaaagaactttataaaattattcaaagaagaggcttaaaagaccaataaggtgttgggttttatgccctaaataaaactccatttcaatgtaatctattttat

SEQ ID NO: 224528 - DNA, 2617 bp, Cannabis indica
ttttcttcaaaaaaaaaaaaaagaacatcttaataaaattcgaacttagaacttaacataaacatgagaataaaagctgaactataaatgagaatttatgttactattttttgaatttcagtatttactagcaacaaatttaatatttcgagtatttatattaaaaaatttttaatagtaaagttaaaattttaatataattttattaagtttttattattaattaaaatatataatttattatttatatataatttaaaatattttatatatccgttgcaaaacggagaaggtttactaattaattatagagtaagacgtaattgtcgttttacaaatgtttaatagcaataatcaaagctaaaaatattaattattcaatttttaaataaataatttagagatagaatggcacatgcagcacgagtagaggttcctttataatatccactccggtacacctgttgacaaattttaaaagaattatacaccttgggtcagtggaaactcaacacctgtaagaccttctcttagaatagcgccacgtgtaaatgcatgcaagcttctcatttatagacacgtagcacaagcagtgtatatatatatatgaatggatcagtttagtataatctgactacaacccaaacatttttttttcaagagataaaaggaaaacaaaaacaaaaaatactgcatatcatatccttatagaagatcttccacacacacatatatatatagatataattaatggcgggtggtattggagttccaatctgcgttcaatgtgggacaaggagcaacccgtgtcggtgcaaggtggtagggccaacgttgggtttcttggcttttgcagcggccgccatcgtggaatggccagttggggctctcgtctactgctttaagcacgtcaagggtcgccgcatcatggctcatcctgctactgttgtttaccccaaggtcaatagggccattcctatttgatcatcatcacatatctatttatatatttaaataactgtactgtctttattcctttcttttatattcaaaaccttatctaaaggtacgttttcttttagatatcaaacaaaacgtaaaagatgtttcgatttatatttagttggcaatgtgaacttggtctatatctattgtattttgcatgttcggtgtatttcttttcctcagcatgtatatatcctttttcattttcttttactttctgagatattaaagtatatatccaccataaattacaaatttactcaggcatgttcgagattttatatatgaatggagtggaaagataaattaaaaataaattataattgtgaaaataatacaactattaaaataaaagattgattattacaatacatacactatatattatatataaaaagaaataaatatacactcactcagatcgctatgatttaaataaagtgttatatttttacattttaaataaagtattatatttttacatttttcatgaaaataactgtgagaatttctgaataagatatttagtataaagtttagatttaatgagaataaaaaatataaattgaaattaaatttaaatactaagtaatttgtattaattaaattttatattttaagatgaaaataattaaaaaatatctagtaaaaacaaatgagttttaccataatatggagcattgtctgtctttaatgattgctttgtggcagttgagttagttattttctcttttaacttctttcatcagttttcttcttacttttcatccatctccacttccatgcttctttgcactttcttgatcttctattgtttccataaccgtatcttccatactccttattttcctctgctcccaaatctcaatggattctttcctaataaacgacatttctcaagcctttactgataaagaaaaagttgtggttaatatctctaatattgttgtttctcaccttcgttcacaatgtaatcggctattctgcaaaattttctccaaacggggtcacaatccaaagcaattttttaactttgtcaccagaaactggacaggaaggtttccagttcaatcttcaacatatgacgctgatgtctacatgattaccttggctgccaaggtgatcttcttagggtcaacatctaattttatgccttccaaatgttatgcagaatgcctctttaggcttgatcacaacaactctgttttgggttcaagtctatcgtttaccattcttatttatgtctgaacatcttgctcaaattattggtggtctgactagtaagtacattgatattcatgaggattctctaaatgaaggatgggatccattcttaagaattagagttggtattgatgtctcaaaaccgcttcttcgtggtcaaatgttaacttttccatggattaaagatgaattatggctatatttccgttatgaaagacttctgttatgaatgtggagtaattggtcttgtctatgacaaatgcaatgtgtatctagagaaattagatgagggaatagattcagatcttggttgtgggccctggatggagggttcgtccttttcctaaatcaccttatgatcgctatcgccaagatttctctaaggcag

SEQ ID NO: 224529 - DNA, 908 bp, Cannabis indica
gtatcagaattactttctgctgctgcaggcgtatacatttttatataaaatatatctctgtattaattattggcatttgcacaaactcagtttttctatacccaaataaatattcaagattatagatatgaatttttaattgtcgttattattttttttattttggatcaattttggtttttctattatgttgatcaattctgtttctttgattgatctaattgatttattactcactatggttattgacgctgaatgagtttattattcattcctttggaatgattttttttttttaatgtactacaataagacgaaagaagagaattaaaatattggttgcagctacaaagaaaaaagagagaaatcaaactctgtagatgaagtccttatcacgcaaaagtgcttcctgagcattttggtgagcttctctgttatcagttatgggggtatgctgcagggaggcattagggaaataggataggtactcacagatcaactccattagactagaaagagtagagttatctttccattcatttctaactttggttaccaattgagaacaataagagacaatgagacttgattgtagcacaccgattctggccctctagaagggcttcagctttggcaaagaggggtgttaaagcacctattttttggatcaaaaagcctgcaatcatttgtttgtgccattttttaatagtttctcccatacctatttaaaagctttacaatccaaggcagcatccacgcttaagctaaaagtggcaggggtaattaagggtaggggtgaggacagtgtttttgggggatccatgctaatttcctgtgtcctgcgttctgggatctgcatttaattattgatcttccttccaatcatgcaataagctaataacaaaatc

SEQ ID NO: 224530 - DNA, 1159 bp, Cannabis indica
tagtatttttagtagaaaaattttgtaagaaaaataaagttgaaacttcaagtctgaattcgaccatgttctgctaaaattttgaaaaatgtcagcataaaagttttaaatgtctttctcatctttcaaacacatcttgaatcaactaatttagagtttgtacataagagttatgcatatttttctgagagaggtcggagtaaataaaatacctggataacaagcaatttgagagtgcaggtcttttaaacgcaaatgtgggtctgtgtgagttgggcctaatttaattacaactttagagttaattaggtcaaattttagaggatttttgaagcaattaacgatcgagaactgttggaactttgatgaatcttttaacaaaatatataaatgttctagtgtgtgtaaagtggaaagagtcccacataggatatgaacccttatttataagggtataaagagtgcaaccttggcatttgggtttggggcccaaggggtacccagttttgtgcgaatgggtgaggactcacacacttgacccaccacacacgcgcgcacaccgtctgagccgggttgtgttggttagtgtgacactatattattttttacagaaaaattatttaataaaataataattatttatttttaatttaattaagaaacgtgtttaattaaaactgattacttagtcgtatcagttaatgggacacgttcaaaccaactcaccccacgattcagaaaacgttcttcttctcgttatgatttttcaatccattcgtctatataatgtgattgaactaatgggaaaaatacatcttttcttatcagaaaaaaatacagtattcataaatactaaaattccatctgcggtatcaaatatatttgggtgtattcgacggagctctacagtgcagtggggttctgatacagtacgaatgagttgttttatcctggggacgaccggcaaattctgactgcttgcacactcctgggcagtgtcgcgaacgtcttaaagagagcgacctagtccgtgactcaacccaaaagtttttcattcgataatatcatttctcttttattttgctagcagtttattcaataattttaagacgttctttctgctctgactactactaatgaattttctggttctactgct

SEQ ID NO: 224531 - DNA, 1126 bp, Cannabis indica
agagtgtgtgcacagtgcaccctcaagtgatgccttggtgcactaagagtgggtgcacagtgcacgccgttattgtgtctaagtgcactaaaaagtaagtgtacaatacacccacaagcaagattaagagatgctgttattgtgcttggtgcactaaaaatgagtgcacagtgcaccctcaatattactatgtatatatattttttttaaaatcttaattggtgaaaaagaaacttcatatttctcaagttttttactcttcactaattattttaggaattatgtttatttatttattaatatttttatcaatccttatctgctgaattctgaaataaataaataaaatagtagtactgtcttttttggatcgttttataaagaataagtcacatatacgttttcaagaaaaaaaaagggtgagataattaagtccttccttggcagccataatacacataaatgttaggaatgaagtggaggctatatatagtgacatttgtctacctatatatacgtagtaagtggaggtagttccacaattccttttatctttattaaaaaacaatatttccttttcccttatctttcacaaaaagtgaatcaaacaaccaaccttaccaaatctcattctcctaaatcaattattattaataatattataaaaaatttgaaaaattaattcatatattatttattcattttttttttaaatttactctttgagttttacaagtagtttctatagtgattttatgtagagttttaaattgctctacaattgagttttaaatttattacacgaattttgattgcaatttaagttgttccgttaagagtttttatgtagaattctgtaaaatacaaaaaaaaaacttattttaaagtgtaacaataaaaaagttctaaaaaaataatttacagtataaatacttatatttaatttaaataaatatttaaatttaatttttttactataataatgcttgttaattttgaaacttctttaagtgtacttggttgttaagtaaattactacataacaatctgattagtttgtcattaaattattatttttcttaaaaaataatttaaatataccaatacaaaaataacacaataataa

SEQ ID NO: 224532 - DNA, 1546 bp, Cannabis indica
atgtgtgaggtaaatattctccttagtatcattaagctcggtataaatagtatacactggcacgtacttatcatgcttcttctatttctttttatcgttcgacggttccttagtaccgtcctttctcttcaaaccaaaagcccccgagttatcaattctcgtggaaacaaaactcgttgaaacatttttgggtttgcttcccaagctatttttgaacaaattcatttcctttcgggcttcttcctttcgaacgaatacctgagctctttcgttgaactcagtgatgcttcaactggacgaccttgtaatacatcccataactcgccctctacaattaatggatcagtagaaatccccgtctgaagggctgtaagtggagtgttgtcatccaaattcctaaccctagctgcacctgtgctaaaacaacttaagtatgccttaagtgtctcaccgagttgctgctttatattggttagcgaggccgctttgggtcacctatccctagcagcctggaaatgtttcttgaaatccctggacagctgctcccaggaagttattgaatgatgagtaaacttgttaaaccagccgctcgctactccaacaagcgaggtgggaacaaaatacaacgtaaaatgttcgtgaaattactcgctcgcattattgtgttaaagttattcaaatgcgagactggattagtggttccattatatgatgagacatgcaggtttttgaatctcgaaggaaacggggtattcattatatctggatgatatggctcaagctcctcatctgagtcgtattcagattgtctccctagttcccccacttgatatctcctgaacttgtcctccagctcatttatccgcaattggatgagatcctcttgctttggaacaagtttttggaaaaggtcaggtttcttttgattcaagtgctctcacagatccgattaggagtaattgctgacagacctcgtcttactcacagattgtgtcctactcatagactttgtctttgagtgactcgcggatttactggttcccatactttttcaatcattagctcgttcagtactttctcctctttgaggttattgacagtgggttcttgaccgcctcgaggtcacacttgcttcttcacactctattctttccccctgagtacggttcgtcgtatttcccctattagggtctgtacgagtcctcgctctctgggtttgggaagaacactggtgatttctcccatgtgacctacgttctcccggttgagtcctaagatcctcttcaatgtcttgaggaatttctcgttcatcagtttccggttgcctcccatcaggctgttcgttctaattttccaggggtatctcattttccctgtgttgttcttcttgggcattttcttgtctcctggtttgtgagccacggggcctgcctcgtgctcttctcactccaagttcaggttgattttaagcattcgtcccctgtgccaacctgggtgagactacatcatgctctaattcagcattctgacgttgtgcctcttccag

SEQ ID NO: 224533 - DNA, 1520 bp, Cannabis indica
aatcacattttaaatttactactaattcattagtttaaaaaaatttagccacgaaaagctctctacaaaataatcagttaaaccaatgtagattatcctctcaacaataaaagcacagtatgggttcaaaagctccacttgttactttgtaacttatctgttcaagctagaaaagagacatgtcagatttttttttttggattttgctcccaaggcttgaaaacagtaagctttgtatagtacgagaccagtccacttggaagaatagtgtgcccattcatcatgactaattaagtcatcatcatttatcttctaataaaaacaaaagaaaaagaaaatatcatcctcgtttatttttttcgaagttgataagagttgaaaactagtgatttaaacgagaccgacaaataaagttgaatcgtaaatgactataataaataattgcagcgaataatagatattaattcaactaataatacaattcatgtgtagtaaagttacactcaaaggtgtttactttaataatattgcttagtgtatttattgaatatctacataagcattaagactacatctactgaaaagtttatcgttgatgaaagcttttgatgagatacagcagcttaggcatctatatatgtagcctagaggattaggcaataaatataagttcaaaatcacataaaattttcctaatggtaaattaaatagagtactggggcttgagtgtttaaagacttaaaatccactcagtttagagtcaataaatccaataataatattacttttaacacactcaactcaaccccatattaaaacataacagaagccacttacttattccactagtgtattaggaatctctgaattacttatgcttattcccaagggatgaaagtgggttagtgacagaataataacaatattattaatggatgtctttgtcgattttacaatattaaaaacattattgtaaagcatttatgttattgttcatggcaggtttttggcatcctgtttttgagcgtgacttgtagttttaacctcattctactttctcagctagccctaaatgattggatgtgaggtcacactatcctttggctaccagccatatgtgaccgttggatcacaatcatgatcaaatggtcataattaagggtccctttgctacaaaatttgactcattaacagttcaaaatagtctgtatccagtctagcatttcctgcggtcgaacacggacagttttggtcgttatcgattcgcctatacagaggaattgagttttatttttgaattattgcaataatcactttttttttttttaacaaaataaagtaaacaaaaaaagtactatcactttattttgttagagtaaaaactgtcactttattttattttagaaagtattagctatcattttaaaaattcaaaacttcacatataatattttaatatataaatgtaagaatatgattttgtcctgttattgtactttcacggattgtaatccgtgatg

SEQ ID NO: 224534 - DNA, 2175 bp, Cannabis indica
aaagttgtactgaactttagttggtacccatagctcgttgaagactctaccaaaattttgagataaacttcggatctctatctgacataatggactttggaaccccatgtaatctcactatctctttcacataaagctttgcaaactgatccactgtaaaggttattttttacctatagaaaatgtgcagacatcgtaaagcgatctaccgcaacccaaatcaaatcatacattcccgtggttctaggtaatcgaacaacaaaatcatcgtgatatcctcccacttccactcaagaagtgtcagtggctgcagtaatcctgccagtctttgatgttcaaccttgatctgcttaccaattaagcactaggatacaaattccaccacatctttcttcatcctggatcaccaatagtaggatcttagatcttggttcatctttgtagtgccaggatgcagttaatatggagtggtatgagcttcctcgagaatctcatttctaagttttgcactacttggacacaaaccctggtcttgtacaacaacatcccgttatttgacaccgtataatctatagcttgaccagaaaaaacctcttctcaaatcttcactgattatggatcagttaactgagcagcttcaattctgtctaacaaattagattgcaatatcaaattatgaagtttacctacaacaaactcaataccatatctgaccatgtcatttgctagctgaggtgaaatcttaatcatactagttactgcccaggacccttcctactcaggacatcagccactacattagccttcccaggatggtaaaggatttcacagtcgtaatccttaaccaactccaaccaacgtctctacctcatatttaaatctttctgggtaaagaagtacttgaggctcttatggtcggtataaatctcatatttttcttcgtaaagataataccaccaaatcttcaaagcacacactaccgcaaaaagttctaaatcatgtgttggctatccttattcatattcctttaactggtaggaggcctaagcaatgacccaatcggccagcattagaacacaccccagaccctgtttgaatgaatcgtagtaaactacaaacatttcattatcaaatcgtaaggctaataccagagctgtaataaatctctatttcaactcttgaaagcttgcttctcacttgtctatccataaaaaccactgattctttttggtgagtttggttaagtgtgttgagatcttagaaaatccctcaacaaatcgacgataataaccagccagatccaggaaacttctaacttctgtaattgtcttcggtctcggccaatccctaactgattcaatcttccttggatcaaccttgattccatctttactgaaaatatgttcgagaaaagacacctgagatagccaaaactcgcacttgaatttggcatataaattatgttctcgtagtcgttgcagagccatccgaagatgttgctcgtgctccttgtttgattgagagtacacaaggatatcatcgataaatacaataacacagatcccaagaaaattctttaatactctattcatcagatccataaaagttacaggagcattggttagtctaaaggacataacagagaattcctagtgcccatacctagtgtggaaagcagtctttggaatgttctcctctcaaattctcaactgatgatagcgtgatcggagatcaatctttgagaagaccgtctttccctgaagctaatcgaaaagatcattgatcctaggtaaaggatatttgttcttgatagtcagctgatttaattttcggtagtcaatacacatgcgtaaggatccgtctttcttcttaacaaacaatacgggagctccccagggtgacacactaggccgaagccattcagtatggtgccttagaaactgattctgctccaggtgctagatcaataacgaaatctatttctctctgcggttgtaaacccatgaattcatcaaataaaacatctagaaattcctgaaccaccctgatatcctctggccgaactgtctcaagtcgtgtggtatccaataccactgccagaaatcctatacatccatcttgtaacaaatttctggatgttaatactaaaataactagaatctgggatccctgaac

SEQ ID NO: 224535 - DNA, 2332 bp, Cannabis indica
ggtagctttcatctaaggacttggcttgactatgattatgcttgaggagctttctaaactcagcttcattgattccagagggtcgcttaggcttgattttacgaccaggtggagcacttgtagatggtgtagaggaggctctgggagagaattgcagtggctaagaggtcgttaggtcagcaagtatagtggagaatgcctttgagggaacggtgtgccaagttgtgccttccgtgacaggggatcggtatagaaggaggtgtggatagtggtggcatcgggttatggagttgctccacagttgtgacagcaggataaagtggtgggtgagtattggtttctaatgggacatcagcgttaaatctaggggagttgatgggtgtcggtgtagggctcattgggtggacaggggtggtgggaggtgttagggagcatgatgttgcgtatgggtgcggttagatggggattccatcctgtcgcaaaggagggagcatacgaaactaagtgtaagggcagcgtttcgtgtgtgttggaagatcccaccacaaaaaggcctgctgaaaccgtacgggcttgactaaagtgttgaatgccataatccaaagtgggggcattataggcatgagttggtgtgttctgtccctgaggaacaaacataaattggtgggtagccataaggtgaggatggtgtatgtgtgggcgaagcgtggcgcgggtattggccatgtaaaaaggattggaggtgatgcagaccttagctctaagggtgtggtcatagctgagcgaggggggcacagaagacgaatcacatttggccaaaaactcggcgcagtggttcacaatgtgacttaggcaaccatagcaatggcaaaaatcaagcaggttttcataccgaaattcaagccaaacaagggcagccatgttggtgaaatggaaaccagttccacgaggaaagggctgagtaacgtccatttctattcagaccctaagataaggcccccatgtttctttgagagaggcagtatccacctcaatgaagcggccgagaatctcactgagctttattgctaaagcctaggaatgatgaaggaaagggattccaaaaacttgaatccaaaaaggggtggaagttagcatctcggtagtgactatggaactagtttcgagaggggtcataacaatgagcttataatcgaaattccatggttggccaataagaacacgctgtcgatcaccaaaacatccaaattccacaatgaataagtttggttctttcatcagaacattgatagtaacgctcaagccacatttggtgaaggcgttttttgaaagcatcttcagtaaaatggtgattagtgagcaacttaacaacaaggaaaatagatggttcttctcctgcatcttcttcagcctcattggggagttcagagagagagtgaattttgttttcagtatcagtgaggtttagagcactgttgagagaatgggaaagttcttccatggtaaatttagacaaaacaattaagaaggaccagagaaatgttgtgagatgtttgtggaggtgtagtaatcgttttatgttgtagtgcgaagtgaatatgtttgggaagtgaggaagtgaatttggacgggttggggggaatatgtttgagcagtgttggagcgatggagtgactttggttgagcagtgatcatcaggctgggggggaaatggaatggagaatgtggtatttatagtggaaagattaagtgatataatcgtgaagtgagaagacctctgagaggttggtgagacacgatgacaaaaggaattagtgagcccatacagataacacaatagaacaaatgccttgaaattgaatgtaaggctctacatatcagtaaattcaggggtcaatgggtagatgctgtcagtaccccctatagatatccaaaggatgcctggaatcagagtgaattttgaggatcgtagggtaatgatgaaaaactagggagcagagatttgatggtgaattaagtctatttgtggaaaaattaggccgaaattaaagggggagatacggttaatgctaaaatagggagaaaaccatattagggcatgcacatttatggaaaaattgagataaaagaggaatttatgtgggaagtgatgcatacatgttttgggggagtctatttccaaggaggcgtcgtaggtggtgatgattgcttctaagtgttgctgtggattgacgaagcctttaacggtgtgaactaaggagcttcgtaggttgagagctaccgtcaccaagagttgcagaccccagacggacaaaaatgccgggcaccgaca

SEQ ID NO: 224536 - DNA, 1264 bp, Cannabis indica
gaaatctacatgctgctgcttcatcattcacggatagagattatcaatttttcctttgtttggtttggagagttggcattgcaggaatgagtttctccatcaccagaaaagaatcatccctgctcttatgatacaaaccacctctgattacttggatttgtatcaacaaaacaacacgaatttggctatatcggggtctcatccttcatcctcagctgctgcttctcatgaaaatatgcgcaccttcaacttaaaactgtcagtagatgcagcccagaatataaattccaatatgacaggatttggtgtggctctattcaacaacaaaggcgatatgttgctgtcagttgcttcaccctggacaggcactcattcggcacttctaatggaagctcatgctctcacctatgctctgtcatggtgccaccagcgaagcatacaaccggatctcattgtttcagattgcaaagtgcttgtggattatatctgtagtgaggcatctcaccacttgctgctaaacagatttaccaaagacattacaaacttcctctcttacattcctaatgctaaacttattcacatttccagggagcaaaatgaaatggctcacagacttgcaaagtttgcattaggcctagttcaggaagtttattggaaagaccataattttatttgtaacctgtgatttgtaccacaaacgttttgttttgaatggaattcaggttttctttaaaaaaaaaatagttttgagatttgcaaatggaatcccttaaattgccaaaaaaaaacattagatttgtaggtgtatatatatttaatagaactgttaagtttaacagaagaaaaaaaatatcgttaaatcaaaatttattgtcaaataacacttctagtttaggaatttttttcaatagacactcattttaggggcgtaccaatatgtccattatattaaaaaatataattggtgacagctattaaatgaagaatttttgtagtagagctgctataggggatcaaaacttaatgaaattggagtgcacttatagaacctttaaattattatttaattggccctaaaaataacaatccctctctatatctctatcttcatcttcttcactccaaatcgccgacggttccctctcccccagttctggcaccaccaacaactccctctccctcattcctagtccaacgggagattccctctccaaccctcagtccctcaaataaaatatacattcaaagatggaaattcgatctt

SEQ ID NO: 224537 - DNA, 3091 bp, Cannabis indica
agattttatggagtctaattaataaataatacaaatgataattttatttgattattaattataattattaaataaataattttgacatttataggattaaaattaaaaaatatggcatttgtgaaataaaagataaatggttaaaaaaaatagaaaaattataactagtggggcccatctatgtggccgaccacttagtccaatttttggctattattttataatttttcattccatataattcaatcctaaccctaagtgaaataatataaaaagaataagatggtctcattatccaatagcttaacctcatataacatagtttacattctgtcaaacaactagagttttgagagcctccattccttcttcttctattttcaaaatctcttatattgtgtttcataatttttgagccattagtaagtgagtgcatgcgcactcatagcaagtctagtactcaatcatagtgtataagactgtgaagaatccaagggttagagatctgagtgggaggagtcataatatttcgctgcaatcaatgtaaggttactcaaactttatatgtgtttaaattctattgttttagaaatttatatttagaatgttaataaacatacgtgttagtaaatctagatcatgataaaatatattctaatagttaaaaactatacatgtatggtgatgtggtaagtgagatagtatacgtaagggtgcagtggtcattggtactgcgttcgagttaagaatgtaagagacacatgtgtgtgtgtgtgtgtgtgatatttatgtatctgtgtggctacctccttttaaaagaatatgatgagattattgcatggttgatgtttttaattgtgttatgttgtgtgagtgcttgtacatggtattccttttttttattgggtctttgtagctcaccccatatttactttccatgtgcagataagtaagcctatagactttccatggcaagtttagtttaggcagtgtagagtatatctcgtgagatcatataactacgtgtggtcttggctatcttctgctgaaagttattttcaaattcatagaacttatttgtgaatattgtcttttagttttctattacttaaattatgatattttgatttcaattgggtacccaactttaaaaatttgtttttaataaaggaaacatacacgaattcatttatggtattttcttttaattaataaatgagagtgttacaaatagggaacaagattacagttctaagaacatataatggacttgaattctattcagatgaatttaaactattttgtgcagataagtaagcctataaatttttggtgataagttggatttaggcaaagtggggtacgtgtatctcgtaagatcatgtaatcttagccatttcctttgaaagtcaccttcaacgtgtggatgttgtcttttaattttctattgcatttacttaaatagtaacactttgttttaaagtttattaagtatattaaaacaatttaaatttttgagttcgtatatttattttaattagttaaatgtttacaataatattagcggcaaagccaggagcagctaatgcctcctttatcgtcggctattgtagtgtaactatcgggcacaaaagatatagattgatgtgctgttttgctattgagtattaacttaatctgtgagctaattctcaacatgccttttagtaattctcaattcaaaagtcaaaccacgcaacagaggggcccggccgtgtgtaattaattaataggaatatatagaagatttttgttttttctcaaaacactgctcagtttacgacaagttgatgaatttactattccaaagatttcttacgtatttgaacgtatcattgtcaaagtcgatcttttccttctaacgtccacttttactattttcactattttttcaaaatcttataaaatgcagcagctatatagctcttatcttctccttattatatatataaatagcatttttaaattgatcgtcgtctattttgtttcagaactaaagctattatatcatttaatgatccatacaagtgtttcattgaatatggtggaattagctgaggtaaattctaatggtgatattaataataatgatgatggaaaatgttcttattcaagaacaagtagagatgaggccatgaatgcagctgcaaccaaggtgcagaaagtttacaagagctacagaacaagaagaagccttgcagactgtgctgtcgttgttgaggaactatggtaataataatgaattctttttgctatatatatatacatacatatatatatatatttatatttataggtctcttcttcttgagacattttaaaactaaaccctactggtgattggcttagctggaacccacatgatcctgtgcttggtagctgagttctaatcaattttagggttttggctttagtgtgcaggagattaaaaggaattaattgttttttttttaaccttctttaatatgcatccatatatttgctctctcagtaaggcaaattattttgttctatgcttcttaaaattcttaaaataagtatatatattttgtttattttagttttcttaacccttttgatttttcaagtttaattaaaattatatatattcttaaccctagttatttatataaacatatatatatatatatattcttaaccctagctatatatataactaggatattgatacttttaactacacaattaccataaatattttgcagtaagttaaaagttaaaacggatgatattagttgagatatttatacatacagaatgtaatcaaactatgctaactatatatgtaatgtaattaggggtatttattggactacacccaatgtttttaagcctattcagatccgatcctattatatattgaatccgatccgatctaattaatttcagttatatctaatcgatctaacatctataattaagatgtttcgttggatagatttcatatataaatttattggtttaatttgaatttatttaatattttagacctaatattttttggatcagatcggatcaatccaatatttta

SEQ ID NO: 224538 - DNA, 1983 bp, Cannabis indica
tagtctctagtaggtagctctagcattcttcaaactgaacgacatttctttgtaatagtacaggcccatatctgttcgaaaacttctatgttcttggtctggtggatgcattttgatttgattataccccaaataggtgtccataaagcttataatttcatatccggctgttgcatccacgagctgatcaattcttggaagtggaaaacaatccttgggacacgccttgttgaggtcgatcaaatcaatacatactcgccattttttttgttcagcttgggcactagtactcaagctaggtagaaagcttcaatgatgaacttgttcgcgtgtagtctttcaaactcttcttttactgctcgcgcccgttccttgtctagtagccttctcttttgctggacggaacgaaagtttgggtcaatgtttagggcgtgagacatcacggtggggtcaataccaaccatatcctcatgtgacaaggccaaaacgtccaagtttgctctcaaaaattttattaaagttaattttatttcgagcaacaaacccttaccgattttgagtttcctagccaggatatttaggtcgatctccacttcttctagttcttctattggccctacatttttgtttgtttccccaagtcagggatccatgtctttgttaccgccttgggaaaattcctaaagggaaatgctctttccattgcctgaaatctggctggaggtattttccttcttaaccttagttagggcaaggttgtagcattcccatgcaattttttaatttcctttgagacatcccactccattctttgttgggaacttgatgcacaaaaggataactgatgtaacggcttttaagtcatatagggtcggccggtctaacatgacattaaaagctaaagggacatcaattatcaggaattgtgccaccatagttatgctcctcggagcttgtccaacagtgaggggcaggcgaatttgtcccagtggtgccacactttggccagaaaacccgtatacaagctgggtgcaggggatctgatctttaagttgaagtcccatcttccataagttgtttcaaacagaatgtttgaggaagctccattgtctatcatagtccgtgccactgtcttatttgcgatttgtacttccacgaccagggggtcatttgttggaagtggacgtggctggcatctgcttcagtgaatgttattgtaggctcccctacccatggtatttttggttttctctcttccacaaccaagactgcttcattctgttcatactccaaggctcaggcatacttttcttgagctttgcccgagtctccagcaagatgtggacccccaataatgacctataaattcccgtccactaatggaggcatcaattggtctagattattgtctacttgggcggcccttttgtaatgccctaacctatagggacgccacatgtgtgattttataaactagtttaatactaatagattaattaattattaaaaatcgtgataatattaaaaacttgactaaatcaaaacaataaaaacggacattataatagcataaaaagcatgttccgagaattcctgttataaaacgttttacttaagaaatatatacaaaaatatttaaacataaaatcaaaatacacagcagatatagccagcccaaaacaactcctgacaactcagcacgcaggccggtgaagtcaatatgtacattgttggagaagactgtcacctcatggttgatctaggttttatttgcctttacctgtaccacatagcacccgtgagtcacaaggactcaacaagaaaagtaagaataataataatcatataattttttattcgaatattttcatttacacacaataagaatcaacccatcacacattgttcataagatgaaatccaaattacaactggcatctaccacgaataaacatcagtatacagatatttggtaatacaaaa

SEQ ID NO: 224539 - DNA, 3809 bp, Cannabis indica
cattgcaaaggaatcacagaaattatacttaaccttttttttttcagagaaaaattatccttgagcaaaattgatgaacttttccaaattattatgttgtatgtatacaaaaaaataataataaaaaaataaataatgcacgatgttaaagcttattcttgttcttctgaaaatttaaaggtatgcagtctttcttaagattttcattcaatacaagaactgtcccatagataaaaaaataaaaagaatttatttccactctaatatcttataaaacaaaattaattgatatactattatagaaattcaatttttttttttttttttttactttgaaggagggaaatttaaaattgggatggaaccactagggtaggctatgcctatgaccacaaattcaattttttttattaaattaaagagagaaaaaatatatcattacaaagaattgaaccaatatcacataatttgaattaagagtatgtttaccccattatactattgattatgttaactaattatattatgtttactaatatattatttgtttgaatcaaaaagacatttattttattacaatatatatttatatataaaatagaaatgtacttatagtcataattaattataagaggagatttaaatagttacatcaaatatataactataataattatatttacttttaatcaatcgttgtatcattattaaacagatatgattaatttaaaaattaaataaaaataattaataaattattataaccgatacatataactataataattatatttacttttaatcaatccttgtatcattattaaacagatatgattaatttaaaaataaaataaaaataattaataaattattataaccgatacaaacctaattttatttattttcttataaataaaaaatatttataaatattaattataaaaaatatcgtattaaatgttttaattaataaattaatttattttaattatatataattataattttttttttaacagatatataattataattaatttgagtccaaaaataaaatttttatttgttagtaaccattatagtacgtcataaaaaaatgtgtctataattacaattgtaacattaaatagtcaccatatatatatagaatgtttagatctattctaaacaaaatggaaataatggaaaaaaaaaaaaatcaacacttcaaaacaattttttatgcaacttaaattgcaacaaaaaattgtatagaaactcctattgcaattaggactacaaccactttaaaaacccaaactctaaatttaaacaaaaaaaaaaagttaaaaaaacaatttatggagtaattcccaaaaaaaaaaaaagtagccatgtcatcaggtaataagttaaaataaaaaatattattttttaaaaattaatttatagctataaatattactcatttgatttgatggtcaataataaaataatcattcatgatcataccatttgatataattgtcataaatgatcaataataaatattatgagtgtacatatatatatttttatacatatatatagttatataaaagaatttaaatcttgttttccaacataaaaacttccatatgtgctacatagagcatggagcactttgaaagcccactgtaaacaaaagatttccaaaagacctttaaaatatttatgaggggtttttttatttttatacctcaaaactagtttttttttttttttttttttttttgcatttttacgaaaattctcatagcaaccaacaaagcaatctaaatcgcaaccaaaattcacatagaaactcacataaaaatcacctaaaaacccacaccgataattttaaaaataaattaataattaaaaaataatatataaagtaattcacctatttattaaaagtacacatatgtgaacaccaatataataccacctcttaagtacaactccccccaaaagctaacttgagggaagaaggtacccaagtagttttatactactaatcaattccatacttgatcaatgtggaatcctaacaatacaccccctttggagccgacacccacctctaaggctgcctactctgcagtggcctactctaggcctaatccacaggtcaccccttccgtgacgtcggtcccatttaagggtgcatagctctgataccacttgatacaactacttgggtagaactcacccccaaaagttagcctgagggaggagggtgcccaaataattatatactactaatcaattccatacttgatcaatatggaattctaacacaaacatgcacaagtagtatcatttgtatcaaaattttccaacagaacaaataaaatcccccaactgaagttcagttaaaaccccatgaagtcaatcaatgaatctacctggaagccacttgggactagctcaagtagttaggtgtgtgtgagagagtgaggggaagggagggggttcgaaaatccctattgtatatatataaaatcagttaatctacctggaagactcaacaacgtcgtctggggcaccattgcatctaatttcatggttgtatctttcttcggagtctaatatatctgttacagagagcacaaagttctgttcgattcccacatacttcctgtttggaaaaagcaaagcacccatacaatgctgagttgctaataaagtaaataactaggtgtaaattttccacttggaaaaaggaagtgttgttacctgatgttcagctaaatcaattgcaggtaatgggaactcacaaaagtcacatgtgacaatcctttgggggcagttttcacctttatggacagctagtatttctcgttgcattgtctcactacatagtgaacaagctacctgctttcagagaaatgtcaaaacaggacaattttatgtggaaacactatatacatattatttagacaattttgaccaagaaaacttgaccttggtccttcacaagttctcttttttcccaacaattgaagtatttaccacttaataaacaggactccagtaaatgatacataataataaaatcacccaccacatacacatgaacatgtagatttgatttgctttgctcagtaaagctcgtgaatcagaaactggcagaattatagaacttctggcactactaaccaaaggaaaagaggtagccaaaagaagacttccaaaatggaaagtaggcatagaaacagaaagaacctttctaagtgaattggaactaacaattgtgcaaaaccccccaagttactaacatcatgttcaatggatagacaagagtgtagaaactagaacatactcacataccggggcatgagtgttcaagtaatgttcctcagcatgccttcgcggaatcatatcaccacaaactttacatctttcaagattgcgggagcaatgagcaaaatgcaaatcaatatttgaagaagggatagctctgtcactgtatacatactattgagcattagtacatgtcacgtgaatcagtccacttagtttatctgaaagacatgtcatcacgcatagtacatgatattggacagacaagaaattaaagcactggttggttaagacggattacataatattgatatcacaagtgacgatctttataaatgaaacaaccaaaggtaacctgagatggagattatcatgttcaagacgtattcattgggatagatgcatcataaaacacacacacatgcaggctcgaaacaaaaagagtttgaagttaattatcaaataagtattagttcaacaatgcagggggcgagcaaaga

SEQ ID NO: 224540 - DNA, 1159 bp, Cannabis indica
atttgaagaagaaaaaagtgcagtaaataatcaaccataacttgaggcaacctcaaactccaattagcccaatcaccattattatctttgagtttaccaataaatttattacaacgtcgattagtagcataagcataaaaatatttactattattatcaccttcttggagccaactgcttcgatcttgttgtacataagcttcagccaactccttcttaccttttttataattggtaatcactcatcatgccttaatttccactgatgcactttacttttacactttttttatcctgtctttaaagttccccataacctccttcccccaaagattcaactgttgcccacaaatcttgattttttcttgcacatcagttacaccactttcatcccaaccatctttgactatttggtaatacagatgagagtttttgttttaaaatgtttattaagtatctctaagaattattataataatattatattatcatttcatatattaaataattttttttatttataataaaataataataataaaaacgagagaatatatttgccattaatagacattctttcttagtattttttttttcactccaatagtaacacatccattaaatgatatctaaaatagatttatgtcatgatcaaacattttgtaaagtattctcattggagatatcctaatgccctaaaaatgaatatttatgctaatttataagttcttcgatttttttctgtttttcgttttttaatcctagtctattgtttgcatttatatttgacaaaattattaaaaaaaaaatagaagctatatatatatttatatattaagttgttcctcaaatatatcacaacacaaaagaatatattgttggatgctaaattctcaatttaattctgtttttaacatgaaattaactgcctttcttgtttaaaatagagttatgaatgatgatatgtacataaagataaattgatgaatttgattaataattgttgttgactgtaaaaacttgttaaagaaattagagttagaaaatcaatgcaaaatatgaagtatttagaacttattaaaagaaaataagcaaccttgtagaatgtatatggagtttgtaagaaattacacctataccctacactcaacaaaaacaa

SEQ ID NO: 224541 - DNA, 2864 bp, Cannabis indica
atctgatcttagtttactttactcataccttggaaaagacatttcacttagccaagtgctagtaaactacatcattgattatcatgtcagtgtaaatgcggtgcactgataaattatgggactaaaagtttgaaccatatgatcatgattatttttcactgtataacattataatcatgattgtccataagttcaagttttaatagaatgtatatattaaaattataatcacgaaagtatcatgtgaaccaagtaacataatatgatttctatctttcgtaataagattataccaagatgggtttatttagggcataaatcccaacaatgttaacttgggcgctggggcccagttctggctccctagaaatctcgtttgctccctgagatcatttgtatttttgttgtttctgataacgaaaaaaatgccaagagcacttttttcaggaaaatgattggaaatagctcaggttgacaaaatgtcaacctaggtgctaggcctagtgctaggtgtcaacctgagtatgggtccagtttctggccgttagatgaattcgtttgattcccagaaacactcaaatcttaactgttgatgaaaacagagaatatgtccgaaagacttctttggaaaactccttggaaatggcctaatgttacacagtgtcaatctgggcgctgggcctagtttcaagtcaacttgggcgctgggcctagcaccaagtcaacttgggtattgggtcctagttttgacccccaaacaactccatttattttttgaaagcactcaaatcttaaatgttgatgaaaacagaaaatatgttcggaagacttcatttgaactgctgatagaagtggctcaggttgataaagtgtcaacctgggcgctgggcctagcgcctaggtcaacctgggtgttgggtccccattttgtccttaaaacaattagcttcttataaatgatattttagtaaactaatataattactgatctaagagctcctccatttatgcatttcattcaagctctaaggaaacaattatagaagttatagattccatttctatgattaacactctcactcaattgtactagctaccgtgttcccaagatgtaagtatgcactaattctactggtatgcttataatgaacaagtcaaaggactcgtgcaatacagttaagcaagaacttagtcatctcaggattaagattattgatctaagatcaattaagtgatattcacttagaaaatatattacggtaagtttacgatatctttttcactgtgaatatcggtctaatccgatctatagccaatacatctaatctttgtttattttactcatgccttggaaaagacattccacttagccaagtgctagtaaactacatcgttaattatcacgtcagtgtaaacgtggtgcactgataaatcatgggactaaaaatttgaaccatatgaccatgattatttttcactgtgtagataatactacaatcatgattgtccataagttcaggatttaatagaatgtatatattaaaactataatcacgaaagtatcatgtgaaccaagtaacataatatgatttctatcttttattgaacagttaataagattatctcaagatgggtttatttagggcataaaatcccaacaatgtcaacttgggtgctgggacctggttctagccctctggaaatctcgtttgctccttgagatcatttgtatttttgttattttttatgccaaaaaaaaaaatacctagaacactttttttaggaaaatgattggaaatagctcaggttgataaaatgtcaacctaggcgctaggcccaatgctaggtgtcaacttgagtactgggtccagtttctggccgctagatgaattcgtttgattcccggaaacactcaaatcttaactgttaatggaaacagagaatatgtctgaaatacttctcagaaaaactcattagaaatggcctagtgttacacaatgtcaatctgggcgcttggcctagcaccaggtcaacttaggtgctggatcctagttttgacccccaaatgattccatttatttctcgaaagcacgcaaatcttaaatgttgatgaaaacgaaaaatatgtttggaagacttcatttgaactgctgatagaagtggcccaggttgacaaagtgtcaacctgggcgctaggcccaacctaggtgctgggtccccattttggcctccaagttgatccgtttctccttcgaaagtacttgcttcctcgttttgaatgaagacgaagaaaattctcgggtataattctttagtattgtggttggaagtgctccaagttgacaatatgtcaaccttggtgttgggtgtctggggtacctggtgctccaggggcttaaaactaaaagtgctctgattttgattctgttgtctcaaatatgttcttggcatgtctaattcttctgacagtataaagtttgacccattggcactaagactggttcgaaaacctaaaccctatgagggttgtcaatctgggcgctaggcacccgggttgacttctgggttgttgctttgtgtattttcaacttccaggccttgaatttagattcttcatgtctatgttacagaatactgaaagctagtgagttggaaactacttagagggatccaaacaaccattttagagttcccagagtcaacttgggcacagggttagggaccccttccaggtcgactgccataattagggactactcaactctgagatgttttatttcttgacacatgtcaaatattgatgtccacatcaccagagtgagtttctgggtaaacaattactaattacaactatatttatttaa

SEQ ID NO: 224542 - DNA, 1272 bp, Cannabis indica
aattattttttatactatcttacatacatcctaatataagttttttagtgtgcattggatgctagagattgttgcgccagggaaaattatccatttagaccctatacgtggccacaaagttccctaatataatttttttcttaattactcttgatgtaacaaattttttaattaactaatgaattgaaatgttaatataatttttaaaatagagcataccagattataagggcatcaaatgcgtaacttgggtcgtggccaggaattgcactagcaaattgtccaagacaacctaaaaactaagaatgtcgttttttatattttgaaatacatgactgacatcgtcgtacatgcaaaccccaacctttatatacaagatcaaaaagctgtaagttttaattattaattatagcatttattatattaacaaataacaatatatatgaaccaatataaatttttacttctttttacattttggagaaaaatagacatacaatctaaaaattgaattgttaccattcctgtgcgagtgtatagaacgattgatgacgatgattcatgaaggcttggacaaatgatgctgaaaggcctaagaatttttcttccttagcttatttttttaagttaacttctagatttattaaattgttaatacttggactaagtttacaatatttgtgtaatatataattgtaacttatttaatttctttaatttattttgaagtgtgaatgtcgtatgtgaaatgggagggaatcatcaatacatatatataaagaagaagtatgagacagtgatatggcactctaaaatcactttaaatatatatatatatatttgttctctcctcaattctctcattattctaattttttataattaaaaaaaagttaaattaaatatctatccataataatttatatatataaagatgttatattattcatatgattttttcgtatctaatcatattatattctttaattcatatacatttataattattataatcctaaaccgtattatatattctaattaagttgtattattcatattattattgatgctaaaagagatcaaaactattaagctgcttctaactaatggaggtatacgtatggtatgtaaatttactcttgaatcttaaatactttaatcaatcctcttgagtcttgaatacttcaatcaataatttagtcatcattgttaaattgatgattgcaattgttgtatatggccgtgccccttaattggccaagggtttccaaa

SEQ ID NO: 224543 - DNA, 3794 bp, Cannabis indica
atttgttgagtatttatagtgcttagaggtcatactagttacctttccctctaatggggagtataaataaaatattaactttaggctatttggtgaagcccagctcatggggtgccttgtgtatgctgatgtggatgccacatcaagatattggttgttaaaatcatgtcttatcttcgtggaaattaatgacacattaattacttgattgctaattaccatctttccttatttagaaagatatgatcttctgtctgagattattagaatgcaatccctaatcatacatgatctggtaacaaataaagaaaatgtactgggcttccaaatatgtgctagaggcttcatctgggtatgcgattttacctcttctgcattaaccatgcaaaataggatctcacctagatgagttatttattcttcattcggaaggattgatgatttatggattcagcccaattatctcaactgggcatgttttgggccttaagtatttaagctatatttattataagtactccacgtgtccctaactagaaatacggataacatttacccccaagcttctggaattctaggaattgcgaaggcttgctccatactacatgaatggacacatggaggctataggtgaaacttttaggaatttcaatttcacttcaaaagtttttgaaagctttccattttttgaattaaggcaatatgtggcatcacttcattggttcatgggattaacaatctctgaggaggcacttgaagtagagcttattaaactggcagctggttatttcggtgcgagtctcgaggataatattatcattaagatttccttggttcaatatattgtattaaacgtttaaattatggcattcacgaattgttggacatgtttagtgttttctaaaaattgatatttgtctttcatctaaaaattgtgtgaatctctctttttgagtataaatatagtgaaataccatcgtttatcacttatacccaaatttcaaacaagacttgagttttcagagacgactactcaaacaattttggagtagtacattaatttttacatcaatcttcttcttcagatcaatgatcgtgagtatccagatgcaccacccctagttattgttcttgagtctcagacgttactaatgaaactagatttcaacgacatgattgatgaactgattagtcatgctcatgcgctccaagatagatttgcacaccttgatcaaaaatctctaccaaagttctctttagcgccctcatttaatgtcaacattttttcgccaaggccttatttcctttcgagtttgagaccaccaccagctcttcaccaagagactttttctctttttgaactttttgagtcttgataaatgcttgcaactgatattttatttaagaactacatgtgcattatctgtcatttgaagagtagaacttaggcatgtgactgaattctgaatgtttagtagaaatatgatactatgtattgtcttgaatagattctgcatctaatgagaactagatctcttgtgaaatttcttttgggaaaatatccacattgtagcagaaacgctagaaattgtttttcttcctctatccaaaacccttctggttctggatgatatcttcccttcgattggccttcattattcccaatttgatcatctagaatggatactctgttagagttttgattctaaatgtaagatccgttggggacctctccaagtagttataagggaggactatgctatatccctgttatcttctttagggtgaataattaagttcttggtgtttttcttacttattcttttcagaatctaccatgattaaaggcgatcaccatatggaagttgaggtagaagaggaagaagttattgttgagaaagattcagctccaaggatagtgctgaattcatctcgctgggagatggatcagtacaaaaacaaattctagaattacaataatctttagaagtaagagaccaaaataagtcttcaaagtgttccagtcctattttggaacagactcttcattcggggagatgtgccaagcaagtgtgctgaaaggggcttcagcatctggtgctaggcccatctggaaatgagagcacatcttccgctaagaagctactttgtagaattatatgcggtggctggagtgccgccttttcaattcatcccacaagtctacaagttgctaacgggatggtatgttttgtgcgagctacaaaaggtggaagtccccagtctagaagaaatattgtacttctacaagattgagcctcagaatatgcaaaaacacaaacaaaagattggcttctatagacttgataggaactccaaatctttggtttttccctgttagcttcgtgaagcacacccacgacttctgagactactggttttatacttccagtttctcgttgaagatggttccaactctcacccttgactttaacactgtgagtaagtgttgtcgttcactctgtgtttcttgtttttattcttttcctttttgtattgggaatttgataaagtttatcatttttttatcttttactccatacctcgtctcgctgctactcctgtcttggagatgaggcaagtcctgtaccaaagcctcacttctaaggacttaaaagtgggacaccttgtagcgttagtcaaccttaaggacgatgctttgctggctccccatcgaagcatcaatgcccttcaagtgaaggatcaaagtaaagattttcaccacagaggacctctaagctaaaggaaatgattgttgaaatcattgttgatgaggcactgaaagccataagatagaccgagagaagctagctgactggaactagagtcattcaacaactttgagtgaagatgaagagctccagattcagttcgacgctgtagtctggaacgagagtactctgggattgagtacatatggaagaggtaagacacccttccatttatttcgtgttctgcactaggggaatttagatcattttgaccgaggcagattcgacccttaaatttttgaacttagatcgcagtagatacccagttgttcgatatatcgatagggtagatgaaattgttaggaatctgaaccatttcattttccctacccaaacttttacgatagaatcttttctcaagatgaagtatccaagattcttccaatatgggagcctcttagacagggaagacattttcctatttgctaatggggacccttaatatactagaattatggtctgaaccatacgtgagcattcttttaattttatgcatgctttttagttgcttccatgatactaaatttgagtttccttttgtagaaaacccacacttttcaaatggggctcgtcgacaatttcatgggcaatatacttaacgatcctttaagatgatggaggctgctaaaggtgccaagggcaaaaggaaagttgggaagtcttgcaaagctgatgcaaaggggccattacctttgccaagggccaagaggtcattttttaggattcagcttaggaaactatctctaactctcaagctcctgaattttaacctccaacagttgaggtggatgtcccatcccatggggaacttatggaagctgcgcggtggaacccttccaacgattgccaattgtcatcgacgaggaggaagaggaagatgaagacgagggacttgtcttcaaaaatcataagagatctaattccacccttggtggaaatagtaaaagaagtaggacaaaatctaaacagtagcttcaacaattg

SEQ ID NO: 224544 - DNA, 1717 bp, Cannabis indica
attcgtctaaatgccgaaacaaataagatacatcggtatatcttttttaaaagagtgcattatagagtagaattgctaaaaggcactacgggtgcctatcaccctcctcggtatcatactgctattggtgtaattaagtattatgtcccatataatttttaaaaaatattgctaatcatggagcgcctcctatagaaagaagaattgctaaaagataccactggtgcctagcactctccttaatgtcatactattattgatgtaattaagtagcatatcttatataacttaaaaaaataactttcagggaatatcgctaactaatcataaagtgtcaccctataaaaagtactcgagaacactaatacttaataacaatactcttatagaaagtgtccagcaatactaatcccaaatagcaatactcattatataatcacccttattttgttttcaattttttttatgaaaaaaaccatttctaggtgggacccaaaagatgaggcagactgacttagttaagattaaaataataatattagaatttttaattaatttattattattaaaaaagtgggacccaaaagtggagaccctattaacatcacaccactctaaatgtggcaaaaaagagtcatgcacaactctaaatagtatacagagccatgcaaaagcttgccgtttccaaactttcgccatttggggtaaaacgctctctatctcacgcccttttatcttctcatcttcactatatttggcaaccctcacaccctctttttccaagtttagaacaaagaagaaaacccattaaggggttagattagagagatataatatcttcgagaaagattggatttttgattgaaagtttggatttttatttctgggttttgagttttgatcaattttgttatctgggttttggttttctgagatgggtaggggtaagattgagattaagaggattgaaaaatgtctaatagcagacaagttactttctctaaaagaagggctggtttgcttaaaaaggctcaagaacttgctattctttgtgatgctgaggttgctgttataatcttttctaatacagggaagctttttgagtattcgagttctgggtatgttttttatttatttatttatttattcatttgatacaggtgtaattttttttttttttttttttttttcattttccttattgagtgttttgcatgtttgtattttaatcattaaacccatttgaatatacactctctttgactctctttctgtttcttaaatgtttgtgaaaatgttttcattaaatgaactcacatggaaaatgtttatctgggatttgatattctgttaccccttaaaggggctatttgtttgaaatggtcttttttcaattcaaaatgcaacttttaagaaaatggttttttttttttttgtttttcttattatcttggtgacactctattagtggcttctccttaataggtctaaatctacattgttaaacattatacccctttttggtactctgtaacaaattctcaaaaatcattactttgagtggtcttttaagtccatggatttatctgagttttcttatcctaaccatttttatttttattattatttattattattatttatgattgttgttgtgatcattgccctcttttttatgttttcattttgttctggtgactacatggactcatgggac

SEQ ID NO: 224545 - DNA, 1418 bp, Cannabis indica
caatatgaggggtacctgagttagtaaattaaaataactaactcgggagctaactggacatacctacaacatctaacatgtcactagatgatactaacaacaacagtacccaagttactaaaatctcccacacatattgtatatggtctaaaaatattagagcattagagcatctctaatggagatgcaaataagtgatgtaaatgtaaaatataattcactttgtcaaaagtctactttaatagtgtgctaaattatgatgcaaatatcttacataacaaaaagtgatccaaatttagatcacaatgtagcatgatgtaacatttgtatcacaataaatattatgattttatatctatcgttatgccatttttaatattttattgttaaaatttaattagcatgcttatttacattaaataattttcataattattattattttattattaaattttatatttacttttgtatgattattattattttatatttttaataagttattagataaatattaaatggcatattaaattttacaaggtttgcaattatatattggagcataataataaaaattgatgtaaaatatcacaaaattattatttgtaccaaatataaattaacttttaatggtcttataaatggagatgcaaataatatactccaatagtatgctaaaacgtgcaaatttactatgttacaaaagttgtatcacaataaatatattattttttatttacatttatgacatttatattattttattagaattgttaaaaagcaccattggtgcctaacattctgtaccttattaatgtaattaaatattgagtctcatataaataatttttagagaatatcgttaacaaattgtgaggtgccacttatagaaggtgatgggcaccactggtgccgaatagtattgctcttattttattattatagttaactataatattaaattataaagtatttatattattatttttatatttttatatattaaaataataataaaattgatgataaagttattagtttttacatttttaatgaaaaattaattaaattttaaattaagtttttcaataatagattaaagcaaaatgttaaaaattaatacaaatttattaaaaagttattttttatgtcaaatataacctaattttacttctaccattggatatagtcttagctgaacataaaatgtggcatatttattttaataaaatcacaccaaacaccaaacatagtttttattcaattaccaaaatcttatatcacaaacttattatttttatttttttttgggttccaaatttggtggtggtctaagtggaacacaaaacaataggtaaaggtaataaattcactttatgttacaaacaagggccactgattaggaagttgactag

SEQ ID NO: 224546 - DNA, 1610 bp, Cannabis indica
aattactaacccaaacctagcagctatctataaatggaaagttgagcttccctttcctctatatatagctgccctcttctcttcctctttgatcaacacaatacacaagagagagagagaatttcgaattccctagtgagagagtagtgcccacacacagcaaacagtacctcaatcatagattggaagattgtgaaggatcacatccaactagggttagagatctaagtggaataagacacattatttcactgcacccactgtaagattttcttatctttatatgtgttttctttttatcattttagaagttcatatttaatttgttaatcaagatacttgtgagtagatctaagatcctggtaaaattaattccaacaaaaagaagaagtgtttaaaaaactggagttccaagctcttagttcgggtcttctgggctggtaggatctggaggatctgtcatttgaacgggaggtacatcagcattttggccggaggtagaagtagccgcctcggttgcaccataagccacttgggaagcacagaacttgaggtacatgtccttagcaacacccaagtagtcgaagtttgcctgagaattagccttccaaaagtcatagaagagcaagactggctgtctccaaggcatgaactttctctccaagcctcgtcacctcggccttaagctcctcctcctccacccgacgaagaaccgctcgaagagaagtcctttcatcttgaaggttgttcacttcggcagataaagtctcgatggtctcttcaaatcagtttgaagcctcgatatccttagtcagctcagctattttcttctaggcggtgaaaagcttcttgttggcttcacccagctccatccgaacagctcccagttccaccctggcttcatcagcgtccttcctcgccaagtccacctccgccctcatggtgttggaaaaagccacgttcttggaagcaggagacttagcccgggagtatgtgtaggccaacttcagaccggcctccacagagaaaaaactttagtatttgagccaagtaaagaagattaaaggaaagtgtcaagaaagacttaccctagtgaattccttcaagactcctcccatcaacagctccagagaagagtcgttgtcagtgccggccagttgctcactaacctcaggaacaaactggttcatatagtgggcgagcatctccttgtctttcttggcctctggaagcaccgacaaaggtggagtaggggcccgcatctgctcgggtccactcttcatcagctcatacccacctttcggctgttcaggcctttccaaactccctcctcaagactccttggacatagcaactttcggagtagaggggtttgcaatcattagctcctcgaaaagatcaatgacctccccgataggcgtcttttccttagaagaggccccctcactgcctctagacttcttggctggaggagatgcgctggaacttccgccaattctcttcttcagagcattaagaatcttctgagacacgtctgcacggaacaaaaacagcatggtaagagaaaacagccctcagaaaaataaggcataatagtcaagaagcttaaa

SEQ ID NO: 224547 - DNA, 3320 bp, Cannabis indica
cccagctcgtgacccggcacccgaaatggaaccagacaaggacccgagatcgagatccagatcaggacctagggcttcgaccgaacccatgtcggtgtttggatttgggacccagccccggacccgaacccaaaccaggacccgaacccaaacccagaccctaacccaatcctagagccaaacttggacccgaattcgtaccctgtgatctgaaatttgaaccaaaactagaagtagattgggacccgagaacgggactgaaacaaggacttgtacctggacttggaaccgtaactagacggacctagactcggaaccgtaactagactaggacctagactccggccccaacctagacccaaatcgggacccaaactcggatcccaaccaagacctggacttatgacccaaacctagaacccaactcagacccaaacatggaacaagactcgagacacagaactggggtaagggcctagaatcgcaccccagtctcggtcccaaacaagtactcggacttgggacccgggaccaaaaccagaactagatcgagacacgtgacaggtatccagatttaggactcatgcaaggactcgaacccagaccaagacccaaacccaaacccgggacctaaaattggaaattgtacaacaacttccaaactaggaccctcgaacaagactaggaccgtgaccaggactctaacccacacctagaatcgaactcagacctagccccagacccaaactaagaccgaaactcgggcccagtcacgatcgtgtacccagaccgagaccgacacccagactcaaacctggaccaggacctagacctgggaccgaatcctagacctagactcggacctagatagggatctcgatacgaacctggactcgaacccagacctagacccagatcgggatcaaaacttaggacctaaattcggactgagaccctgactaggacccaaaccttgacccgcacctgggacctgaactcggacctgacccgaacctagacccaaactgggattttgacctagacccagactcaaacatagactcagaccaggactcatacctcaacccaaaccccaacccaaacattgaatcgaagtcgatactgggactaggacccaaacccgaacatggacccagatcgggacctaggacacggacctagattgaggacctagacttgggcctcagaacataaacccagatcgaaactctggactcgaacccgaacctggacatagactcgagcccagatctggacccaaacctagatcgaaacccaaaccaagactcggaccgggacatgaaccccgatatagtcgtggactcaaactgggacctaggactcgaacatggatggggacctagatcgaggacacggtcatcagaactaggactgagacccaagccttaaccccggactaggatcctgacctaggacttggaagcagaaccagaagtggaccgggaactgggaacaagaccaggggactaggacctgacctcgatctcggaactggaatctaactaggaaccagacccagacccaggctgagatggcgacccgaatcaaaactcggatcacgactcaggacactaacccaaacccagacacgaacgcatgacccggaccgggattggagactcagacctagacccaagtccctgacctagattggggacccaaactcgaaattagaaccatagacacaggactaggactgggacccaagacttgagcccggtctcggtcccagacccgttccgagacacggacacggaccaagaaccaagatctgaattggacctgaacccaaacccggacctagacctagaccaggactcggacccatacccacactcgaaccttaaatcgtaccctgtgaccccaaattagaaccagaactttaagcagacccttaaaccctaaaccctaaaccctaaactcttacccctaaaccctaagccctaaaccttaaactctaaatccctaaatactaaaaccaaaaccctaaaccttaaaccctaaccatgacacgagcctagactcatatccataccgggatcagaacctaagacccagacctggacccgaatctagacccagacccaggacctgaacccgaaccaaaacctagaccaaaacctcgtctgggacctagaccttgactaggaccaggatcgtgaccccgacccagacccgaacaggggcctcgactcaaactggaactcggagccagacccaaacctgaatccatactggaacctagactaggacccgaactcaggatccaaacccaaacctaaacttgaacctaaccgggacctaggatccgaacctagatgggggaactgggcaaacctagacccagacctagacaaaggatgcagacctagatgggggacttggacccgaaactaggccccagaactgagactgagacccaaaactcgactccagacacgagacacaggacccgaccctggacccagaacccaggacctggataccggtacacaaccccgaacccatacaaaaacccaaacataggacccgacccaagacccgagagccaaactggaacaagaccgagatctgaatctagacctgaggcttcaacctgactcgtagtcagtgtttgaatccaagacccagacccaaatcccagacccagaatctgaattgaaccaggtctgggactagaacccaaacttgagatagtaacaagacccaaaactaaacccaaactcatactagaacacataccgggacttggacccagactgggaccggtgacttgggacctaaaccaagaccaggacctggtcccagaccgggacccggacccagacccagacccaaacccacacctaaaaactggggtcagacccaggatctaagaaccagactcagaccagggacccgaaactcggacccacactaggaactggacccgaacttggacccaaacccaaactaggtcttggactcaaaccgatactcgagacccgaaattgaaccgaaacacgaacttggacccagaccgagacctaggacctaaacatagatgggaaactcagacccaggaattgggcccccaaaccgggacgagaacttgggccttggaacttggatcgggatctgagaaccgaccccagaccccaatttggacctacgacccaccacgggacctgggatctgggactcgatgcttggacctgacccgtagtcggtgcttggatctgggacttagaccagaacccgcacaaaaactcgaagtcaaaccatgacccgatcacata

SEQ ID NO: 224548 - DNA, 2472 bp, Cannabis indica
ttaaacaacatacttgtgagtagatctaagatcctggtaaaataaattccaacagttccttgggtcactatgacacacccaaccattcgtgacatgcagccagtttttcatttttcttgctttttagttgcatgttggagttgaccagatttcttaaaatggtgggtgtcccagtaactctatggtcatgctaaaaacgcaagccccttgggtcactgggaaactcccaggcatttttcgagacatatggttagtttcacatgtgcgacttacaccttacaggattaactaaattctcgaaatggttggtgtgtttgaataccttaatactcatgaagcaacatgatcattaggctattgagatacacccagccatttcttgagatgtttggttaatccttcatattttctaaatttcttttatgcgggtgaggtcactggtgttactcttgcactttcactacactggaaagatcttctatctttcagatgagcaacatgtcggatagccaaatgcttgcctctggaggcgtggtcttcgctgatgaactggataagagcgaaaaatttcatactacctcgatttatgaggaggaggttcctgtcgacagggatgtgcggctaggttcactgtctactgatgagatatataggatggtttaggaacttgttgaaccaaggaggattgagattcgcggcagtgagtctacagtgtctgcccaagagtatcttagtcactggaggcatgccccggacattgacgtcaaagaaatgggagaggacttcgagctgagaaatgatatggccaagatattctacttgcttctgcccgaaagagcactttttcctattagcatagagctggtgcttacgtaggagagcaaaaacttaagaaaaatgttgcggatggagttctagtgtcttgttgtacactaaaatgtcataaaaaataagcacacaatcacgtaaatgggggcagaacacattattcatgagtgactgaaaggtaaaggagcatttgtgagaccgaaaggcataaccaaaagttcatagtggtcatcatgtgtttgaaatgtcgtcttatgcacatcttcctttcttactcgtatctgattgtaacctgatttcaaatccaatttagaaaagatgagagcaccatgtagttcatctaacagctcatctataacagggattaaatacttatttggtatggtcactcgatttaaggcacggtagtcgacgtaaaaacgccaagagccatccttcttcttgacaagaagaattggacttgaaaaagggctggtactaggttgtatgaagcctactctcaagatgtcagagatgaatatttctatctctattttttgtgaatgagcatatctgtatggacgaacgcttatggggccagagtcaggctggagtgtaatggcatgttcatgcaatcgtgatgggggaaggctcttttgcatataaaaaacaactgtgttttccttgataatttcggccaaaaattctggtatagttgggtcgaactgtgtgtcctccttgctatcagcactcagctccaaaatgataccttgtttctcagcttggagagtcttaatcatagtttttaaggagatcaaagatcgatcaagagatggttcccctttaatagtgacaatcctttttcccagttggaactccatggtttgcaacttcgaattggttttggtggtgccaagtgtggtgaaacactgtaatcctaagataacatcagcgctgcgcagttgtaagggtaagaaattgtcccaaacttccacaccttggaaatgaatatttaagtttttacaaaccccttcacatttcagcgagtcatcgttgcccattgtaaccacatactcctttgtttttgtgactggaatggccattgttgccactaataatttggaaataaagttactggtagcccttgaatcgatcaaaatgacgattgttgttgaactaaggtgtcctttgagttgcatggtggaattattagataacccaacaattgattggaaagaaactaacatattgtgttgcaattttgttgattctaattccactttttctttgttgtcttcctctgattcatggtctgagatgatgttgtctatgttcttcggaatcataataacttttaattatggttttttgcatcggttgcctggagaccatttgtcgtcacaacgaaaacacaatcccttttggcatttgtgcttcatttcagaattagtaagccttcaaaattttcagtggtagaattttccaaatgagtctgagctaatgttttctctacccttgtgggtgactccagtactagcaggcaatgggaagatgagtatcgttgtcttgaggctttgttgttgtcctctatgtcttaaatgatgtccatggtgtcatccacattttgtggtctctgaattcacaattcagctcgtaaagatggca

SEQ ID NO: 224549 - DNA, 2128 bp, Cannabis indica
tctcaccgatatgaaagtgccccagacattactctcttcaaggtacagtgataacttgttttatgtttttagctaatattttggatgtcagttattaatatcatccaggacatgctatacctggttttttaagttctggtatttccactttcattttctactattaatgcaatactaaataacaaataatgctttctagcatgatgctcgtgccatgtatgttgcttttgttcattttctataacaagctagcaaatgaaataaactatgaaagttttttgacacgaaaaggaatttaagggtgtttagttttctgattttttagtaattggagtttattgttgccgtgtttgtttcgtctctaagaaacacataaaatttcttgcatattttggattttctatatgtatccacaatactctaactctagcaaggcttctgttttttttctctttatccttctaggcccttctttctttgtgttctgatgagagtgtgtcggccaagaatgcaatggacttgtgtgtcaatcagatgaagaatgtgttaagctctcgacaattgcccgagaatgcatcaatggaagttattggtcgtgcttactatgccactgagatatttgtacaggtagtcctttcacggatcaccgggttgtatgatggtgtatgttgcttattgcaagcatgtcgccaagaaaaggagtcacttatttcttttattgcgaggacttacttttttcattgttatcaaatgctctagtgttttcaatgtagttcctttttgtaattcagattgaaatacttttcatgacattttcagggtcttcaatatgctaaatccttgctgagaaagacagtgggagttagtgatttttcaagtaattctgaaagaagcagggatactgatgatgcatcttcagatgctggtagttctaccatcggcagtcaggcaacagatgagctatcagaagttttatcacaggcagacatttggctaggacgttctgagctacttcaaagtcttctaggctctggaattgctgtttctttagatgatattgctgataaagagtcatctgctcgtctccgtgacaggttgattgtggatgaacgatatagtatggctgtgtatacttgcaagaagtgcaaggtaaatattctacttcacagttattgcgaagattaacgctgaatgtttttttattcatgttcatattttaaaaatacccggttctctccagattgatatattccctgtatggaatgcatggggtcttgctttgattcgtatggagcactatgcacaagctcgggtgaagttcaagtatgcagcttcttttttttttgcataaaatgtttaagcttatttatcaacatttaggaagatgggggaatgataaccattctagattctcaatgttcctctctcttttcctcatttctttagaagagtttatgctagatctataattcattacttccttctatggtttcaggcaagctttccaattgtataagggggatcctgaacctgttattactgaaatcgtaaatacaattgaaggaggtcctccggtggatatgttatctgttcgttcaatgtaagatgatttacagcttctagatcatttttgattagttttatctttttaatattaagttataagcaatagttactaaaccaggctagttaggtattttttttcctcttcttaattgtggcaataataccaaatctttgcttagtaattgtacttatattaaattttttcgacggctctttgcagttgattgcattcgtttgtaccaactgctaagtgatgacgtagttattaatgttgccatgcgtaacgaaaatttagtattattgctgagatatctatttaataatttataaaatcaattttatttataaaatctaaaatcctctttaacatctttttaaaaacccgtgaaatataattttctttttgaaaaactcaattaacaaaaatggaaccaaaacttaaaaactaaataaaacaaaaatttgagggattgctagaatatttatccaaatgaattattttgacaatcaaaaaaggttggtgtttcttgtaatcaatttagactttctttaggtttttttt

SEQ ID NO: 224550 - DNA, 1084 bp, Cannabis indica
cctcaaaggaacatcaaacatgaatctcatgtataaatcatgatcacctaagcaagaaatacatgactatgttgactcagattctgcagggaatgttttcaggtcttaaactggttaacttcttatcctaaaccagtgtacaataagttggaaagctaacctaaaatctataatagctttgtccaccactaaagtagagtatattccttgtacaaaagcaataaaggaagtaatctggcttaagggtatgagcaagagaatggacattgatcagatatgtatcacaatttcatgtgatagttaaaagttccatccatttaagcaagaaccaagcgtattgatgtttgactgcacttcatcagagacatacttgcagaaggcgaagtaaagctttagaaggtagcatcaaaggacaacagatctgatatacttactaaagtagtgatagcaataaagttcaataaattttgagattaaattggaattatagaaccggcgtagtcactaccatgaggccaacactaatgacaacaaagataaaaatctgtgagatgattgttattattgttggtaattgatagttatttctaactatcatagtctaattaggattagttggcagtcaattacttgtaatggctaagttcctaatatataaaggacttagtctccttcagttttgtcaattcaattcattaagactaaaatatacattataaatacatagctattgtacaataaaaattcaatacatattttcatatgtaactctctttttcttttgacatagccatagttatagttctgtccatgaacttagcccccttcttccctttgcagcatacacacacacacaaaatgatgttttttaatgccaataaaattctgtaaggtgtagtttcgtatggagagaaaactatctattaataattattaaaacatgaaaattgtagttattgatcaaaactaaaataaaaaattaaggtgtagttatgtaccatatcctaaggtaaggtcaaccaagattattgtaataaatacaccaatccctctcagtggagaccatgaatatatatatatatat

SEQ ID NO: 224551 - DNA, 2400 bp, Cannabis indica
ccgactccgagagagggggactgggctgggtcgtgcgtggtcggacggtggtcggaggctgctgtaggtggtggtgggtggtcgtcggtggccgggcgtggtagggcggtgtggtcagcgagaggtagagagatggtggtgcgtggtcaccgagagggagagagagaatttttgggatttgtttttcaaatgggaggggtattatggggaaaaatcaaatgtagtcatatatgggcaattttaaataggtatagatttaggaaaataattttagaaatttttatggatagtttttcaaatttcccttttaatatttcataagttctttgtgtatatattatattttttattaaaaaatattataataataaaaaatgaattttttttagtgtgaattttagtgatgtagttagaataaaaaatatagagacacattagtactatatttttttttatggttcatgtacattataattattttaagagttcttacaaaattttgaaaaattcaagaaaatttaacacacaaaaaaaaaagttcaaattatctgttgcattgtagaagcactttttaaaaacttaatgtaataataagaaatattttttaatgttatagttagagtagaaatagtttttgacatttaatttaatgatactgtgacactaaatttaatgtatgagttaaagatactctgagtatacccgtaacaatatactctatgaatataaatatatgagaaatactaaaaggcaccggtggtgtcaaacaccctcttacgtgcaatattgctattggtctaattaagtatcgaatctcatatagtttaatataatagcttttagagagtatcgctagccaatcgcaaagcgacacgtcttaagagtagtagacaccattagtgcccaataacaatattcatgcaactagactttagaaatacatgttgtgtttagggagcctaaaaaattagtttttcaacacgaatttatgtcaaattctattgaaatctgggtaagtaagactatatatttgatttatattaacaagcctttactaaaaagaaaaaaaaaagaattttagtaatttttttatttatacttcaataatttcattaaaagtcacaatattttgaacttttgatgttgaatatacccttctagaaaatgtacatatatacactcaaaaaaacttaacaacgtaaataatttagaaagaaaaaaaattatttttatattaaaaaatactattataaacaatagtaaaaaataaaagaaatataccacatcataagtttactaataatattttaatttttgctttcaaataaatatatttaaatatttcacataataatatattgtattacataaaaaatcaaaaataaaagttaacaaactaataaactaagtttaatgaagagttttgtttattctacataaaaatataaatacatacattatatttttaaaataaaaaatgatttatttaggttttaaattttataaaatatcttatcatataatcactaaaatattaaagtgatgtttgattagcaggaatgaaaatataaaaataaaggtaaataccattttggaccatgtgttttacaaaagttaccaattggaccctctgttttgttaaatgacaaaattgaccttttattattttttaaaattgtacaaatagcaccctgaattaattttttgtccaaataaaacataataataatctgatatagtaatgttatgacaaaactgattacattttctgtatttgttcgtgttagaaattgtcttaaagttggttatattaaaaaataaaattattgaaaattgagctcagggtcctatttttattattttggaaaatatagagttcatttcgttatttaacaaaacaaatagttcatttgctaacttttacaaaacacagagtctaaaatggtatttaccataaaaataagaataagaataaaaatgacatttgaatattttaaaatacaaccaatcaaaaaagggaaatttgaaattgtatacttaataaataataaaattggacccctaatacaatactagacataatttgtaaagtgggatacattttcctaaaacccaattttgcccccctcatttcaaaagtgactctctctctcttcatcccctattctctcttcatcccctattctctcaacggaccgaacccactccaccagtcaccgcccactcgcaccaccaaaaaagctccattttccccttgaacgatgaacccaccaccgcacggagggaactcgccaccccacggaggaaacccgccaccccacggaccgaacccaacacgccacggtccgaacccagaccacgcgagcaaggtaattcgcctttcattttttattttttatg

SEQ ID NO: 224552 - DNA, 3611 bp, Cannabis indica
agagtgacatgcactgctacatactttctactttatgtatatagatatatagtatatatatatatatagatatatagattagtaattaatataacacttaatataaaaaaattaagaattaaaagattatttatatatatatatatataaaatgtgattatttaaccgttttagttggtttaataaaatattttacgaatataagaatatttcgttaaatttaacggtaattagtaaggttagatttatttatatatataaatattaatattatttatttgagattaattcaatatatgtaaatattgatattatttgttttaggttaattaaacttatatcaattttaaattaatttaaatatatgtaaatattaggtactccttaggtgagggcgtcacttttgctcttaaaagtaagagcatttttatagcttttgattctcaatctaatggtaataattaatttggctataatgaaatatcttatacaagattaataacttcttttattttaatttattttttaagaaaataaaagaaaaaaaatacacactaacaatacagtttattttcttaaaataaaccataataataatgatctcacatttgtaaatatttttaaactaataatacgaaaaataaaaatcaatacacatgtatgattttttaaagatggaacttatttatttacaaataaaatttatgtttctttgaaaggataatacaaaaaaagtaccctctgttattgttaaattctattgtggatcttttgttatgaaaaataacaaaaaggaccacttgataattaatatggtaaaaaaatgatcccttgaacatgttttttgtgaatttttttctttcaaaaagactaagagcattcacaacgggaaaaaaagcaaagaggggtactttgtcattaaaattgatctggtcaaagcctatgatagactaagttggaaattcattgaccatgtccttgattgttttggattcccagaaaagttccgcaattgggtttctcaatgtgtaaccaccaccaatctcaacatctgccttaatggtggacaggttggaaagatatcaccgtcttgtggaatttgtaagggtggccccctttctccctatctcttcatttgtgctgctgaagttttatcaagacttttagaggaggcacttacaaaaaggaatattcagggtattaggctgagtaggggtggcccggtcttatcccatatcttctttgctgatgatcttattctggtggggcgagccaatatgagcgaagttaaaagttactggagttgccttgagaggttttgtgattggtttggacaacaagttaataagctcaaaacctctatattctttagcaagaacaccccgaatggcatgagaagaggtatcaaggaaatcttgggtattgagtctccggatggggttactaagtacctgggacttccctttttcagagcaagacaaaaggatgctgacttcaacttcatcttggacaatctcacttccaattacaaggttggaaggcaaaaaccttgtccaaggcaggttgggctactctaattaaggttgtgggcccgtctctgcctaattatgccatgcaaaccactaaactctccaaccggcttgttaataggattgatggattagtccatgatttttggtggggcttcgagaaagggaaccatgaccttcaccttagagcttgggataaattatgcatgcctaagtctttgggggggtctagggtttcgaaaaactaaaggaatgaaccttgcttttctggccaagtgggggtggaaaatgttgaatgggtgtcagcctttgtgttgcaagatattggaggccaagtatctaaaagggaaggattttcttagttgcggctataaagattcggattcttagttttggaaaaatgttgtgaagggcaatgcagttttaaggaaaggggcctgtaaactggtggctagtggtagggatactagtatctagagggatccatggattcctcattacaaagagttcgttccgaaaccaaatggtaatggtctaacagatcactcttgtgtggctgacctattgtcacctagtggagtgtgggacgtccaaaagttaaacagactctttgatcaagagactgtttctgctatcttaagaggtggcaacccctcagggtaggggaaggatagatggatttggactttggaaagtaacgggcagttctcgtgcaaaacggcctacctgacacaggccttggaaagagcccctcactgtgaggttgctccgtccctgtggaataaactttggaatagtaaaattttggagcgacataagattttatggtggtgcatcctatcgaatgcgctccctgttagatctaaaattggaaggcgatttcagattgaggataatagctgtcccctgtgtgggttgagggaagaatccattgaacatttattcatgtcttgtgatgtggcgttacaattgtggcgatcctcgccttggggaatctaccctgtatgtgatactggtattccggtttgggactgggtgaaattcatttgggaccttaggaataggggggtccgagtggaggacgtatttctttatgcttcgattgttgttgacactatatggagggtgcgcaatgaaaaggttcacaataattctcctccttatgtgttgaaatgtattgaccatatttgtacttcttttgctgagttacatgattctcttttgcccaacattgctccgatcttgaaggagacctggactccacctcccttggattggataaaaatgaactgtgatgttagagtaggcttagagagtatgtgcgcagctgttgtagccagtaatcattgtggtaaggtgatgtgagttcacacgtctcggttggatttctcggatgcgttatgcggagaagctgtagcttgttgtctggctgtttcgattgcgctggagttaggttataagtatgtaattgtggagagtgactcgagactagctatcaatgttctcaatgggaaggagtcccattgggctcttgataactatgtctccttttgcttaaagtcatctccctcctttatcagttgtaattttaatagtattagcagaacttgtaatgttatcgcccataatgtggctaaatgggcgttcgcccatcatttgtatggttctattttgatatcctccataccggaggagctattatgtaacgaccgcgaggtctaactgtttttatagttcaatgcatgaatacgcttattttctcaaaaaaaaaaaagatcattcacaacagcttttttactctattctttaaaataactcactaaaatcttactttttttttattttacctcacacttttacattacaccatagatcagcttctttatacaatttttatctacatcattaaaataatatatttctaatacatagtaaataaattaataaaaatattatgttatacattatatataattataaaaagttagtaaacttaaataaagtagtaataaaataaataaaaaaaatttagctcactctctctccatatctacatgtagagatgcattttattggagtttg

SEQ ID NO: 224553 - DNA, 1605 bp, Cannabis indica
aattttagcatttccattcaaactcaaaacacatatacctacaaccattcttaagataaataatgcaaaaattagggaacatcctattaaaaccaatcaagacaagatttttggaagttataggtaatttttgcaagaaataactgagggtaaacgtcgtttttggcgagaagcgcttgcctgaaacccaaaatttaactaatattcctttagcgagacctttgtttgtacctccagtcactgttactttttcaccaggtgactaagattttgaaatcatggcctcgaaagctcaaaaatccaagaccccactattaccttcaaggcagagctcattgagtctaaagttagatccatatgagcttatgttggggaggtatgaagtcgcgtggtatcaagtatgagtgaggatgtcgagttaggtctgtcgctctaagagaattcagttgttttcctactgaacgtgtgattcgagaagaaagttatagtactagcgagccgtctagaataggcgcttggagcctcgaacacataagagatggagcagtagtccctcttaaagaatactacaaaaagttctgcaattacctcgaaatttctcccgtttagctgattccaaattcttacagaattttggccagcttgaaagttttatattaaattctgaagtgggagtgcccaaccccactagaaattttatatttttattctgtaaaagcctgtcccgcgaggaggcaaggagcagggggtttctactttctcgggacccacacaaatgatcaaaggatcattgtgaggttgcccaataagaccgaattcaaggatgacttctattggatgtctggccttgtccctatcaatacaaatacgtttcgcattagacgtaagtattacctcatctcaaaagtttggttttgagttttcaatttaataattgtaggcatttacttattttgtttatgttgtattaacaacgattacgaggaggcccattgtgactccaaaaattgaaagaaaacataggattcttcttggtcttcctttcgatctacgagctactgatttcttattacacgagaacaacttgaagacctccaatcttctcggcagcgactaggatacctacaactttaaagtctcaaaatactcaaactggcagtaggttacagttcctgctgacgaggaagagaaggattatgttgctcactcccactacttaaagaatgtaacccctcgggaagccagagaagttgcctcccgaggtaataattttggtatttgttgatggtctcctatcgtacttagggctgagcgcactacctttattaaatttaaggatagccagtacaaattttacatctggaattgtgtagatcgtattgtccataggttcgatagttggtatcccgagcatcacgtacaatgaagctgtaatagttctaattttgggattgtcgaacaatattgaactaactttgataggacgagccatctagattgggacttgtctcccctaaacatctttgatcttttcatgatcactggttctagggagtttagttggtattatagtttttcttcttcatcagatgatgattatggtaa

SEQ ID NO: 224554 - DNA, 1445 bp, Cannabis indica
ccaaacatatcgacatcgactgcaatattgttcgagaccaggtcactaacaaccggctcaagctcattcatgttccttctcggcataatgttgcagacataatgaccaaagcattgttccctactcaacacaaattccttttgagcaagatgagcatcatcaaatatctactgccaccttgagggggcgtattaggatgtccacatcacattctgttaatgttagttaggacaactgttatagttagttagaactaactaattgccagcttatatcagtcctctatataaatactttgtttccataactattcaacataataaagatttgattacactaatattttgctctaattaagaaaaaaaaaaaaaaaagaaaaaaagaaaaaaagaaaaattttctctttttaaaaaattggtagaagtttccaaagaaggaaaaaggaaaacaaaatccactttcaataaaaaagaaaacccacaacaaagacaaccaagtaagccattgaatgagttaattttttaggggaagtcgtccctcatgaaagatgatagtgtagtacagaaatttgttttgtaaagtacaggttaaattttagtaccgatcaagcccagtcaacaaaaagcaacaccaagggtaaaaccggaaactaaaatgattcaacaaatacattaggggccgggccctaccaccaccctcttcctctttcagcaactttagttacgaaattgctgtctcaccatctccctcggaaaatcctcccccacttttttttttttttaattaaattttatttgcttatcttataaataaaaaatacatgtcttttcttttcattatttaacccaaaataaatcataattttcacatttatatatttatataaataagaacgtctctggtgttcttgtctgttcggtactgtctaatggcgccgagcatcagagacctccagctcacccaactctcttccgccggcggtgatgattctcgtgaccttgaggatgtacggcttcttgatgcttacgacaattcttcgtcggaggacgaggagaagggagtccaacacgggacgatgaagcgaatccaggttggtgttaccggtatgacctgcgctgcttgctcaaattcggttgaagcagctctcacgagcgttaatggagttttaagggcttctgtcgctttgctacagaacaaggccgacgtggtcttcgatcccagattggtcaaggttggttgctctttcagaaaatatttgcttcctaattgtgttcaactgggtttgactttttctgtttggtgaatttggatcctcgtttagtattttgcattatgctttttcacttacataataataataataataattaaaattctgagcttgtttagatgtgttgaactgttagctcgtctttgatacttgattttagtactttttttttttt

SEQ ID NO: 224555 - DNA, 1114 bp, Cannabis indica
ataaaacccaacacatacatggtagtaaatctagatccaggtaaaacatattccaacagttagtaccgctgcttgagggctcgcttcattccattcggttgctgcttgatggttttgttatatattgcatggaggtcctgttcttctactggcagggttgtactccacttgtactctatctttggcttacgtggacatgccacgtcaagtagaaaaatttgggataacatttttccccaagtcccttctcgaacatctggtcggatagggacttcctagctctcgtcttgtctatagtatttgttgagcagcctagtctagccattcattggcttttgcatggcatgcttttggatctttgatcttctctctatatatacgtgtcatcttctcttcacgggtatctcttcttctcgaaggtcaatcttagagcagatagtcgttccctgtaactgatcaaacaaatcatctatccttggcaaaggatatatgttctttattgtcaacttgtttagttctcgataatcaatgcacatacgtaatgtctcgtccttcttcttgacaaacaaaactagtgcaccctaaggagaggtactccgcctcgtgaacagcaaatcaagcaggttccgtaactggactttcaattccttcaattcagctgcttccattctatacggggccttagaaattggctcaacccttggtactaattcaatcttaaatttaatctctctcttttgtggtaatcctagtaactctttcaggaatacatatggaaattcacatactactcgagcctttcacggttcctttggtatatcattcgtggtatccaacacactaaccacgcatcccagatttgaagacttacccactgaagaaaaatgttgtggatgctcgagcaacaatcgaatcgtcaaaaaaattgaaaattacatagaattgtggtgctttgggcatctgtcttgaaaaaatatgaaaaaaaaaattctttttattatagagagacaggagtgagcgaatgtgaaatgaggatttgtaaacaaaatgaaatataagaggaaatgaactgtaacaccctaactagcataggcgtattaagtgatttttaaac

SEQ ID NO: 224556 - DNA, 9285 bp, Cannabis indica
attaatttaattaagtatcgaatcacattataatttaatatattatgaaaaattaatatttactacccaataacaatgctctaataataaaaaggctaattaaaatttttgttccctaaacttttacatgtaccaaatcatgccccctcaactaatgcccctgaattattgagattgttggatttaaggacttttgtttaattttattcaattttactatttcaatgattgtttatatactaaatcatgctcccagactttgataactagcaaatcatgtctctcgaactttgacatgtactaaataatgttccctgaactttcatccatgttagacttttttataaaaattggacaaaagtccttaaatacaataatctcaataatttatggagcatttttaacgacattaagaattaagggcatgatttggtacatagaaagtttaggaacaaaaaactaattagcctaataaaaataaaaagtgtggccttatttttatttatttatttattttgaacaatactttataaataccttattattattttattttaaggagtaatttatatattttaaaatacaacaaatttccccccttgcggcctttgctctttcttcctcctcttcttccatggacgctcctccgcctcctccgccctcaaaatcaccagaacccactctatccaattcttccatcaccacggactgtatcaacaatgacgcccatgacatcttccctgaagattcttcttcccaatttccaagtccttcggtccaaaattcttctccttccgcgggatccatggaggaaaccccaataaaggtggccaataagcagaagaaaaagacgaagaaaagggctcagaatccgaaggaaaacgccgtagctcaaccatcttcttcctcttcttcttctccgcctcagagagtaacgcgcgtagccagtactcgccgaaaccctcgggtcgtgttcaggacggcgcgtcgaaattccgttgctgatgcggttgcttttcgttttggaatgtcaatggcagcttttgtctctcaggtttttcttaatataaaaacttttgctttttgaaataattttgttgagaattatacactaaagatcttttttcgcctctttctttagctctttgactcttgtcgttaggttaaatttttaatgagatacatttttgtattgatttaatttactaacaaaacaataatgtcgattaaaggaccgattgcaatttgaaagtccatacctttttatcattttatgtctttatgaacgtaaagcacataacatagattacagatttagtagtggttctaataatcaatatccttgaaattgagttgtgattgaatttaatatccaggatttcctgtgacattaaatagtaaattaagtggcttttcagtttgggatttatgtaatttttgttatctcctctgtgctcatcttttatatttgtttgataattgacatgaagagtaaatttttaagcaaggatggcttagaatcaaagctaagttgtttgtaaagattgggagatagcaatattgctggcatattccttccaataataagcatgttcacaagaatttgataccattttgctaacattaattgatttaacaaatgctgcattatgatttatttattttggtaaattttttataacagtattggacacatttagttcttgttcaggatttattttagctatttatttgattttagaaattaagtcttttgacgtaagatgcttatttttttttttttacgaaaagatttttcttttattcttaatcgtcaaaagtaattatatatccttttagccctggcctttgcttaaattgttggtgtgagttcatacctttattacaaatcccttgtctccttcctaatttttttttatttggtaaaagaaagtaacatgttttaactagattttaatgattgacactcatctaaggttcaatatttttgtccacaaggtttctttttaatccactttagtctttttttgaaattctggtttaacattggtactcgtgttttttgttttcttagattcttgaaaggaaagatacaggagttgaaaggatgtcctctgatcatcttgcactggtattcttcttgcctctaatgctggtcatacattttcctttcgtaaattgtcatatgtagtgcatagactattctgtgttgtttgtgtggcatctcttcatccgacaagctaatgtttcattgttcacaactagcaagataacatgttgaaatgattgcaacacagcaacttcttgattgtgagatgaactctaattgaatttgacgaaataactgccacattaagctctcggcctgccttttgctggggaggatcattctcattcagttgtgaagtatgggagatgttgcattgactgatatgtatatatttgcttgcctgcagatctgtgcttctgctgtcagagaatctttagccaatgtaagcatggaccttaactgctcattcttggactctgattttgcaagtaaaattctctatatttagtttttaatgtcgtcacacaagtctgagatcttaaattttagcttcttggattacctatgtgacaacaggatttcggggatacatttgattgttttgtaaggaactttgagaaatcattcagcagtacacttaggactcttaatttaatcaaggaatcttctgtaaataagggagatgaccacacaaatgtggaagcttctcctccagatgtgcctcattatgtacgcggaggagatagtgcaagcagtcttagtatagaaggttgttcaacagaagagctcttccgtagtattgagcatcaattaaatagcggaaacaaccacgaaaatcacataaaagcgaaaatttctcctccagatgtggaaggttgtgtacatggaagtggtagtacaagttgtctcgacatagaaggccatctaatagaagagcatttccgaactactttgaccgaaggttatttaaataatagtgcagcaatgaaacataatacggtaactgatcccatgaatctggagcttgtattgcatgggcaaagagaccagcttagttgtgtgtcttctaggccatatggatctgtgaccaaccagtccatgcttagcacctttgataagtcagtcatggaacaaacacgttctaatgatcttaaaacattggagcttagtctttcaatgaggaaattgaagttgaaagagacgcagcttgctctcaattttgattccaataatttggaaagaacaaaattagctatgggtgtatcaaaggcatcttttaaagttggaaagttcaagactcaactagaagacgtgagacatgcagaactcctcagaaaatgcatcgaccttctagttgctggcttgatgatcatggtgatatctctcttttatgcaacatatgtttattcataccaaaaaattactgaagccactgcatcatgcaaaccttcagaaacggcaagtaccctacctcctaacttcagtaattgatttgaattgattagattttaactaattttctcattattctcattttatatgcgtagaactttgctgtataaaatgattaccgaccttatggtaaagtagcactggggaatactcaaaaatctcttcttttttttttctgtcttaggcttcgaggtcttggtggattccaaatccaatgtcttcaatcaattcggggatgcacgtactcagttgtcagtttcaagctgttttcagaatgctgtttggaatcttaatgattatttgcattgcatatttactcttgcagcggtcagggtcttcgaaacagacaatgcccgtcactttcatggtcattcttttagcatttgtctgtggttttgtcggcaaggtttgcgtagattcactgggaggaagtggataccattggattctattttgggagatcatctgtctggttcatttcttctgcaatgtctgcacacctactttgttctttttactatatggacctgttaatgcctcacaagaaaaatgcctcacaagaaatgaaagacaaaataaggctttccatattggatccgtagagtcgtatttttgggcgactttgcttctgattctaccatttgctctgtggtcttatccctttcgcaggcccaagagaatggaaagatcatattctgtttgcgaatcaacaattatctgtggggtactgaggattgaagagattcaacatatttatcattataaaatttgttatttgtctctttttagtgtatgcttgtactataaatttccagttgtgttaagccttgtatcaaaactaaaataacgcagcagcatacttgtgtctcttatggtggactagtctaatttataataggaatatgatgtatatcaatttttgtgtactttcttttatcaagctattgtaatttaaatatgatgtatattaactaccacatttaaatgtatatgcttttcgtttggataaagctataatagatttagagttggttggttttttccatctgtttttaattaatttatgaattgtgttaaatgaattttcttccttgtgactcttgtgagtcatgacattgtttaggaattcttctaattaaaaccttactaacactgctgaaatctcccacaacattaccaatgaatatttaggacaattccaatgaatatttcaactgttttaacgaaagagtacatcctaccgctacaatctaactctggttcgtaataaatgaatgtctagactataacattcttctcagaacaaaaagaagctaattagaaaaattgagccaccagcaaaatttgatacccaaagctcatgtaaacaccaaaaaaaaaattatttgcctcattttacaatttctctaatagaagtaggaactttagtaatcttttcagctaaaatttctgagctacaggttttacatccacctggagatgtcaggcagataaatatataatactgatcattgagatcccactgagctgaggcaccaggggctgcctcccaaacttcatcatctatctagcatagcgggatacaaattctctcgaggaaatggcagcaagaacaagcaggcttagttttaaatctcttattcctgaacattcgatgaagccattcacagaatctcatgagcctttccatagtatctgttgatgaatggagactgagacaccaaaaacaccaagttatgtatattcaagaaaagtgagctaaaccagtagtaataaaaaaacaaaaaagatattagtgagtagaagctccttcaacattttcttctccaatactaatctactcattcacattcatagccaccaaaaacacaattcaaactgttattacagaaaaagtggagtagcgtcaaaataagttggtatgcaaaaagagcaaacagtaagttctctaccttaacatttgatatatcaggagtatcgggtgttgacacagggtagaacttgtagaacttcatactctcaaatgctgttttggtttcttcactcatttcttcaagggcctttttccgggcttcccttgcctattaaaaaaactataattagtttttaatgcaagacaatgactacagaatcaacggccaataaaaaacggacgcatctgattcctctctaccaagtagtacctgtcgattggccttcttagcttcccgaactttctccctgacaaactcctgagaaaagaaaaaggcactaagttaaaaaggaatgttgcaaagaaaaaggaggtgaatcaaatgcatctactataattgttaccttgaaatcatccttctggtcttcagttaattcctcctctttaatcatattatctgtaaactcctgcagattaacacttcagattaattcttttaggaagggtaaattatgtcaaagaaaaactggtgacagcaatattttgcatcatttcatttaaagggaacttcttgctaaaggggcaggataaatgcataacttcacaatttattaacaggaaaacaagtcactagtacagaaacgacacataacgagaactagaacccctcaccctccccccacacaaccacctgagcaagcctcaactggcatcactaatacacaaatgaaagacaaatcccttctaataataatcatcaaacaaaatatggggaatgaagaactatgatcagcacaacttggtccaatatatatagcaaaaatcttttaacttccacagttgataagataaaggaaactcataagccaagatctgagttgtcacctctagttcgtccaattcccaatcgaactcacaaaaaacctacattgacccaaaaaaaatatgtcaattttgaacaatcaatcaaataaaaacgcacatatttaaaaagccatgttttttcctttatggaatttgaaagccatgttaaaggtgaatatttgtgcaagtgcacaataatttcacagctactagactttggttgataattctccttgctatgtcatagaaagacttttagaaagcaaccccttggtacaatatagtcgcaaacaagatagatcctatcctatccaattcttgcaagaatctctgataacacttcagcactcaaatccttcctcacaatttttttcccagccaaagagttttgcgtaactaatgtttcaaatcactggatagtgaaattcaaatatatattcatctggatagtgactacttctaagttccaaagctaaatttgctacttatacctttatcttaatggaggggttacttataaaagttattccattcttcatgtctctatatccaaaaactactctaaacataccggctttgattctgatgaatataatatttgaacttcagtgctttgttcaagctcatcttcctttaaaggctggtagaaatctgtcaacagaatacaacacgcaacaaccatttgtaagattacgattaccctcattcatttgtaaattgattttgaaaggaaaacacaaagtttgagaacatacaaggcaagcaatattcaaatttcttcagacggtctatcttcaagtgtttcaaagcagccctgcaataaccatttgtgcacataaaaaaagtgagataacaagttaatagagctgcctgacatagactcctaaatcagaagtgacgttgactatgcatactggggtatttaagttaaagttaacaaaagttacatcacacgtgcagacatgatgtgaaaagaggaataaaacaattaactgaacatttcaacacaagttgatgaataagcacagacaacaaattaatcacattttgatcacacgtgttgggacttgagaatacaatcaccactgacaaagctaatctaatacacttctcacctatgatatactaaggtattgatgcataagcataaaacatgagcaacgtgagaagccagatcatttcaccatgttgagggatcaaagggggccaatactaaacaccaaagctaacactataataataacaatgcactacgcaggacagtcctaaacaactattttaattgctagacaatcaacaaatcagacattacttctgggctggaagctcaacagcattctcactggagataaaaacaattcacagcccagcaaaataacctctcttttggcaaaaattcacatgaatggtaatgagtttcaaggtaagtaaataggataagaaatgtaatcatatcacattaaaccaaaagtctaatgggaaacaatatcataatgcagcataagttaaaatgacaatgacaataacctcataatcatcctagtttacaatacaaaactggtagtaaatccaaaatctagatctcccactagtaattcaacaaaaaaatcaatgacacagagtattaaacatattgcagtatatgcaacaaatgtggtagcaaaagagagaataacagaacagcaccttctctgagtgcagctcaatatgaaaatttgagatttaagtctatcaacttgactgtctctgtagaaaattaaagagcacaaatcaggaatccacaggaaattctaatataattcaaaaagaaagctcaaacatttcagtaagaaagcactagtattaatgtacctcttctcaagaggaatatatggaacccagtccattttcatttgtttcatgggaatgatttcttcagactctctctgaactgagttaatcccaattttatcagaaggcgggaaaggtgatacaacctatagagccacaagaaataaaaaataaacaaaaacgggtgatagaaatgaaataaatcaagcaagcttctcaacaaatagacaatatcatttgcttgaaataaaataataataacaataataacaacaacaaaataagaagagacagaaacaaactaccaagtacaaaagtaaaagaaggacaaacaacatttagagcatctgcaaggtaacaccaaatatgcagatgcagtccaatctctcctccaatgtagcactatcttaacattaaatttgatgtatatatcgcagtacacggcatatattgccatgtactatagagaaacggcaaaaaaacctttttacactacttttatatttatttatatttgtacattaaatattaaaaatatatttttatatatatatatattatattatattaaaaaaaaaaaataatataataataatgaatattttttaagtgttgtggccggagtggaaaagagttttttcacactaaattttggattagtgtaaacaccaaattttagcgtatagattggaaatgctcttagcaagactttaagacaaacttatacacaagctttaaataacttacagccaccacaacaggtatgcagataactttattctcccccttcacagagaccaattgagctgcaggcaacatcaactaagtaaagcacaatccaaaagcagtataaataataaatttcagagagaagtagaaagtaaatattaaatggcatgcaacatatgacttgatttagaaaactgaataacacgttgggatacttcattccttcttaattggcaattaaaggcaagtgcctgtctattgggggggaaatcaagtttgaaaaagctacttacgctcagtgcaaccaaagagataagctttcttcccatgtaatgttccaccctcttcaaacgctttctgaccacaacaaagtattaactttcagcactgaacgttctaggatgaggaatagaaacaaacccaaaagcaatgtaacatatgaaaagca

SEQ ID NO: 224557 - DNA, 2352 bp, Cannabis indica
gactaggtttgggtcttattctttgtctgggtcttagtttggttccagcgttttggtctgggttcttgtttggtcttggtatgggttcgtgtctaggttcctgtcccggtctgggtcctgtgcaggtttcgggtacggggttgggtccgacttcagatttcgggtctaggttaggtcctggttatggttcgagtcgtggatttagatctgggtctgggttctagggcctaggtccctggtctaggtcccccatccaagtcgggttcctaggtcctagtctgggcctaggttcgggttcggctattgagtcttggttttagtccaaatcccagtctgggttccggtccaggtctcggtcctagtctttgttcgggttcaggtttgggtccttgtcagggtctggatcctggtctgggtcgagggtctaaggtcttaatgcgggtttaggaccatgtcaggtcaaggtcacggttcgggtgcgggtctaggttcgtgtgccaagtctcaagtcccagtcgtagtcaaggtctcggccaaggttctggtatgagtttgggttatggtttgagttcggtttttgtctcaggtatgggtcctagtcacagttccagttctaattccgggttttggtttggttctgggtccgggtctgggtccaggttgcggttggggttcgagtcttagtctgagtctgggtatgggttttttgaatcccgatctgggtccaggttcgggttctgggtctgggtcccaagttcgggtctgggtcgtaggttcgggtctggatctgcggctaggacagggtacaggtcccgtgtttcgatactggtctggatcttggtctgtgtcggtattcgggtccaagtctaggttcgtgtccatgtcatggtctgaatcaaaatttaggttaggggattggttttggtctgggatcaagtctcgagttcgggatcgggttcaagttcgagtcgcaatcctaatctgggttcgggactgggtctaggtataggtctgggtctatgtccgagcccgagtttcggggctgggttctggtctagtttcaggtcctggtctaggtctaggtcttggccacgaccccagtcctattagggtcttggccacattctagtacaagtttttgtttcttgtcttaggtctgggtcttggtccaggtcctagtccagcttcgggtccttctctgagtccaggtcctactccagcttcgggtccttctctgagtcatagatcaagacaccgactatgggtcttgtccaagccccaatttcttgatcccgagacaagatcggatcccaatcacgggtcccaatctggtgtcggttcattttccaggttctggtctaggtctcggtctagttccgggactgagacttgggtgcagtttcgggtctcaatcccaattctgggtccctagtattgttccatgttcgggtctgagttcaagtcttggttcgtgtctcgagtcctagttcaggtttttattcaattttgggacccaatccgtgggtgggtctgtgtccgagtccggttacaattttgggtctaggtccaggtcctggtcctggtcctggtcctgctcctgagtcccgatccgcttctggttttgattctaaattcaagtcacggggtacgggttcgggtcgagtttcagtccgagtttgggttcaattcttgatttgggtttcgagggaggtggtttcagtctcggtgagggtccgaggtttggtctgtttccaggttcaggtccgggtcaaggtcccagtccgattccaagatcctagtctggttccaattcaagttttggttttggttggcgagtgtgggtcaaggtctgggtatatgtccgagtcctggtttgatttcgagtttgggttcgggttctagtctatgtcccaaatcctgacatcgactacgggtcgggtccaagcatcgagtcccgtatcccaggtcttgaggtgggtcctgggtccaggtacttgtctggggtctagtctcgattcccgatttaggttttgaggcccaagttttgctccaagtttgggggcccaattcccgggtctgggtcccccatctatgttcaggtcttaggtccctgtctgggtcaaaatttgttttcctgttcgggttcgcgtctcgagtcctagtctcagtcctggttctagtctgagtccatgtcccagtgtgggcctgagtttcgggtcccaggtctgagtctggttcttatgtcgtggggtcgggccttgtttatgggtcagggtttgggtttcggtccgggtcccggtctgggtctaggtcccaaactttgtttaggtcccatgtcataggtcccaatct

SEQ ID NO: 224558 - DNA, 2603 bp, Cannabis indica
gaccgggacgcaagaactgaaccggaatagaaacacaaacgttggaccgggaccgggaccgggaccttgggacctgaacatagatggagaacccggacccaagaattcggcccccaaacttggaccaaaactttggcctcaaaacttggatcaggattcgggatacgaccccagacccaaacctcgaccaaggacccacctcgggacctaggattcgggactcgatgcttggacccgacgcatagtgggtgtctagatctaggacttagacgagaacgcgaacccaaactcaaactaaaactatgacctggacacagacccacactcgggaaccaaaatcgaaacttgaactagaacccgatcgggatcatggaacgcgaccgggacctagcatcggacctgaacccagatttggacccaaccttaaactctaactaagaccgaaacccggacctgaacctcgacccagacaaaaataaggacctgaacctagactcgaccccaaaatcaacctgaacttgtaccccgtgacttgaaactagaaccgaaacaagaagcagatcgagacccaggaccttgacctagacctaaaactttaaccggaaacccaaacctgaatccaatcccaaaccgagactcgggacccgaacccagatctgaactcagactcgaacatggaacaggactcgggacccagaattgtgattgagacccaaaccgggacttgcgacgtgaactgaaataagactgggacccgcgattggcatccagatcttatccctggatctgggaacttgggcttggagaagacccatagtcggtgtgagacctgggacccgaaactgaaacatgaactagaacgtgaccaggaccctggaacaggactgggatcgtgactaggacttgaacctggaccaagacccataactagaccagaaccaagccccggaactagggctcaaacctgttcctcgacccagtcccgaacccagactaggactgagactcgaacctgaacttcaacccaaactcgggactcgatctcagacctagaccaagcccctgacctaaactaggattctcatgtggacatggacaggaacccagacctagaccttaataccgacccagacctagaccaggatcgaaacatgggacctggacccaaacccagacacagacccagacccaaacttgggacccaaaccaaggacccgaacctggactcggactcaaacttagacccaggccgggatcaaaaaaacccatacctggactcgaactaagactcggaccccgacccaacctagacccatacacggactcggaataaaactgggacctagaatcagagctgcaactgtgactaggacatggacttgagaccagaaccgaacccaaaccataaccaaaactcggaccagaacctgtaccgagaccttgactaggactaggacctgagaactgggacctgaacctagaccgagacccgaactgggacctgatcctaaaccctcgctgagacctaagaccagcgagcaagaccaagatccaaaccctgacaaggacccaaacctgaactcagaccaagactgggactgagacttggacccaaacacctggactaataccgagacttaggacctgaacccgaacctcgagccagactaggacctaggaaccagacttggattagggacctagactagggacctaggccctggaacccaaacctagataaaaattcgggactcgaacccaaactaggactagtcctagacctgtgaatccaaagtcaggcctagacccggacccgaaacctaccctgcacccaaataaggaaggaacctggacatgaacccataccaagaccaaacctgaaccgagactcgaacccaaaatcagacccaaactccggacccgaactcagacccatatccagaatcagacccaaacctaggcgtgcgcccggacacgaactcgaacccaaacagggatcaaaacccaggacttagactcgaaactaaattgggacacagattgagatcgaaacctaggactcggacttgaacctagacctagacctaggaccctaacccacacccaaagactgatccgaacgtagaccgagatccggacccaaacccaaactcggacttggactcgaacccccacccgactcgattccaaactcaaactcctaatcgcaattggaactggaactagactaggactatgactaggaccaggactaggacccagactggaacccaaacccaaactgagacccaaacccaaaccctgactaggacccaaacctagacaaaaaccgggacctagatccagaatcaggacaaggacctgggcaacggaactaggactgggacccaagacccgaccccagaccaggacatgaacctaggacccagctcgtgacccggcacccgaaaaggaaccagaccagcacctgagatcgagatccagatcaggacccaaggcttggaccgaacccaaagtcggtgtttagatttgggacccagcccccgaaccgaatccaaagcaggacccgaacccgaacccagtcccagacccaaacttggacc

SEQ ID NO: 224559 - DNA, 4017 bp, Cannabis indica
ccgggtctgggtccaacgtcgaattcccagatcaaggtcagatccgtggttcgggttcggtctcgaatttttatttttttgggttctcgggcctaggtccgttgtctaggtcccctatcgatgtccatttcctaggtcctagtctgggttaaggttcgggttggagtccccagtcctagtttgagtccaggtcctagtctgggtttttgtccaggtttcggtcccagtcttcggccgggttcgggtttgggtccccagtcttggtttaagtccaggtcctactctgggtttttctccaggtttcggtcccagtcttcggccgggctcaggttcggttccttgttaaggtctggatgcttgtttgggtcccagtgagggtttagaaccacgccaggtccatgtcccgatctaggttcgggtcccaagtctcaggtcccgatcctagtcaatgtctcagttcaggttcttgtctaagtttgggttatggtttgggttcggttttggtctcaggtttgggtcctaatcacagttccaattctaattctttgtcttgcatcgactccgagtcagggtcagagtccaggttgggttggggtccgagtcttagtcggagtccgggtacaggttttttcgaatcccggactgggtctaagtctgagtaaaggtcccatgatcgggtctaggtctttgtcatggtctgggtccgagtctaggtcccatgtttcgatccttgtttgggtctgggttagtattcggtttcgggtttgggtttgtgtccatgaccaggtccgaatcccagtctcggtcaggggcttattctaggtcttggatcgagtcccatgttcaggttcgggttcgggttaaagtctcagtcctagtgtggatccgggaccggactaggtccgagctcaagtttcagggcttggttatggtctagttcgggttcaaatcctgagttccaatctaggtcagggtttcgaggccaaggtctaggtcccccatcaaggtccgggtcctagatcccagtctaggtccatgttcgggtttgggtcctagtccaagtttcgattttgagtcagtgtctaggttcgggttttggtctgagtttgggttgcggtctgattcctagtttgagtctcggtccgggtctgggtctaagtccaaatctcaatttggtctcggttcaggtccaggtccgagtttgggtcccgagtgctggtccatatttgggcatgggtcaaggtctcggtcaagatctaggtcctgagtttcgatcccggtctgggtccacatctgggttcgagtccaagttgtatctgaatccctatgaaggtccgagtctgggtgtgggaccgggtttcagctctaggtcaaggtccgtgtttgggtccggatcttggtcccagtctgggtacacgaccgtgtctcgacccgattttcggtctcggtttgggtcttggggtaggtctgagttcggttataggtttgggtccgggtcctagtcacagtcctagtcacagtcctagtcttgttcgagggtcctcgtttgtcggttcttgttcaagttcaagtttcgggttctaggtttaggtcagggtccgagttttggtcctggtctgagtctcagatctggatccctatcacgtatcccgatctggttctggtttaggtcctaggtcccaggtccgagtttggtttcgaggccttgactggggtgcgattctaggtcccgaccccagttctgtgtcttgagtctggttccatgtttgggtctgagttcgtgtcccgagtgaaggtttgggttgggatccgggttcaggtcctggttggggtgtaggtcttggttggagtccaggtcctggtttgtttacggttctgggtctaggtccaagttcggctacggttttggtctatgtccaagtcttgcttccagtttcggttccaatttcgggtcacaaggtacgggttcaggtccaggtttgggtctgggactgggttcgggtctgagtctgggttcgggtccttgtctgggtttgggtacggggctgggtcccaaatccagacattgtctacgggttcggtccaagccccgcgtctagatcttgatcctgctctcgggtccaagcgtggttccatttcgggtgctgggtcacgagctgggtactaggttcaagttcgggtcaaggtcgggtcataggtctcggtcctagttccgttgcatagttccctatcccgattttttgtccaggtcctaggtctggtcttggttcgggtcccaatctaggtttgggttttggtcctagtcggagtttgggtttggttctcggtctgggtttttatttgggtttgggttcgggtttgggtcctggtttcgatcctggtcctagtcctagtccggttccaattttagttgcaattatgagttggagtttgggttcgagtttgagtcggggttcgaatctgtgtctcagtttgggttcgggtctgaatctatgtttaggtctggatcgggctccgtgtgtgggttagtgtcttgggtgtgggtccaggttcgagtctgagtaccaggtttcgatctcgatctgagtccgtgtttatttttgagtctaagtcctaggttccaatttgggtttgggttcgagttcgggttcgggtgcaggtttaggtttgggtctgattctgggcctggatctaagttcgggtccccagtttgggttcgattttgggttcgggtccgagtttgggtttcaacctggtgtgggttcgtgtctatgttcttgtcctagtttgggtccagggaaggttttgggtctggaattgggtcaaaactttggattcctgggtccaggtgaggtcctagttcgggttttagtcttggattcagatctgggtcttggttttggggtctaggtcccctatccatgtcccgttcctacgtcctggtcggggtccaggttcgggtttggatcctgagtcttggttttagtccatgtcccagtcttaatttgggtccaagtctcgatctctgtcttggttcgagttcaggttcgggtccttgttagggtctggatcctggtctgggtcgcaagtctcagatctcagtgaaggtttaggaccaagtcaggtcccagtcccggtccaagtttgggtccaaggtctcaggtcccagtcctagtcaaggtctcagtccaggttcttgtctgagttagggttacggtttggtttcggttctggtctttggttcgagtcctagtcatagttccagtgctaattttgggtctgagtttggttctaggttcgggtctgtgtctaggttggggtcggggtccgagtcttagttcgagtctgggtacgggtttttcgaatcccagtctgggtcaaagttagagtccgggtctaggttcgggtcgtgggtctaggtcctaggttcaggtcagggactgggtctgggtcctggtccaggtctcgtgtttcgatcccgatctgggtttgggtcggtattcggtccgggtgtaggttcatgtccatgtcaaggtctaaatcccagtttaggtcaagggattggtctgggtgcgagatcgagtcccgagtttgggtttgggttcacgttcaagtttcagtcctactctcggtctggaaccgggtccaggattggatttgagccttagttttggggttgggttctagtctagttccggttcttggtctaggtccaggtcgtgctcccgatcccggtcctgttctatgttcctggtcaagttctggttcatgtttcggtttagggtttagggcttaaggtttaggggtcagtataaagagtataagatttagggttcgtgtcacagggtacgatttaaggttcaggtgtgggtctgggtccgagtcctggtctgtgtctaggtccgtgtttgtgttcaggtccgagtaatgttcccaaatccaaacaccaaccacatgtcgagtatagttcgagttctggtacaagtttggtttctggtttgggtctaggtctgggtc

SEQ ID NO: 224560 - DNA, 1109 bp, Cannabis indica
cattgagcaatgacgacacctgcttctaatacggtcaagatcaatgtcggcggcgcaatatttgagaaggaaaatgcatataggtttggtgtggttgcacgtgtttcgaatggcaaagttattgactttattgccaaatattaccatggaacttacacggctgaggttgttgaggctttaggggtaaaggaggccctcaattggctaaagggcaaagggtggagcacgatcgaggtggaaactgacagcttactcattgttcaagcaatctttagtaaacaacaaatgtcttctgtctttggcttgattactaatgattgtaagattttattgtctacttcacctaatactagtttacgttttattaaacgatcagcaaatcgagtggctcattttgtggctaaacgctctcaattttacaatcgtagcattcttgaggataatgttctggctgatcttcatgccatcttgtattctgaatgctaatttcaatgaagttgatattttatttttcaaaaaaaaaaaaattaaaactgataaaacccaacttaaaaaaaaaactatttttgattaaaagactataataaatttatttgtaataaaaatatatttacttatttattatctattacaaaaaataaaaataacatataataaaataaataatatttaaatcactttttttatttttgttttaaaaaatatttttatttttattcttatttttaaaattaacaaaccacatcaacctacaatttcttatatacttgagttttttttttttcatgtgataaaaatataattttaaaatattataaattattttatcaaatacatatgaatatttatgctttgggaaacaataataaaagaatatagaaaggaaacaaatatagaaaataaaaattttgtaacataagtttttatacatttgtaattaaaatgaatatatttataattataataaattagattataataataacattattataatagaatcttaacaacactttaaatttataatttatcaatgttgaccgagattttcgacaactattaaaatatgattacagtaaagagctgtaagaaagtgagatgaggatttt

SEQ ID NO: 224561 - DNA, 1522 bp, Cannabis indica
gtctctgttattaatgagagtatatatcttttacagtgaatgttcttggtgtgtttttctctctgcttttttcgatcccccttctcatttttctcagggctatttatagagattggtgggaataattaaaaaggggtaacttgtctttgagtggtagctatgggtaagaacaagttcccaaaagatacaaaatagggcatgcattacctatatagtaggtgtcatagagattaggtgagattaaccttgatccttccttgattgattgtattcttcataatggagttgtcactagcccctttaattatcgtgtaattgcctaaataaggcttacgatgtctgacacgtcctcttatgggcattcccagatgcttcccccttgctgtattaaatgtaaggtgactgttcgaataggcccttctcgtctcggagatgccttactatatgtcaactctcggagaagagggcgtgccttttgcactggtccgggagactactccccgagccacacttattctcttttgtacaattcttaactaatatctagttgaggtgtcctcttggtccacgtgtcatacatagccgtggccgcatattttgggaaaaaaccagggcaacatttacccccaagtcttatttagtagtaggtaaatgagacttgtgagccatctccagtcttaataaataaagtggcacgtgtcctaagcgcgtgggcagcatttatgattgtcatcatagatttttatttccttttgcaggtaacgattcgctttccgtccattgatcgactcttccattaatgttggtgtcagagaggtactcaaatgcttcaaccgctctttcttctcttcatacccattaatccatctcgttagatcacagaattcaaatcactacgaatcttcacagtacgatggtgcctgatcaatgttgtgttgcgccccttatggcctataaaagccaacattttctctactatgtcaatttcaccaccttgcaatttttagtccatccaacccattcgacaaaattccaaacacctccgattatctcctattctttcgttgctgctgtcaaatgaaatattaccaccgaagatcgtcaacctcttccttacagcctttatgtaagtttttgttcagacgctctctatttgttttccttttgctttttagggcaaaataaaatgatgatattttcatttgattgtgcttagtttctgtggcatggtggctacgatgatggtcgctgtgatgcccccctccgaaaatggggcattcgatgaccactgctatttgttgtttttttttatgcttttttactactttctctgtaagtgcactgccatctttcttgagagtagaaagtggtggttttttgtttgcttgcttctgggtgtttgaagcgacttccataccctttttctttcttttttttttcttttttgctatgatgttttgcagtcgatgcttaccttagagaatctttggattcccttttttggtaggcattcggaggggac

SEQ ID NO: 224562 - DNA, 1493 bp, Cannabis indica
ttgaaaattgtgtcaaattaaaaatttatatttaattactaaattttacaaacttcttatacatttatttacaaaagttgggatcccatatttaaacttttacaacattatcaaaatatatttagtttagtcgcacagcgactacaaaataaaactccagatgtcccgaaatcgaacatttcaggttgcgtcgccatgacatgtacaaacaccatcctagctcgaagcccactcatgttcagcctttgtctttcctttacctacacatagaaatagcaattgtgagttaacaaactcagtaagaaaagcatataacaaataatataatatcgacttgtatctatgtgcccatacacctatttacaaggcttaacaaatgagtaagaacgttctttactagggtacaaccactgtaccatataaactacgtaccaacactgtacgagtgttggtaaggtttgtttcgtaccctgagtaccactaactgttgtaccacacacaccctgtacttttccgtacttgtgttggtaacacgataacgtattctttaaacattgtacactacaccaatgcactctataccacttccgtacaagtgttggtagtgtactaaccataacaagcatgcatatatatatcacacatacatacattcgcatatatatcatatgttctacgctattcttaccttgtttccaaattcatgtgagttggccgacctgaacagaaaatctcgtgctggatggatgtcctaatcacataacataatcgagtaaataatatgccaaaatcgtaattcgggaaactcaaaccttcaactaaaggttctgctattgactactaaaactacaataccctaagtaacaaggaatcacccaaccaaggctctgaaaacaacacgaattgacaaaatggattgctcgggaaacctgtcccagaaccggttttacaggacctggcaaactggttttacaggacctggcaaaccgattttacaggacctggcaaaccggttaaccagattgcaccaggtttccccaagcaatccaaaacatgtccgaaacgtgtccaaaccgcaccaaaatttctagaatacttactacaaattctaagcaataaaacccagaaattcacacaacatcaaaaagtggcatggatgaaccaagcttgagttttcaaactcaaacttgtgcatccactacaccacaaccctaaaccagctgcaagaactcaattctaacttaaattgaacttaggaactaaatcataaacaaatctaaccttagcagccccaaattcacaaatttgcatattcaaaccaaaaccaaagcttcaataacacaaggattagagttctaaggttaccttttgttaggctatttttagcctacgttttgggtcactttttatagttgttttccttccttattattatatttagaatataattatgcttgttttctttggtttcaggtttcacacttggaatatat

SEQ ID NO: 224563 - DNA, 1776 bp, Cannabis indica
tatagaaatattttattttttagaataaaatttttatgattaaaaaataaaattaataccttaccaaacacgagatcttagccatttgtttattttctcaatatggaacaaatagatgcacgtattcaggcttcctgtctattatttggattaattaattttataaacattttattcataacgaacaagatggcgccgcgtcatcccatgtttggaattaccgccccgctataaacgcgttaggggtacaacagtaaattaaggaagggtagtttcggtaaagagtgaggtatatacaccccattacggctatacggtaccgatcctttgtcgtaaataaaacaaaatacagaggacaaaattgtcgtttcggttacaccggtcaataaaaggacttaactataaattcatgtaaagccggcaaagtttcatttgcagaaaaagtggttaagttaacaacgtgggattaaggaataggacgatggaggtcccgtttggttgacaatttttgaatttcagttatttcaatttcaactctgcttttgaatttaactatcacgattttgttttgagctctttcaattttcaatggcggaaacatctcatggccctgctagcttttggactcaagccgatgctctactgcgaaagaacctaacttttcaggtctctctctctctctctctctctctctctctctctctctctctactatatatatatatatatatatatacaataaaggcaacaggaagaaataaaaggtgcttcacttttacgtctatttagtattttctcgcaaagccaacttcattgtctttgtctttgtctttgtattatcagctcctctgtaaaacggaccccctcacctcagctctctcactcttcctcttcaatctcaaactgcccccacaaacctctacctaacattcaattcaattcctttcactcataaatctcttctccaatcacccattgcctcatcctttaacgccattcattatcattatgctctcttcatttttcatattcttcttgcttttcctcgccatcaatggtgaggatgccaccaggttggaactcatacacagaaactctcccaagctttctgggaatgttaggccgaaaacccagatggaaaatatcatacagtttcaccgccgtgacgttatgcgtatcagaaatatggttactcgtagacgaaggagggttactgaaatggaaacatctgtggcaatgtcaatacattctggttcggattatggagctggggagtactttgttcatgtcaaagttggagtcctggacagagattcatgttggtagcggatacagggagtgaattgacttggatgaactgtagatataagtgtggtcataagtgtggaactcataaagggaggattgatgatgataaaagggtgtttaaagctgatcgttcttcttcatttagaactgtgccttgtctttctgggatgtgtaagattgagcttgctaatctcttttctctggctagttgtcccactccattgaccccttgtgcctatgattacaggtacctcttctatttttggtgtgtgtgtgtgtgttgcttaggattcaaattattcaagctaatatattcaagttcaaaatctgcacaagatttaagagatttgagtaatggataagatgatgatgatgatggtttttagtggaaatgtaggacaaaagagtttaattttcccaacaacaagtagtttgggacatggtctttcttgatgcagtacaagacaa

SEQ ID NO: 224564 - DNA, 2159 bp, Cannabis indica
ctcgattcgagtttgggtctttgtcttgattttatctgggtcgggtgcgggtttaggtcctagtcctagtccaagttcgtttcaagttctagttgcaacgtctgagtttgagtttggagttcaagttcatgtcgggttcgagtcttggtctgagtttgggttcgggttcggatttcggtctagatccggatcaagctctgggtgtgggttcaggtccaggtctgggtctgggtccgagtcccaagttccattctcgatctgagtttgggttcagttttgggtctaagtcctgggttccgatcctagtcaagggtcgagttcaggtccgggtctaggtctaggtttgggtctaattctaggtctatgtctgagttcaggtcccgagtaagggtcctattttgggtttgggtttgatcctagttcgtgtccagaatcctatcctagtttgggtccggggtaggtttctggtctgggtctgggtttgactttagattctcgggtccaggtcaagtcctagttcgggttcgagtcccgaattttgatttgggtttgggttctagggcctaggtcccccatctatgtctagttcctaggtcttggtcttggtccaggtgtaggtttgggtccccagtctgggttcgagtttgggtcccaattcgggttcaggtccaacttttgttcccagtcttggtccaggtttgggttcgggtacgacttcgggtcccagtcccagcgtgggtctgatttttgggtcccatgtctaagtctggtggttagttcctgggtgtggtcccaattttttggtctaggtctgggtaagggtccgggacccgatctgggtccaggtcctggtcttggtttaggtcccaagtcacagatcccggtccgggtcgaagtcccagtattggttctggtctgaatttgggtttaggttcgggtcttgatctagggtcgggtcccgtgtctctagtctagggttcagtttttgatctcgttcccagttctagggcctaattttttgtcaaagtcccccatctaggtcttgatcccttgttcaggtcatggtcaaggttcaggtttggggcccaagtcccatatctaggtccggatcctaggtcattgcctaggtccaagttcaggttcaggtttggatcccgagtttgggtctaagtctagttcccagtacgtgttaaggtttgagtttaggcctaggtcccggtctgagtccaagtccctgttcgggtcagggtgggggtcccgatctatgtcccagtaaaggcctaggtgccagaaaacgttttggtctgggtttgggtctgggttcaggtcctaagtttgtttctaggttcatgactagatctgggtctgggtctgggtcttgggttttgatctcggtatgggtatttagggttttagggttttgggtttagtgtttagggatttagggtttagggtttagcacttagggtttagggataagtgtaaagattttaggatttagggtttaaggtttagggtttaagggtacgatttaaggttcgggtgtgggtctgggtctgggtctgagtcttggtctgggtctaggtctgtgtttgggttcaggtccgagtcttggtcccaactccgaagaccaaccacatgtcgagtctagtttgagttctggttctggtccgggtctgggtccgggttaaggatcaattcccagatttagacaccgactatgggtcgggtcctagcctcgagccttaggtcctgtctagagtccaaatctagatcctagtctagttgtagctcatgtcttgggtcctggttcgggtctcaggtccaggtttgggtctaggttagggtcttggatcctgagtcatgggtttggatccccaattcaggtcagggtgctaggtctcggtctgggtttgagtcccacccaagtgcaggtcccagtccttgttcggtactggtccttctatcgagtcatggcctggtctgggtttgggtcacggtttacttcttaggtcccaagtccaagtatctggtcctcgtcccgttcccagttcccaatcgcggtcccagtcctaatcttggttcgggtctgagtcccagctttaagtcctaattctattatgagtccgggtttgggtctgttggaatttattttatca

SEQ ID NO: 224565 - DNA, 3910 bp, Cannabis indica
ttaaggcaaaaacccaacaccttgaacatttttacacttacccaacatccagattgacgtcatatgtcaacatgcgcactggattgtcaacctgggcgttagatgtcaactgggcgctaagtcatgaactactttcattaaaacaacaataactcactcaatttagaccgattgacatgattcaacttacatttcaaagataattcaatgcattatcaagtcatgtataacactctaaacataattttgaagttgtcttcataattcacccccaagggagttatgaaaaataagctctaggttacacacaatgggacctgttgggctccgaaaaatgcccatcaccatcaaaagctaattttcacggttagatgatcatcaacagtcaaaaacatgttatttgtatttctcactatttttgtgggcctccttcacctataaagggagagcaccataagctcatttttcaagttcaaaaaattacccacaaggtcagagcatctctctctagtttctctctcttgaaattggagcttctgacacttagtatttttttttataattaccatctcgtgagaaataaaaactcgaagaagacgtagttccattactgtcgtgatacagtgagcgaactactataagtttgccatctcactcttatagttacttaaatacgaattctagcgagcaggtatgtcttagaagtcttgtccagattactgagtcaatattttggagctttcattaagagctacaactcaagaaaaatactaacaagatagttgcaacatgttctacaagtgttgacagacggactccaacaattggtaagaaaataggggccatgtcaggtgctgagatgggaactgagaatacttcaacttctaggtgccaggagtaggccttagaaccaactcagcatctcatcctctaaggttaccaaatgctcacggaactggcaccaatgaccagatcccacttagggagcctcacatggacattgatgactatgaagaggccgatcctcaagtttatcagctcaaccaaactatggctgacttacaacaacagctacgagactctctcctgaagtaacatgaatagttttaacactggttcgtgaaaattgcaggaacattgaaagctaatgcattgaactggaataacaaagagctaacccatctaaataaagtagagaagcttgtcgctctagtcgcgaaactacctcccataagggtttttccaagttggtgagagagactccccgttgacaaactggtcatattggaattagtgttaaaggaaaaacacttaatcctcgaaatgccactaccacattgggtaattgagtaagcactaagaaaacactaggtgtggaaatcttttggagggaaagttccttcgagcaaaagcccaagaggactcaagctcaagggcgctaaccaatgggctctccacttgatgttgaatgaccttgcaatgatgagagaatcaacatgactcctccactaagtctttctcatcatcctcatgaaacaaggctttgagatcctacaaggggaaaaggacctgctactcatactaaaggaggtagtaggtgacgctactttgaaactgaaggctacaaaatccaacgggtaaagaccaatgatttgctccatactcggaagtactttagagatgaaagagaagaattgtgcccttacttttcccatggccccaatggccaacactatgagtacttccctcaagtacatggagaggaattgaacttgagtggccaattcaattctcttcacacttgtgatcccgctgaagactacattcagggagatcgacactagaattgtcaaaatgaacacttccatagtgggtcatcccaagacgatcaagagtttattttggaggcctgtctagtgttgccatcatgaccccgtggttaggagaaaactacaaggcccaggtccacaaaagaaaaagattgacctagaagaccaagagacatgcgtatcctcttttagaaaaaagagaacgctggatgcgggaacttctagagaaaacctaactcgggtaacaaaagctctgattgggatgaaaaccacaatccatggggtaaattaaccacaatttgacgccttggtagcttttgtgaaggggaccacaccttttaagtggtctaaattcaaactcaaatgagaacacactcacccctctccgaacgaatcaaagctcttccaattcctcaaaagttcaagaatcttttatggtattagacattaggaatgaagatccattgtctcacatctactaattcaaagtgcagaccaatctacaaggtgtgagagatgattttaggtgtagaatcttccctgccacactgacaagcatagctcaatgatggtaccttaaactttcccttagattaattgactcatggaaaaatctattggatgcttttcataactagtttgcgccttccaaataacaccaaactagcctaatgatttgttagacgtcaagtaataggaagacgaatccctgaaggactacatccaacggttcttagaggtagccgctatgacaaaaagtattagcatggacacaagggttatctaactcgcaatcagactgaaggagatgagtcctttatgatctaactttgtcttaaggttgtatacaccatgaatgacttcttggatgaatggttttatcaaacttgaagaagtcgtcaatagagtcaagggatcaaaaggtggcaaggaaaagtcactagacactgaagcccttacttctgagtcatggggaaatgggaagcagggaggttcaaatgaaggaaagagagccaacaacggtggcaagcaaggcaactccctcaatggaaacatgcctaagacttggggcaaacccttacgagagtatgagcctcacatcaccacctactccattctcttggctccaagagaggatacatatatggccacacaatccactgatcttgcgtggatatttcagacagtatgtgaagcatcaaaggaatgagccaaagcagcctaatcaacccaacaacccatataaccgaagattgcaccctgcccctgttgagggcgagtatatattggttatcttgggagggctgcatatccctggagagagtaataatgcctagtaaagaatgtcaatgaaataaaaaatgaggaattggtgtttgctctagaaccattgagaaaagccaaaacagaagaacctccaatcatattcttagaggaagatacaaagcacgtgaggtatcaacatgtcgatcctctcgtcattacagttcagctcactagcaagagaataaaaagacttttggtggataatggaagctcgataaatatcctttacaaggatatgtttaagaaaattagattacaaaatgcaaagttaaaaccttgcatggtgaacttatgcggatccactggtgatagtgtcgccagccaaggcatcattggactcccattaactgtaggagagccaccattatctacaacagagatgcaggagtacttagttattgatatgctatccatttacaacatattgatgggtagccctccgtttattggactaggggcagtcaatttaatcaaacactaccattaaaattccaaacaccagcaagaataggtgtagtataaggcaaccatttgttggctcgtgaatattatcgcgcagaactttaaaatagaagggcaaaccatcaattaattgtggtcataatagaagaaagttagaagaaagaagaagatctagaccgtagaatctaagctgagaaaaaccagttaaaaccaattgaagaactagaagaggttgttttagatccagacgatcccattaaatgtgtgtttattgggaaaaatctagatgaaaa

SEQ ID NO: 224566 - DNA, 1145 bp, Cannabis indica
tccacacctcttgaggtgtcttaaaattgtttggcactgagaggcatctgtttatcaaatagcatgcagtcgtaagggcttgtgcccaaaatggtctttccaaaccagtacctacaagcatgcatctgaccctctctaacaatgtcctattcattctttctgcaatgccattttgttatggtgtgttcaccactgttttgtgcttgaaaatacctttttgagcacaaaataccttgaattctcctgtgcaatactccaagccattgtatgtcctcagtactttgagcttgttaacagtttggttctctagaagctttctccactcaatgaaggtatttaaggcttgattcttattcttcaacaagtatacccataccttcatgctgaaatcatctgtaatgctcatgaaatagtgtgctcctcccatggttggaattcttgatggtccccaagagtgtgagtgtacgtaggctagtttctctatggttgtgttctcctttactgaattttactctgcaggccttcccaagcacacattcatcacaaaattctagcctttcttgtaatttctccttgaacaacccttgtttgtttaattcttccagtcccctttggcttacatgtccaagtctaagatggcaaagtctactttggtttgttgcagggttatgtacagcaagtgctgcacttccaatgactattttaccatctagaaaataaaggccattttttagttgacctttgataagatcttgagatccatgaaccattctcatcactccaccttcaatcttgactgagtaactagacttgttaaatattccaatagacagtacatttcttttatgttcagggacatacctgagttgttgcagggtttgaagttttccatcatgatttgtaatcatgactgtgccaatttcctgaattgcacatgccttgttattgcttaaaagcattgttccgttgtgttcttctgaaaaaatagctgagtagttccctgtttggtgtcatgtgaaatgagtagcctgagtcaagcacccattctctaccagagtcagaactttatgccaccaaaacatcaattgtctcacatccatctgcaagataagcttctccatcattcttggttcttgattgttgat

SEQ ID NO: 224567 - DNA, 1917 bp, Cannabis indica
cagttgttagcattggatgcatctcctcctctcgcatcgcttggttgggcatgctctaacgagagaggatgtacatcctcaatgacagtgttgaggctaccttgagaagtctttttgggacctatttttcgaataaacaacatgcttacagtaacactatgggtttaggtctttcttcaactcttaatgaaagcaccaaaatatttgccgaaattttcaaaaactaatataataagagctaagaaataataaatagcagtaataaaaaagatagagacttttatgtagtttaggtgttaattaaccttagtccacgagtcagtctattagccttagaatgcgtatatgatgtttttacagtatttatgcaaccctcaccttgtattctgcgtttttcttgaagaagaggaaagtttagaataatactagcagagcttcgactatctaggttgtgatcccccctttcgtatgaaaatagaagggtatttataggttaaagggcagtatggacatgctcatgacccacctataatttctgcaaaaagcccactaatgggtaatatacatgcaaaaaagagctaactgttgggcccttgaaaggatttgtgctcgtgcgttaaagcagctagacaataggggaccactgtatgtaatggacacgtgtttccaaaaggtttaaccttgaaaagtaaatggattggaataatcgtctggaaaaatggtgtgcgaggtatgttctggcacaggggacaagatctgatcctgtgtcaagaaaaacataatcgtcgctgggcgatctgagtttgtatccaaggtagacgtctacgattcttttaggcagtcagcgtctgtgataggcccttcaagtatccgtttgggtatcacttgggaagtctttgagcttggatcacttcgggtcccagagtggtaataagtcttccgtgtccgagaagctgaagtaaggcaaggtggaccttcgcatacctctcggtcttgacttattcccagatcagtgaaacttcttcatgacttggtttaattgaggggtttgaattagtgagataatgagattatctcttccattttatgccacgtgtcacccgtccagaaatacatataacaattagattctcaaaatagaagttgtaagaatatcttttttgaaaaactttaacaagtgaatcaaagaaacttataacattaacacaagttcatgattaattatttaggattcatgtcgatctactattaatcatctttatgatatgaattagatctttatagtaaccgatacttttgatatcagttattatatcttttattacttattaatttttgtaaaatatttattactataaaagactatttaattttagttaatgaaaatctacgttaacatataaatatatataaaaaatttctttgtgttaagtgtgtgcacaacatctattgaaagatcaagattttttggagaataagcataaagctgagtgcaactagtcttagtgaaagctatgctatatattagagatatttctgcaaagaatgatgttcttgcagcaagttctattgggaggttcaaggctggaaaaaattgtaacaccacatgaactggtagagtataaaaactttatttggcgtcgactcttcatccctaatagtatagatttattctttgaaaagtgatcaaaaactagctcctaattaactcaagataatctttttatttatcgggtacgtattgatacatcttatgttctactgtggtgtggccaatgagagtcaccactatataagaatatttttatattaaaggaaatatatttctatttaaggaaatatatttctatttaaggaaataaataaataattgatttttagataaatgaatatcttatattcattgaatctggacag

SEQ ID NO: 224568 - DNA, 2009 bp, Cannabis indica
aaaaatatatatttttaagtaatttttcaaaataccacatatattttaaataaaaggtccaataatttttatttcctaaggcctacccatatataattgaatatatatgaaaaatacaggtatgatatatgagtattgttattaggtatatcaatgatacttggtatttcctttaaaaataaatatttttcagtttttaaaaataccacatgtgttttaaaaggtaaataccattttggaccccgtattttgcaaaagttaccaattggactatctattttgttaaatgacaaaaaggatccgatattttctaaaatagtaaaaataagaccctgagcataattttgaacaattttattttttaatataaccaactttaagataatttctaacacaaatagatacagaatgtaatcagttttgtcataacatctctagataagattattattaagttttattttgtacaaaaaaataagttacaggatcttatttgtataattataaaaaatacaaggtttattttttcatttgacaaaatacagaatccaataggtaacttttacaaaatacaggatccaaaataataataatttttattttcctaaggcctatcaaatcttacggccggctcaatatatgtgtatataattaaatatatatgaaaaataccggtatgatatatgagtattgttactacgtatatcagtgatgtttaatatttactaggattttcagaaaccaataaaatacaattaagctaaaaaaaataataatcagtgaataataatattagagtttttcgaaaatttcgataaacttttagtattatattatgcatagtactttacaaatgattaccgatattttatatataataacgatttaattaaagtatataatatttaatattttattgtaccaataataatatttttaattagtatttttctaaattacacatcatcgtcgtattatcaaatttgtaggtacatatatgggacagtactctttgggtgccaaaagagggtcgtacgtatgatcgttttctagttataggcatctttttagttttccttaaattttgaataatttatggtatcaaaaataaagtttaaaataattaagaatacacattttttcatgcgggacccgcctataaggataaatagggaagggaatggggatgaggatttttttattcttgaatgttaaacagggcgggcacggagataggacattctctaccccgatgaggacccgtttaatattttatttaatcctgtaataatatttcgtagtttatagtttatatttaattatttatacttttttagtatattactatcattttacaaatttataagttgtgtttaaagtaatacataatatattgcattataaatagtatataatattttaatttttatttattttgataattttatacatttaaatttttaatatatatactttaattttatattaggtaattcactactccgggatgggaattaatatttttaacgagaatggaaacgggagaacactccctactaattaaaaaagtaaataaataaattactttctataacttgtgtacaacctcatataaataaaaaatgctaaaagaagcagtcgtaatcagtatcttcatatatgttaatattgttattggtttaattaagtatcagatctcatatagtttaatataatataacttttagagaatatcattagctaatcacaatatgacatatttaaaagtattaaataccactagtgtctaataataattttccatataaatattgtcataactaaaaagtaaaaccccatgtgaggactttttggcaatgtacatataattaatatttgagatgaaatttaatatgctgataagtagacaatgtccattgttttatggtgtgccaaaaatcattatgaaaagattaagaacattatatatataaatattagggaaaaaaacaggaatattctaaaaatgg

SEQ ID NO: 224569 - DNA, 1940 bp, Cannabis indica
gtgattattaaagtatgttaggaagcatattagattataattatttattttaagtgtgttgcctttaagtccataagagcggtattaagctttatgaccgctgtctaacctacctggcttatgggttcgcaggctaagtcctataaaatggacgcccagcaaaatacaagacgtcagggtaatatggttgagaccggaggcaatcagggaaatcaaattcccaagaatccccgtggtcgtggccgtggccatggcagagctcagggtggtcgtcttgtaaatccaccacaagctcctccgaattgggagcagaggtttgcggaaatgcaagatcaaatccgccaactagatgaagaaattctgaggttaaggcaatagggccatcctgccatgcccgtacaacaagctcaggcccttgtagctctagcggtgccaacaaaacaacctgatgctggaaactgaatggaaccgttatacgaaaggttccgtaagcaagcacctccattgtttcttggaggtcctgatgtgatgaaggccgtgcattggctctctgtgattgagcaaattttgaatttcatgggtgtggttggtaatgaccgggtgacctgcgctacatttcagttctaggaagacgccctagtgtggtgggaattggtgtccctcactcgagatgtcactattatgacctaggaagaatttcgggaactattcaacgtcaagtattatcatgaagctgtgcgtagtgctaagcggaaggagttcactgaattagtactagctgaggggatgtcagttacggaatatactacaaagtttgatcgtttggccaagctcgccgtgggtattgtgccaacagatttcagcaagaaagaaaagtacctggccggtttgaatgtgaagattagacatgatctggtaattactactaatgaagcaacaacttatgcggaaatggttgaagaagctctatgagccgagggtgcggtaaaattccttcaggagccccgagtgactccgaatgttggtgggacccccacccttcctactcctgtctatggtagggatggtggtgattccaccactgatcagaagaggaaagttactcctgcatctggtggttcgtggtagagcaagcggttccgtgggaaccaaggcagaggtagaccctagggttactgttaccctgagtgcccacgttgtaagaaatatcatccgcgagagtgcaaccgaagacatgctttcagtgcggcatggtgggaatttcaagaagattgccctcaggcaaagaaagaagagccgaagtcagaggcaaaacctgtacttgctcgagtgtttgccatcacccaagctaatgatgcagccagtccttccgtggtgacaggtcagctttctatcaacaactccttgtttactgtgttatttgattcaggagctacactctcatatttggctacaagggtaattgctcttttgggtaggccttgtgatatacttgaaagaggttttggaatcctaatgcctagtagggcgttagttatctccaataggcgcattaggtctatgccagttaggatcaaggatagggagttgagtactgaccttatcaaaatggaattaacggagtttgacattatactttggatggattttctgtccaagtattcgaccagtatagactgtaagcaaaaaatggtgacttctcagccagaaggtgaagatccatttgtttatgctggatcagttcaggggtctcggatcccggttatttctgtactaagggctagggatctactacatagtggatgtgtaggatttttagcagtggtgttagactccagccaacccgaaacatttgggcttgaggtagtcagagtggttaaagactttctcgacgtatttctcgaggagttaccgagattaccgccacaacgagaaattga

SEQ ID NO: 224570 - DNA, 1851 bp, Cannabis indica
cgggaccgtggacacggaggttagcaaaatttggcgttttattaacgagtattactttgtggtcggtatggagactgctcacacacattttcaacagatcccagtatactgttgtcctcccttcacattcaagcttagggaaaaggcccagagaattctccaactgccggaggctgctcggaatatcactttgttcaccacagaggccaactttgttaagtaccagcgtgatgctcattcaactcaagtccttgaaggggaggaagaagaaatctaggtcaggccaagctgagggagttgagcaagagaaggagctcattcaactcaagcgtgatgctctgttgaagggtgatgctggagcaaaacagtatgctcaagaatattctgagcaggagaaggaggcttaagaatattcagagtaggagaggtcgcataagaagaagaagactctcccgactgagcaagtacccatacagcatgctatccgaattagggaacctggcatgcctgtcgtgggaaaaggaaaagccgtcctggacgagcaagaagactctttggatgatgacggtccatccgtgcttattcaggagaacgctcctgccagcgttgagagtacttcaacttgcatttattttctttgatttttatgacttcatatagtttatgtcttcttctaattgtgtcatttttctgtgtagaaatgtctcaaaagatgattgaggctctgaagaagagagtagggggagctcgggtttgtctcctccggccaagaagtctaagggtggtgagactccgtccaaggaaaagatgtcggttgaagaggtcattgatcactctaaggagcaacctgttgtggacccttctacctttaaggtcgctaagtccaaaagttctcggggggatccaagcaagtcaagggcggatctgaacaagttagggcccctgccccaactctggcgttgtgcacggagactaggaaaggcaaagacatgcttaaccacgacgtgactgggtcgctcccgaaagttaacgaacaactgactgaggtagacagtaactgtccttggagctgatctttggaggaattttgaaggaaatttctcgagtaagttccctctatcacttttctttccatcttcttttgatagttcagattttaatgcattctccgtacaaactggtgtgaagatggcttacgcatactctcgagccaagtcgggcgctgttaagaatctttccacttctaacacaatgctaagggaagcagacttggccaagaaagatgcagaagacgctgaagatgcatggacccagctcaaggtcgtgaggaccgattttttaggggcaaataagaaactcctcactgctgagactatggttgctgagctaaccaaggagctgcaggacatgccatcgaccgtgcaactcgagacagataatgtttctttgtctcaagaaattactagtctccaagatgagagagagggtctccggactcttcttcgtaggttggaggatgaggtcaaggacaagaagactagggaggaggaactcgaagcgaaggttaagagccaaaaatccgaggtggagtagctaggaagaaaatggatgccttagagacagctagtctcgagattttatatgacatttgaaaggccaatcccaaagcaaattttgaatactttggcgattccacagacatttttcacaactactgcatggctcaggcatccaatgagaaccccgaggcaaccacttccacatctcctactgaccagaatagtgatactccttctgttcagaccgacgatcctccggctccgtcagacctagttgatccttactaagagc

SEQ ID NO: 224571 - DNA, 2343 bp, Cannabis indica
gtgcaccaactcaactcttgagatccttcaagactcgggagaaaagcaagagccaaagaagaagcaagagcaagagcagcaacaaaatatcaaagaactaacatggaatgttgacgaaagcagcactaactgattgctcgtgcatgtattgcctttgcaacacctgggggcaacaactggattgagtaatcaaaattggcttcaaagccttgaacaatgaggctgaatacaaagccttgatagttagcctcaaactagcacatgaagtacgagctaaccacctagacatattcaacgattctcaactagttgtgaatcaagtcctaggtgaatatacaactcgaggtgaaaaatcgtggcctacttgagcaaaatcaaagacttcctaagttagctcaaaggctacacaatcaggtagatccatagagagcagaatgctacaacagatgcacttgcccatctagcaagcaacaccgttgctgacatagacaacttggtgcccatacagttcctagaggaaccctgcattattgttttagaagaagtcgacatgttggatgatactccaacatgaatgacacctatcgcagcttacctccaagttggagccttgccagaagacaaaaatgaagcaagcaaactaagaagaaaagctactaggtacctgatcctagacgggataatgtacagacggagtttctccatgcctctcttgaggtgtgtcaccaaggccaaagttgaatagctaatgatagaagtccatgaaggcttctgcggtagccatgctaggggcaaagcctatccaaaaagatactccaataggggtacttttggccaacgatgattaaagacttgatggactacgttagaaaatgtgacaagttccaggacttttcaaagatcccaagagctctgcccaacaagctcaagatgatccagtctccttggcccttcacactatggggaatagacctaatcctttaactcctaaagggaaaaagaggggtgcagtttgttgtcgtcgtaagactacttcaccaaatgaacagaagctgaacccctatcgataatcacctctaaataggtctttgactttattgttaagaacatcatatgccagttcagccttcaccagaagattatatcagacaacgacgagtagtttgatagtgacatgttcactaatttctacaacagacatggtattatcaagagcttctcaactgtggcccatcctcaagcaaatgggcaggtggaagctgtcaacaaaaccctcaaggacactctaaagaaatgccttgaggaagcaaaaggaaattggtctaaattggtcccaaaggtcctatggtcgcataggactaccgagaagacggctactgggcaaactccatttgctctagcttgctatgaggcgttgttgcctgtagagctagtgccaccgtctcaaaagaaaacaacctacgaccaacaaataatcaacaccctactgacagagttcctcgatgaaatagaagaaagaagagaacaagccaacctaaagctgcaagcctactagcaaaaggtagcaaggcacttcaacaaacaagtcaggagtagaaaattctttataggagacctggtgctctgaagggtgttcctgaacactaaagactcagtagcaggagtgtttggacctaactgggaatgcccttgtcaagttacagagataattagtaagggagcctacaagctggaaggtacaacgagaacatgaaacttgttcttctaccaagatactggaatggagagcaccttcacaaatactatctaaccaacttatagaactctactccaaagtagcgattctacctactcaacattagagtacaaaaagcgctagcactcacgacccttttgggcgtggtctcccactattcttcaatagtggcctctggtttactaggcaagcaggggtagccaattaacatcttgtaatataggcttgtagattcaatttatataagtttcacagcagcaatgaccaattaatgaataaatgataatgtttatattctgtttattatgtctaaaccacttcctcacaaattaacttcttaaagttattcttttagttccacatgcgtactatggtaccctcaaaagacagaacctacgcaaagtctctgaatcttggtgaatagcaagtgaccaagagacttttctgcatggtccctctgtacaacgcatcgaactagcaaaaagaacttatgtagagaaattttaatgcttagtataagctactaaacctacctctaagtcgtctagacatacttcagcttggcaaagtaaattcgaacccttact

SEQ ID NO: 224572 - DNA, 1647 bp, Cannabis indica
aattgtaacattgggtatttttgccacaaaaaataaatattaggtatttaagtgtataaaattggaaacattaggtatttatgccgcaatttagccttattattattattattattaaattctacagtaaatttattacgtaaaaagctatatatttagttaacgaaaatctgtgttaacacttgagtattatctaaggttttcaacatcgatatacaatgtcccgtttaggcgagagtcaaagacataattagttgaatagagtagtcaactcatctaaactgaacactattttagcaaccttttattcgatcaaaatataaatttgaagttgtctcgtttaggtgagggtcaaggttattcttattttatgagcttctaccattattttatatttgtaaactcaattctagatagtcatctttagggatgagtctactagaaatatatcgttgaataccacatctgtgtaaatctaggacactgataaatcgtgagactaaatagtttaaattatatattcatgattatctttcaatgtgtagacaatactataatcatgaataactatatgctcgggatttaatagaatttatatattaaacatacaattatgtgaagaatgcaacataaaatattttctaattttttattaattagtaaatctgattatattaaaatgagttttatttagtgcataaaatcccaatatgtaatacataaataacaataaaaaaatattctcttaacaatattgagtaaatataaatattttataaagttgttcccaaatatcaatattctgtccaaaaaaaattatattaagcatatataaaataattatatgaattggttttgtttgaatagctaccgaaatttctaaaaccgtgaccgaaccagagaatagtaaacggtctggattgaccaaactatttatactagattcatttggtccgatctcaaatggcttggtcaggattgattggggtttaaaattacgaattggattatatgaacacccatactcaaaaccaagttttagggcccggaaatagtttctaatcatgcatacaaatacaagattgaagtacacattcacttaatgtgttttggtcatttaacatgcattgtaagattatacaactctcattgattagttcctactaatattattgtataaacttaaattattaaccttccactactatattagcaaataatttgaaaaattaatgaaatacaattggaatagatgtgtttacaatatttttttataattcaaggagcattttggctagacaaaaagagtttaggagaattaattttggtcaaataaaaaagtttgggggacaaaataaaaaagaatttatttcaatactaatagtgggttcatcacctatagcaaaagacactctatgtaataaagcggatgctccagatcttgcttgtggaatagccaagccatttaacttattatactaaaatcaataattgacactaatctattcaccaagaaaaaggagcactactacaaaattaatttttagtgacactctacagtgactcgcacaaaagtcgtgtgtcactaagtattttagagaatttttagtgatgagcattaaatgaccttaaaattttaatattgct

SEQ ID NO: 224573 - DNA, 1644 bp, Cannabis indica
tttttccactttattttttcattattttaatgctaatgaaatttaacttaaccctaagtggtttcctataaataggtagtgatggcttcaaaaagatgatgcaaactctttccttcagtaaaattttgagccaccttctctgtacctatttcgaaaccctcgatctctctttctctcttcaaaactgaaatcctagagtgattagagtaagtggccacacacatcaagtggtactcaatcatagtgtgtaagggtgtgaagaatccagtttcaagagaaggagattcggactcagatcttggtgatactctgctacagacaggatacaagggttagagatctgagtggaaggagacattaaattccgctgcaaccactgtaaggtttctgaaacttaatatgtgtttatttcatatcgttttagaagttcatgtttaggattttaaaaacatacttgttactaaatctagatcttggtaaaataattccaacaagattatctgccgattaggaggaacttcgcgctgcgataaatcttgtgttcgaggaacaaagacgcatgtttgccgaatgaagagacaaagggataaaagcattaaggtcttatcatgcagagattgacaatcgtagtcggcaagctactatgctgatacgaaaagcctaccaaactgtcaggcagcaacccccgaatgtcatccccctgggtgtaacaggcgaagatccagcgatgaatacttcctagacaataagtggtcagccgccgaatatctagtcacagtttctgcctgtgggccaagcagtaggtgggcagaccttgtctagtaattcattaggagaagtcatacccgacggttctgaccaggctaacagtgccattccacctgtcaaccaagtcaatcaatcactgagacagccaggcatttctgtattcgaaaggttagggatgactcatgatctcagaaacgatctgaacagaaggagatgagtagacgatcaacttggcacgacgatcgtacaactcggaacccgtgcttaaattcctactcagaaagatactgacgtgactcaaattggccaaaatgctgaacaggttagtccagttgtgcaagcacagctagacaaactaaagagtatgttccaaagcatggcccggcagagaaacaatgatctcgagttggaccgtgcttgtggaacccctttctctcccgagatcaatctcctggcgttgccgcacaagttaaaaatgccaacctggaaactgtacatcggaagagaagatcctctttcccacctcaagtatttcgagatgcaaatggatctgcagggggtacgaggtgacgtatgttgcagaatttttcctgctaccctctcggaagccgcccagcaatggtatttcaagctggcccctgaaaagttcaactcctggaaagctttctcctcgaaattccatgcacaattctcctcctctcgccaacttccgttgcatttaggagacctggtcgaagtcaagcaaagactaggcgactctctttgagcatacatcagcacattcatgacggaggcgaccaaggtttcatgagtaactgaagatggaaagttgtccgcgatactggggggcattgaagtcctgggtgaactttggaa

SEQ ID NO: 224574 - DNA, 1326 bp, Cannabis indica
tattctatttttttgtttcccatccacctataaatcttttttccttggtcttctagatctcactttctagtttggtgacagaacaatgatatccttgatgttttgaggtacaacccatgttgtgtgattgtatacaggatatattgacctactatatgttttaagccatgttttggttgtgtaatactgtgaacagtaattgtaaatatttaagttcatctttttcatcacagcaagagcatgagcacatgggatttcatcttgttgaaatctattgtaactgcatgcttttttcttatagattgactatccatgaccttgtttgttgtaccactttaaacatgttgtcgtttattggtttcccctgcagatttggtaatgataatcaatgtattttatattcacaaaactgaaaacaaacttcaatgaaacgattttgcaacatgaagtttaatgaattcttacattttctgtcaatgagtccataaaattgttaattaacttcttctcagcaagtatgtgtcaaaattattgtagttttctatgcatttttcctattgtgtgtgtctattgttgtatcaaagctctcaatgactctattagtgtagtgattggtagttctctacctgctaagtttattgagtttagagattcaataatgttagaagtcatagttgtatactttttatatttgttatgcgaccttgaccatttgtggtatccaacttattctaaatagggtctaacacacttgtttaagctgtgaagctcactcgtatggtattcaaatttcatctctatgtatgcttttgctactgcaaagaatggtttatcaagtttacaaacattcttcttcaaagtttctttaaggttgcttaatatgtggtatacacagtagccgtgagttatatctgaaaatacatgagcagctgccttagttatgttctcatgtatgtttaagatcaaaaactgttcttctctgaccctatatgcttcccttaatttcgtaaaaaactattcccatgagttgttattttttgaatccacaatagataatgctaggggaaaaatgtgtccatttgcatcttttatacaggctaagagcgatgtccctccatatgttaattttattgaagcatctactactacaaacaagtacatgaagctgttatctttttcagtttgcatgtgtactatggttcctggattatagttttctacaacatgtgcaaaaaacttggcaacagcctaaatgactcttttacttttcttcctaattcttcctgtgcatgctctttagttctccatgctttcatgtagttcatt

SEQ ID NO: 224575 - DNA, 946 bp, Cannabis indica
agaccaggactcggacccaaaccgacatccaaaccttaaatcacaccctgtgacccgaaattcgaaccgaaacaggaagcagacccttaaaccataaacccttagccttaaaccctaaatcctaaactctttacactttcccctaaaccctaagccgtaaaccctaaaccctaaatccctaaacactaaacccaaaaccctaaaccctaacctagacgtgggcccagacccttacccatattgagaacagaacccatgacccaaacctggacccgaatgaagacctgaacctagatcaaaactaaggacctaaacccgaacccaaacccagacaagaacttgggttgggacctagaccttgactgggacctaaatcgggaaactgaccttgaccccaatagggtcctgaaataagatcagggcccggacccacactcaaacctgaactcatactaggacctagacttgaacccaaacttaagatccaaacccgaacctgaacttggacctagacttggacctaggatcaggaccttgatgggggacctgggccccaaaccgtaacctggacccagaccttgacaaaggatccagacctagatgggggacatggactcaaaatttggcccaagaacctagattaagacccaaaactggaccctaggctcgagacacgggactcgaccctggacccgaaacccaggaccctataccaagacataaccccgaactcggacccaaacccaaatttaggacctagcccaagactcgggacctaaactggaacaagaacaagatttgagatccgaatctggacttgaggcccggatccgtacccaagcccggacccggatccgtacccaagcccagactcgaacccagaccgggatcaaaacccagtcccggacctggaatcagaatcgaactaggtttgggactagaaccc

SEQ ID NO: 224576 - DNA, 934 bp, Cannabis indica
tttagatttatgccttagtattttgggaattgattccagttttgtttaattataaccagtttctgagaggtattagtgctatttgctttactcattttattgtggaactagttctgttgttaatttatgtttcagtattttagaaactgattacttctttgttttttttttttaattataatcggtttttaagttattttatgttacttattttgttgttgaacgagttttattttaatttatgtctgagacatgtaactctagtgacgatagaaatttcgataactttccgatgacgatgacaactctggtgaatttttcgatgacttttccaataattttttcagcgacagtgactttctgctcgaatttttgaggagatatttgttattaaaaattttaccaactttatttatggtcttttgttttgttttccatattttaaactttgtttattttttaatactatatccttttgtattatttttttataccatataaaattaaatttttattttttttccacatttatgaaaattccctttattaagtgcataaaacccaaaagaatatattgtaatttttttaggtagaattattgttttgtaaaagaaaaataattaaaatattatttaataattcaaaatttgtaagaaaaatgaaatattaattaaaaatttttagatagtcataaaataaataattttgttagttgaacatattatagagtagtgtatatatataaaatattatatatatatgtatattatagagtagtgttaagatctaatttgaatcatttatttaaatcaatgactacaatataaataaaaaaatacaatagccattatactagctcccttatatattgctgtaatagatagcaaatatatatttgtcatttcattcactatatatttttttttttgaattt

SEQ ID NO: 224577 - DNA, 3462 bp, Cannabis indica
gagctggaagcgaagatccacgagaaggaagaagaggtggtggcggtaacgatgtaggcaaagtttgaggtggaggcggtggtggaggtggtggcggaggtggaggttggctaccacgagtaggtggaggaagagtgtggtatggtatatcaactctattattagtaagtgttgatgcacttgacatattaagagaataggggggtgggggtggaggtggaggcgggggtggttgatagcttgttgcactaacaagagaagatatagacgtccaaggtgatggcgatggagataacatagccccactatttggcctactagatgaaaaaggtggggaggggtggtggtggtggtgtaggtccagtagagggcatgagagttttggacaaagaggaaagtggtggtggtggtggtggtggtggtggtggaggaggaggaggtggagccaaggacatgggtgatggctttacataagatgtgttgctacttgaaaatgggggtggggtgggggtggaggaggaggaggaggaggaggaggaggagaaggaggagcatctactcttaaaggtggggaagacaatgttaaagacttactagaaagtatatgcacgaacgaactattagaaagatgtggcagtggtggtggaggaggaggaggtggtggaggaggcgacacaactgttttaggttggggagtatgtactatttgttgttgagaagcacgtgtcactgttgaaacaggggacaaggatgatgttgaaacaggggataatgaagcagtctcttcaattgattgaatagaagatgcctggcttggtgcaagcttcttttggatagagtctaaaggctttatcctatccaccttatgaattttttgttcattggctagatcattagaagccacgtttgtgacaatggaactcagggaagccaccctagattttgtatttgaattagactccttagaagtagctgagctggaaagagcagcaggtgcactattatatcttgatggaggatatgatacatgcactgcatttgttggatacgacacatgcattgagttcacataagagcctttgtttgtgggtatccacctagatactgctggctttgctgatttaccctgagactcttgctgcttagtcttgtgttttgctacacttgtatctgctgctgattttgtgtttgatgttggctgtttcctagtgacagactgaaatttgtcggatttttgcctagtgatatcaacacttgacttttgctgtgaaaccttggaatccaacttcttttccacagcagcgtcttcatcgattccattgtccatctcttccaattttccattagcatcttctttcacttccttggttatggcatgtctaagcacctcttcagtaaccaacattgcatttgttttggcatctccctcgtccacagcaatatctttaactacattaatatcagagtccaccttatcatccagcttatatttcacatcatccacagcaatgtcctttacagcatctatattagaatccacctttttatctagtttgtagttcccatcatctgatggacagtcttggaaagtgtgaggatcaaaatcttccttccaaacttctttgtgaactaactcttctggcctggtgttgcgagttctaggggtatccaagtcccccttcccttctgtcccatccactgcactgctaaaaatctcctcgacctcaaagaattcctctggtgaagcactttcattctcatttccatcttcacttgccaccactgtggtgatatcagggacaacggcatcagcatccaaaaaaagtacctgatacagatatgagtatgattcaactccaacagcttcacaaaaagaaaccacagaagaatagtaatacctacctctgccttaaagtccctgggaaactggtctttggcatcccacaaaacatcaatttcatcacgatttagcaacaaaatatttgaccgcacaaatgctgtatggaacataactctaaacatcatctcctcacgtacaagatcttcgtctaagtggatacactcaagaacaacatccccttgaatacggcaatggatatcgatcttcaccaacagacattctgcctgcagttcgatatcataagaatatttttaatttttattttttaatgctagctttatctttcagattgagttgtgatatttagtacctgtccgtaaaggcgaatttgttttcttgcctttgttgttgaaaacagaagcttcgaacttctgttggctggcgttgaagggtcttgaccataaacccttataacaggcctgcaaccttttcccccatcaaaaagtggaatgagcctaagtatcaaacagtctaaatggagaggggtgtctgatggaggccaatcagcacccaaatttcttctagagatgtactgaagatatctcagctgtgaaggctgtggatttaaaggagataacaggtgaagaagttccctaggagcttgcttgtaaaccatctcaagtgtcttttgttcgccattgtactgtttccggtacaacaaaagacctgccagcatgaaagcaaggacaggccacccacccctttcgcagtgcatcaacaacacattttgctgcccctctaatgacagccagctttcacttgatcgaaggaagtgatggatcatctccagcggtagaagtgggcatccctcgtattgtcgcgggtaatccattactgtcatgtcatactgagacaatacatctgatatttggcttcgcctcaccccttctctaaagttaaaaaccatgaaggaagcatcaggaaagtaatcctgtagctgcgggacaatgccacccaagtacactttgtattcatcttcttccaacacgtcagtggagaagcaacaatcaaaaactgtatcataccagagaaaggaaatattaatgactgtcaaaattctgcgtgttcaatgcacacacatttaaatttccaacggaatagtttctcagtcttatttccagaatttcatttagggaagatgaatatgtgccatcaaaattttccttggaaatttgcacattaaaaacatgaatttctgagaatgttggaatgctggaatactaaaataaaaacttgaaaagattacagagagaataaacttctatactttcttccaaaaaagagtgggaatgaattagttggttaaaacactaacttaaaaaagtaaagagaaattttatcaaccattttgtatttcccaaagttcccaggtgagctctcacattatgccccagatatccgcaccaaatataatcagaagaaagatcatacacattcatgaagcaagtcaagctaaccaagtatgcgctctaactagaatagagaaaactaaactagaaacaagaccgaatgacaacctgagctgccacattataatgaaacagcaaataataatatatata

SEQ ID NO: 224578 - DNA, 2784 bp, Cannabis indica
ctgcacatagcttgaaaaagaccatctacacgtagctcggagaaagaccgactacatatattttgagaaagagtggctataggtagagagccttgatctctgcacagacctcattcccttcatcatcagaagatcccatttttctaaagctgagatctttttcctagcctcaagaaattcctcgatacctgaaagaggttggcactaaagtcttctggggcaggtttgggccttgggttggctggattctctgataaaaaccacgccaacttccttcccagatacacctgaaaccatgccaatcatcctctagaattcttcatcaccccgaggagggcctttaaggtcactcacaaaatctatacccttagggatcacttttgagcataggccatggcaggctatagggtttccctggtttggattagtcggaagctcctcagccttggaatccatcgtttccagctccagttgatgcttgaagtttgtaggaacaaatggagaatggttagttcatctgggtattatgagtttggaaagatgaacttctgaactcataagagacattttgataggaaagagatgatccattctgaaaatggatctcacttaagagccagaaagtttgtaaataatgacaagcttgagccacccttttatacacgaagtcccgtgacaagaaagccaaagattgagaaatctaatggttgaaagttgtgcaaaatatgtagagacgattcataattatccttgaaaccatacaacggctagaattaaaggatgcattttttccaagaaaagatcttgatgaaaatgccctctgtaattattaaaaagctttttttactaaaaaggaacttttcaaggggaaattgttatacccaaaattcagctagaggacacgtgtcaagataaagggaatgtgaatcggtgcaatagcttttatggaataactcaatgattacataagatttagagtatatttgtaatccgctgactataaaattttaggggaggaatcaatgtacaaactggcacttagtgtattggcgagaaaccatacatcgctaaatgcgaatagtgaggcactggagaaagtgacacatgccaactttaaaagtccttagcttgcaataagcaaactaagtgtaaaagtcggatgggcacaaagaacaagtatgcgagatgaccagctcgctatgggaagacttcctatagcttcgtccaactaacaggagcgaggctcacaaccctggcaagtcagaagatttctttataaataactgagatcgacacaaaacatacatcgtcgaccttagaaggatgaatggccccagcttgctattgggatcgctataatcaagtttttctcgagaaatctccagattcaacaattaaagacgtgtttaatacccgaaaatttttccccagtaaaagtgggaaaatcacaactatatgattttcaaatcataaaccgcatttacatttcctgatatctaatcaaataccatgattttaaggataattgctgtaaacatattctggtcaactttctaattactgcctactatgtaattataaatagttgcaaacaagctcaaaatagggacgaaaaaactcatatgaaagaggccctaaaaaaagactcagaaatctgaataagattgactcgtggactatgtagaattttaactacaaaacaacgtaaaaaccctgtgttcatattctatattttgctatctttaatttttagtgtgaaatcaatattgtgaggctcaaatttggataacgaaaatctgcattaacagatggtatgcactgcataccatccgtgcgcgtgctaggggttgcacagtcgaggaaactcagcgctagaggctgcttgcagcctgtccgtgcgcgcaggggccccttcagacaagatcagcccatcttgtccgaggaaactaagacatggctgtgtccgaattcgcctgaacccttaaaataggggaatctgctcgcgtatggggtgtcaccaccgctaaaatcgaaactaagttctgtaaaaaatgaattgctcaattttttccagcatactattaaataaaaataattctagaatgaaaatgcaattattttacataaaaaatttgcaaacattaatcaatcatcaataaacacatagatcaacatgaatgacacataaatcacacatacattattttaaatccatatttcttgaaagtaaatcaattaccatggctctgaggccagttgtttgaatatcttttaccaggatctagacttactaacaagtatgttttgaacatcctaaatatgaatttctaaaacgattaaaataaacacataaaaggtatgagaaaccttacattggttgcagcggaattaaatgactccttccgctcagatctctaacccttgtatcctttcggtagcagagtatcaccaatatatgagcccgaaactccttctgttgtttggattattcatagtcttacacactatgattcaagaatcacttactatggatgggcacacactcaatcactaaaggcttgtatttgatttgtgaagaacactaaggatttcgaaaattatagaagaaaagaagaagaggaagtctcataaacctagcaagaaagaagactaggtttattgcctttgaagcattagttggataatgagactttcttttctttttatattacttctcttagggttaggattgatttattaggaataaaaaatgattaaaatagagcaaaaatagggacctagtgg

SEQ ID NO: 224579 - DNA, 1709 bp, Cannabis indica
agacattagtttaattagcttttgaagatcattaaaatgcaagttgaatcgcatcaattggatcaatattgggggagttacggtaattttagtaaagatttctttagcacccagcgcttaggttgacaacccaatgcccaggttaacatcctgacatcaacctggacattttcaaatcataatcattaatgaaaataaagaatattccatgaagacttcttgtgaattactgttgacaatgactcaggttaacaaagtgtaaacttgggcgttatcccaacatccaagtcaacataggtgatgggtcctagttcttacctccatgtcaatctgttcattctcaaaaccacttaattattcgttttggaaggagataataaaattctcaggatacttctttaatattttgattggaagtgccctagattaacaatacatcaacctgggcgctaggtgcactaggtgccctaggcgcctagtggcttaggtgctcaaaattgaaaatgttcagataatgattttgataccttagataagttcatgatagatcttattcatgtcaatgtaaaaactttgagccatttctagtaagacggactcaaaaattgaaaccctagttggaatttcaacctaggcccttggtgcgaactctaggtagccagattgacttttggggtgctgttttgtctcttttctgtctctaggcctttgaatttgattcttcttgtcttctttgttaataatactaaaatatggtgagctgcaaacaactttgtgggatttaaacacccattttggagtttccaaagtcaacttacgcagggtagggacccctcccaggtcgactgctatgactgagtacttctcaactccaagatgttttctttctttccacgtgtcaaacatttatgtccacatcactagggtaagtttcccgttaaatttcacttcctccacctttgttaggacccttactttgactctttcctttaatgttctatcgctttctttgattaggtcttccacaacttagattcaaatcaccattagaacttcctagtttcttcattcttcatctcaagatctatatagttgggtgcagagatcacttcctttacagcaataaaatttcacccatacttgatagttgtcttcacctctctataggaatctggtagtgagttaaggattataatagcttaattctcatcacttagagcttcattttcaccagaatttgcaagctctatgtgcatccttaaaaattcatttagattttattttagattctgtggccattttattttgaatccaaagatcttttctacaagaaagatcttattgaacaaaaacttatgttggaattattcttccaacttcttacagattgttgctagagttttatctttgtcagccaacctaatgattgcatcagtgacattagagataatgatcccagttgttgaatcaaggaactcttcttgtttaatcttaaaggttccttttggccattcaataggttctaagaactctttaaagctttttttgtgtcagtattgatatcatcatccttctccaaatccaatagtcacatgaacaatcaaacttgtcaatattagtcttaatactactcatgttaaagtttttggaaattaagttagatttagggttagagatttcgataggaacatccaatggaatgtcctcta

SEQ ID NO: 224580 - DNA, 1355 bp, Cannabis indica
gaaagaattgagagtaatgtttggaacctatattttctaaaggatttaatatgagatatcaaacatcttcaattgcaacttgatgctcttttgtatagggaggaggtttattggcatcaaagggctagagttaattggcttagggatggggataggaatgcaacgttcttccaccgttatgcctctaagaggaagcgtaataatactatttcattccttagggatgataatggtaatattgctagtagtatggaagatttgagtaattttgttacttcttattttgaagatcttttccattgtgacggttgtgatacagaggttgttaatcatattcttgattgtcttggtccccctcttgaggatttggaggttgatttcttgcatcagccttttacatgtgatgaagttcaaaaggttgtgtttcagctctcgggagataaggcttctggtcttgatggccttaatgcctatttctatcaaaggaattgggacactgttggtagtgatcttgttcatgcagttttagattgcttaaataatggggctgacttttctgaggtcaattctacgttgattgtccttattcctaaaaagaagagggttagatctcttagggactttagaccaatcagcctttgttctactttctataaagttatttccaaagtcttagcgaataggctgaaattggtgcttcacaaaattatttctcctttccaaagcgcttttgtggctggcagagttatttttgataatattttgattgctcaagaagtagtccatgctatcaatactaggaaacatggtaaaagtggatgggctgccttaaagcttgatatggccaaggcttttgacagggtcaattggcactatttagaaagtgtaatgcttcatttcaatttccctgtctcctttgtttccttgattatgaaatgtgtgaccacttccagcctctctttttagattaatggctcaatcactggatcgattaaaccttctcgtggtataagacaaggggatcctctttcaccttacctctttcttctttgtgctgaagggctgtcatcccttctctgtgctcatcaatcttctggtactcttaagggtatagctatctctaggagggctccttctatttcccatcttctttttgctgatgatagcctcattttttgttctgctgatagggattcctgtagctctctaaggcatatttttcatctttattctatagcttctgggcaggttattaattttgctacatcttccatcctattttctcctaatactccccaggatattagaagtcttttctttaccaccttcgatcttgaggataggccttttgttag

SEQ ID NO: 224581 - DNA, 1426 bp, Cannabis indica
tcaagatatcccccttttgaaaaacttaccttatgcctaattcaagcatctagcaaactacggccttattttcagccacatcccataaaagtcttaactgatctgccattaagacaagttttatcaaaacttgatgcttcaggaagattgataaaatgattaatcgagttgggacaatttgatgtaacctaccacccgagaacatcaatcaaaggccaagctttggccgattttctaattgaagggataatctcaaaagaaaaaccaatcgtcaagcacgatactaaaacttggaaattatatgtggatggagcttcgaatgagaatggctcgggggcaggagtgataatgatgttgcttaataacttcaaattctactatgcattaagatttcaatttgatacttcaaacaatgaagcagaatatgaggctttgttggctggcttgagaatagccgaagccttaaaagttaaaaatcttatatgctatagtgactcgcaattggttgtgaatcaagtcctaggtgaataccaggtgaaaggattaaaaatggcaaaatatttcgagaaagtttgaaagaaattagaaaagtttgattattttaagattgaacaaattccaagagaacataactcaaatgtcgatgcattggaaaaattggcttcacaacatgaactcgataagttaaatctggtgccggtcaaagttttgagcgacttaagtatatgtaaaaaggaagaagttgagatgatagatgcctcaccagcatggatgacacacatagtcaaatatctacttaacggggaacttcctatagacaaaattgaggcacgtaaactattgtattcaataccttgctatactatagttgaaggcaaaattgtacaggagaggttactctatgcctctcttacgatgtgtgttacccacataagctagtgaaataataagagcaattcatgagggcttttgtggagatcatgcaggctgtcaaagtttatcaaagaaaattatctgttaaggatactattggccaacgataaataaagacacccatgaatttgtcaagaaatgctacaagtgctagaggtttacacatatacctcacgtaccaccaacagaattgagaatgatgacctcgccatagccatttgcaatatgaggaattgacctgattggggcactacccacagggcgaggaggagtaaagtacgctgtagtagcagttgacttctttacaaaatggacagaggctgaacctctagtttccataacttgcaaaaaagttctcgattctgttgtcaagaacattatttacagatttggaataccaatcaaaatagtatctgataatgagactcagtttgatggcgaactatttactgagttctgtgaaaggaataaaattatcaaaagcttctcgtca

SEQ ID NO: 224582 - DNA, 1159 bp, Cannabis indica
cttgaataaagtattacacattttattcaaaaacttatttttctctatctctaagcactaaggaaactctcatggaaatagatttaaaaaattatcaagccttttagggtttttagcaaaatactttgttgatagaaactagtctatctcaaataagcacattagactcttttatatagtattttaggtgaacacacttaggattcatacactacctcatttccctcatataaatgagtattaatttattttgcaacaaccatacttcataattttcttatcattaattttgtgtaacatctcttttattacactaaaatgtgataaaccaaaagaagttacaaaaataatcaatcttgtaaattttctccatgttacaaagtgtaagttataattttaggttaaataaatcatatgttacacagtttatttaccaaacacttaatagattttattcacataataatatatattaccatattttaatttacatattatattcacgaaataactcaaaatcagttataactaaatagaaccggttatataacataataaatacaaacaagtaacacgcaataattcaaactgattacaattataaaagaaatgagaaatcagttcctaaaacactaaaacataaattaaaaacaaaactagttctacaataaaaaaatatcataacacaccatacctcataaaatcgattcattttttttttaaaaaaaatggagatcaatttcaaaaactattgaggcataaatataaaaagaaccagttccataacaaaataaataaacacaaataataacacacaataatttaaatataatataaagaaaccgattatatttatcaactacttaaaaatttaaaacaaaaaactggttccgtaagtcaactaaaataaaaactcacacaaaaaaaccagttaaatcaaatagctcaaacaaaaatattcattcaacatgctccaacccaccaaataattacacccataccatatctacctcaaaaatactcattcattatgttatataaccagttctattttagttataaccagtttgagttatttcgtgttattttttatttatttattatgttacaaaacccattatatttccagttaaatcaaataactcaaacaaaaatattc

SEQ ID NO: 224583 - DNA, 3494 bp, Cannabis indica
ttggacaaaaatccttaaattcaccaatcttactagtttaagggaaacttttaacggccagaaaagttcaagggacataatttggtacgtcaaagtttagtgagcaaaaatcctaattagcattttacaaaagtgtttaaaatccagtttaggtcatctagaactgacaaagtaagaaagttactagcaattccctcacaagactgactttaaaatcatacatgcaaccataccgaacacgttacttggaaaacaaaaggtataattgggaaccaccatttcatacctccttaaaagagtgaacatcacttccccaaagccaagcatcacaaccagcatctctagcaccccaaacatcgtttcttcgatcatcaccaacatgtacagcctcctcaggttctaccccaagtaactcacaagccttcagaaatatagtaggatttggcttctctgcttcaacctattcacaaaagatagtttcctcaacacaacagaacacagcacgctttcaccacattttgaagcaaaaggtaaatatttgacttacttcagctgataccgccacaacatcaaaccaatgatcgcaatttagagctcgcaagagaggtctcagtctagtatcaaaatttgacacaacagccaactttacacctgatttcttcagcgctttaaagacctgttcagcctcaggatcacaaaggtgccaagcctttgtatataaacaataaggaataagttagcaataataaaaataatgaaaaaaaataacaacacactttctatagaggttttcagaagaagaaaaaagtaatatccatggtccaaccttgtcagtggtataatagttgtatagttcttcaaagtattgagaatctgaacagccagttgaacaactgacaatatattgccagaagggtctcccatcgtttacatatctgcaataaaacaaagaaacaactacttaaccatttacccaaagaactaaaacaatttccaaatacgaaagaaataaccttttcagtaataagagctaatgaaacaatttccaagttataatggctaacatgacactgtgcataacagagaacaagcaagtacattacccctacacccaaagaacataaaacagtaaaaagttatgcagcattacaaatattgggttttaaggaaatatatattccaattggaatttttttaattttattttttccgattcctgttataagaagtagttgtaattttgttagctaagtcaactcagaagattctcaagtcagacttatataattacaaattaaattaaacacacattattctacacatgagagtaaaaactgcagaatttctctggtaaaaactgttccaaagtccaaacaaagcaaaaaagtttagattcacatgaaacagcggaagctgcccaatcccatgaatctaatgaagttaaaccgaaagaaagagaaaaaaaaaacatcaaaaagttaaggaaatccaaaaatattagaaagtgattttcattgattatcacaaagaaccaacaactataaaaagatagagaacatgaagaataccttaggcgagatctaccccaaggctgctcgtaagcccttctgtaccgtttcaaaatctcagtctccgagtactccactccatacttctctccaattgttctatatatctataaaaagaaaaaacatacacacatgtaagtttatagaaatatacactccaaaacaacattatgaagcagtgaactgcgaactgaaacatgacccagaaaaatcaaacataaaacaaatgcatgcaacaatcaagtgtataatttttgtcaagaaagagtaaagagagaagaaaagacctgggccatgggctgagaaggaataacaagtgtcccaacggcatcaaccaacaaagccttgtgactaatttcaccatacaaggatcttctgtaatccacatagtcttttacaccaagaatttccgatcccatgtgtctcgaaccagctacctcacactcattttgagccaaagccgaggacgagtataacaatggccccaattgtgaactcaagcccaccacgaaacttcccttgcccccatgggagcaggacccagatccaaaaaccggttttctataggtgacactacttaagagtttggagaggttagctctagtcgccattaacgccatcttctaaacttcatttgaggctctgttccactgccttaggcttcctttccttttgtctatatatcaaaatcatctgacaaaagaaatgtattatgtaacaataaaagggaataatgattcacctgaacagtggcttgccgtgagttgattcgcctttttacattaatgccctgggaaaggtttttttttttactagcaatactaattactaagttactaacccttatttatagagaaatgctatctttactgaggtgtaatcagttaccttagtgccccatctcaatacttttatttatattaggattgaacatcaggtaaatttatcgaattttgggttcgcgggttttgggttcaaaaaattgtacccagcccaacccgtaaaatggtcaggttggccgagttcgcagatcacgggtttgtgagtcacgggttgaccgggttgatcgaatcaacgagttgaccttatcaattttattttttttttaaaaaaaactcaaattctatatagttttttctatacattaaattacacatacaaattataaacttataatactataatttatatttgttggattagaataaaaaaacattaactttaaaatataaattataaacttataatacccttaagctataattacattttaagaattcactcattggttaatttggaagaaaactaaataaaaaaggattcagttttgatgagggaataaaaaaaagaggtctagacaagattaatttacataaatatataataatatttgtgtatttatatatcttaaatagttgctagttttagatttatattattatatttatatttaactttgtaatagacaacacaaatatgtcacttatttatttttttaattatctagacaacacaaatatgtcacttggttttcaatggtggtttttaaattttggggtagttgttgatctgagctatgtattatatttagaatactttatggagcttgtttggaggttttgggctagtttcgataggtattgttggatagatgtattcattggaccacatttaatgtttttaggcctatccagatccgatccaattatatgttggatgttagattttaccatccgatccggtccaataaatttcagtcatccaatcgatccaatatctattggatgttggattgggtcagttttatccattgaatgtattttatatatgtatatatattggtttaatttaggtttatccaatattttagacttaatattttttttggatcgaataagatgttagacatttatttgtatagactaa

SEQ ID NO: 224584 - DNA, 1313 bp, Cannabis indica
ttaagttatatatcttttccaagatcaatatcggtcctagtccaatgtatactccatacatccaaaactagcatattttgccaatgttctggaaagaacataacacttatccaaggtgcaagtatactttatcgctgattatcacatcagtgtaattccagtgaactgatgaatcagggacattgtcttttgaagcatataatcacaatcacattccgctgtgtgaataactatatgacttaacagattttgtacacattaaaacataaacaggaaaaccacatgtaatcataaatgacttttaatcttttattgataacaaatcagattatattgaaataggctttatttagggcataaaattccaacataaatacccctcaccagcgcgcgggaatgctgccggcagcctccttgtgtggcatttcacgcccagctcccgtattgtgcgcgcgcggatggcaccaaatgcatttttttcgtttttttttcatgctttttcatggaattaatttcaatttttttgtgtaattttttatttttattttattttccgaatttcaaatctagttatcagaataaaattaattatttatttaattaattttaaatattagtacatagattttgaactaaaaaggataaaaactgatatttttcttaatttgttatctttattttttaaaatttgagtattttatcttatttttaaatttaaggtcagatattttatattctatactatttaattaattttataaaataaccttatttgaaatttaaaataggattattttaatctagaaaattttaaaaatctaagcaaatattttggataaatgatattaatttatcattttattttattggatattgaattttattcttttttttttaaaataacataaaatttgaaagttcgttaccattttttttggaatagatatttaggtttgtggaaaacctaattttcaaatttataggtttaattttgaaattaattatttaatttaattctattattttcgaaaataattatttattatttagatttctcgaaaataatttaattatttaattaatttaaattaaataaatcatatatccaactatccagtttgttgcatgtgtgtgttttatatattgtttattattaaaattttatttataaaacctattattgtttgatctaaattgccattgttaacttgtcgacacatccaataatctgattttaaccaatggttcaattgtcaataggtcgaataaataatttgtaataggtaaatgttgcaatcttctttcatctgtgt

SEQ ID NO: 224585 - DNA, 1686 bp, Cannabis indica
aatataaaacaaaaagtgcatggacctggtgttgctcatggaccttatcctcgagtaactttcagttttacttgtgcatgtactctctcggtcagtattgcgatgagttctttcccctcctcccgttgatcgactatgggttctcgtgcgtcctaagctaacactcggctcgtcacgtcccgtccttctcccttgggtatgggtcgttgcatgccccctgttgggtttgtacgtgccccttccctgttggttcgagaaggatgttggtgatgtctcggtggcgacccacttgtcctaggttgagtcccagaatttccctcgttctcacgggggatttccagttccctggtccctagtcaccttctattctcatttctgtgacaaggctctggttgatcatttggttgttcattctcagggggaccctcagtttccccaagttgttcttcctgagcgttttgtggatcctcttgagccgtctcctgcctcctggttcgtgagccacgaggtctgcctcgttgtcttcgcactctaggattaggttggcgttgtgtgttgttctcttgtgccgccctagccgcggctgcatcacgttccaactcagtgttttgtcagtttgcctcctctaggcgacgcctaagacggtaattttccaactcgacaattggcatgtatcttgtgggatcataggcaccatcattatcatattccataggttgagcacccccgaaggttgggttctccatcccctacttctaggttctggccattttcatgctcaaccctccttgaacgtgtggaccgtgtatttttgccaccttcaggttaggttcttctggaacgagtggtccgcgtagatcgtgagttgggaggcctccgtgagcccattgactcttttctaagacggtgagtagtctcttcaggatgagcctcaacattttctccgttatcaaccatggagaaaggtttctcttttggtcatgagggttctttttgagcttttttcacgtaggctctcaatgaaagtaccaaactgttaatgcagattttttgttaacgatattcaagcctatttcgtgattgatcgacacagaaatagtagtagtaaaagaagcaaaaataacacaaagctttttacgtggttttgcagttaaaattttgcatagtctacgagtctatcttattagatttctctgatacaaaactatggttctttctctaaaggattttttgtcgctctttcaatgtattctgcccctatttatagttacataggagggcagttaattataatcagattgatatcccacaacaataatctcctcaaattgtgggatttgattatgtcccacgtaaaataaatgcggttattatttgaaaatcacacagctgtgatttatccgcttttaccaagtcaatgctaatgtgggtcttgatatgctgttaagtatatctcactgggtcacctagcttggatgacaacaataactctgtcagcgagctggagcttttcccatgtctttctgaggttaataatgtaaatactgtcgtttttactattgaaggcataactctccatctgacaatcgcaattcttgatgacaaggtgaatttcagcagtcaacatcatttgaatgtcagcttttatttgatggagctgactcgacagagtagtggatctcattg

SEQ ID NO: 224586 - DNA, 2162 bp, Cannabis indica
gactcaaacccagtgtcggactcggacccaagtctggggtacgggtgtgggtttttgtcagggtccaagtccgggtcggggtttgggtccgggtatgggtcccagatccaaacactgactacgggttagttccaagcaatgagtcaggggtcagggtcctagtctagttccactttgggtccccggtcctggtccgggtcctaggttacagtccgggtttgaggtcgggtctcggtcctaatttttatggccatgtcccgggtctaggtccctcttccaagcccgagtcctaggccccagtccaagtccagtacccggtcgtgggtcaagtcctagtccgagtttgggtttgggttccgatctcggtttgggtccaaatttgggttcgagtctaggtccaggctcgggtccgtgtccccagttccgatctgggtctaggtttcggggcccaagtctaggtccccaatgtaggtccaggtcctaggtcccgatctggttacattcaggtttgggtccttgtcccaatttaaaatttcaattcagtttttttgttcgggtttgggtctgggtcttggtcggggtctgaatcctggtctgagtttaggtctgggtttgggtccaattccagatcctggtctgggtttgggttcgggttcggtccgagttcaggtcctgggtgcgggtctaggtctgggtctaggtcagggtctcggtctgaatttaggtctcaagtttcaatctcggtctaggtctagtttgggtttgactccaactttgtatccgaatccctatctaggtctgagtctgggtcttggatcgggtcccagatctaggtccttctccgggttcaggtcatggtctcggtggcggtctgggtatacgaacgtgtttgggcctgagttttggtttcggtttgggtctggggctaggtccgagtttggttctaggttggggtccgggtcctggtctggcagttctttttcaatttccagttttgggtcccgaatttgggtcaaggtctcggtttgggtcctggtctgggttcggatcctggtttgagtcccagatttggatccctttcacgtgtctcagtctagtgttaacgtctcgtgtcccaggtccgagttgggttcgagaccaagactagggtgcagttttgggtcgcggccccagttctgtgtctcgagtctggttccatttttgggtctgagttcgggtctaggtttgggtctcgagtctaggtctgggttgggatccgggtctgggtcccagttcgggtctaggtcagggtttgagtccgagtcctagtcaggttatggttctaggtctaggtcgaggtctggttacgcttccaggtccaggtccaagtcctggttcggtcctgttcctgggtcccgatctacgtccggtttcgtttccaatttcgggtcatagggtacgggttcggttccaagtttgggtcaggtctgtggctgggtctcaaattcagacaccgactgcgggttcggtccaagcctcgggttcaaattcggatcctgatctcgggtcccgatctggttccattttgggtgccgagtcacgagttggtacctaggttcatgtccgagtcttgtatcgggtcttgggtcccggtcctagttccgttgccgaagtccctatcctgattttgggtctagctcccagttctggtttgggtttgggtccaagtctaggttacggtttgggtcctcgttgcggttcgagtttgggtctctgtctgggttttcatttgtgtttgggttcaggtttgggtccttgtcgtggtcgttgtcctattcttattccggttccagttccaattctgatttcgagttcgagtttgggttcgatgttaggtcagggttggagtcttggtccgagtttgggttcgggtccgaatctcggtctaggtccggatcgagctctgggtgttggttagggggctgggtctgggtccaggttcaggtctgagtcccaggtttttatatcgatttgagttcgggtttagtttcgggtctaagtcctgattctgatcccggtctgtgttcgagtttgggtcttattctgggtctgggtcttagtttgggccccttgttttggtctaagttttggttttgtcttggtatgggttcgtttctaggttc

SEQ ID NO: 224587 - DNA, 1590 bp, Cannabis indica
tttcaatcgtataactacttgtcacttattaaattagactcaccgtcgtttgctaaaagcaaggtcaaaagttttggtgcttgtattgagagcacaatcaagaatggctcttcattctaaatcttaatggtacaaactcgtaggggtatggttaattcagaaaatccacaggcggtggatcctgcattgcagaacccaggaaacacaagggttctgccagctattaatcctgaatagccgtcgaacgcaggtcatggtctgacgactcctgtggatgaaatcgtgcatggtgtacaagagactggtaataccagtttaccacctagccaggacattcataacagagtcgttatgcctgccaccaatgttcgaacgaccattggagataaactgagatccaaaacctccgcggtgctcttggactcatgcaaggtcatgccaacaccctacatcatgatcaggaggaactccgtgctgcggtaaatcttgcgttcgaggaacaaagatgcatattttccaaatggagggacaaagagatggaagcgttaagggctcatcatgcagagattgacaatcgtagtcgacaagctactgtgctgatccgaaaagcctaccaaaatttcgggttgcaacccccgaatgtcatccccctgggtgaaacagacgaagttccaccgatgaatacttcccagactataaatggtcagccgccaaatctttgatcacaggttcggcctgtgggcaaagcagtaggtgggcagaccttgtctagtaattcatcaggagaagtcatacccgaaggttccaaccaggccaacggtgccattccacctgtcaaacaagtcaatcaatcactgagacagcagggtgtttttgtattcgaaaggttggggacgactcatgacctcagaaacgatctgaacagaagaagaggagtagacgatcaacttggcatgacgatcgtacagcccagaactcgtgctcaaattcccgctcagagagatactaacgtgactcaaattgggcaaaatgctgaacaggttagtcaagctgtgcaagaacagctagacgaactaaggagtatgttccaaagcatggtcgggcagagaaaaaatgatcttgagtttgaccgagcacgtggaacccctttctctcccctaatcaatctcctggcgtggccccacaagttcaaaatgcaaacctggaaaatatacactagaagagaagatcctctttcccacctcaagtatttctagatgcaaattgatctgtagggggtacgaggtgacgtatgttgcagaatttttcctgccaccctctctgaagccgcctagcaatggtatttcaagctggcccctacaaagttcaactcatggaaagccttctcctcgaagttccatgcacaattctcctcctcttgcaaaattccgttgtatttaggagacctggtcgaggtcaagcaaagaccaggcgagcctctccgagcatacatcagcagattaatgacggaggcgaccaaggttttatgggtaactaaagatggaaagttgttcgcgatactggggggcattgaagtcctcggtgaacttt

SEQ ID NO: 224588 - DNA, 1698 bp, Cannabis indica
agagagagagagaaatcccctgttaaaaatcacaaagttccactgtttttttcttctcaaacagaagtgatagactgacctcacgaaattccgattcaaattaagatgatgccaaaaaatctgcccagagaaagtctgaagtaggtgtaagtttgatgttaagcttcaagtcttcttagttgattcaattcattacgctaaaagaaaaatgataaaagggagagagacgacttgaaaaaagtcaaggtttttttcccgggaaaatcagacataaacttgcaactggaaagtttgtaattaaatgttcgtatcattttttttttttttttagtaaaaaagaaaaaaaaattatcacacgcgttagtgagaacgtgtttcccgtggattttccgtgtaagaaaaagagtaaaagaaatacaggttttcttactttaaaataataaaaaataaataatcatgttttagctttcattatcacttttaactttctttttccttttctcactcactagtcactgcttttcaatttatttttacttattttgagaaattctctcactcatttttcaaactatagtactaacaacagtcatttatctatcaaattatttatatatatatatatatatatgtaaatatatacatttatgacatcaattaactcattcattcatttaaaaaaaatactcattacttttttaaaaaaaaaactaaactatacaaagcaacaaattacaaagaaggtaaagaaccattccaaactaactcattatctaatccaagacctagcttagctatcttatgagtaatcacattacaatctctaggaacatgacaaatagctagtcttggactgaaagataacaagttcttaacattaattaggacatcatccaaaacattattattccaattacaagaagcaagcttatccattattgatttacaatcagtcagaagcacatccataggaagattaatcaattgagcccatcagatggcctggtagatggtcttagcttcagcaacagcaggcggcactataccagcaaaaggggttgaaaatcctgttgtaaccctattacaagcatccataaccaccactccaatactgtgttttcgattatatgaatcagtggctgcatctgtgaaaattcaaaagctacctgaagttgttggctgcactgatgctgtagggatatcaagatttaggacctattgcatgaacctgctgcacatctaaaaacttaaaaaagtagttgagactctaatcatacacttcccttgggggaatggtagattgattatgaaaaaagttattcctttgattccataaagcccataagaaacaaaacaaaataccaatattatctttatccagactttgaacaagaccaataaaatactcatcaatatttaagtgtttataattattataataagtagcaaacctggaatatcgccaagctttcctgaatctggagcaatctagcagagtatgcttggtcgtctcaatctccaagttacaaataggacacaagggtgaatcaatcacacatcttttaaagagagatgaagctacagggatggcatgagacaacattctccatacaaaaagtttaactttaagggggtaatagaggaccaaattttagaccagaactttttagaaccagagaaagaagaggaagaggggag

SEQ ID NO: 224589 - DNA, 1259 bp, Cannabis indica
cgagagagacgaagagagagagaggggctgtgtggttgaggcttcgggtccgacaggagggggttgggtggtcacggttgagcgttgacggagctggattggtcgaggttgagcgtcgacggagctcggttgagattcttgagaaaggggcgtcggctgtgagaagggggctgggtttcatggttcagctgagagagaggaagagagagggtggtgttttgaaatgtgaggggtagtttaagaaaataagtaaagtggtcatatatgaccaattttaataactatgcatttatgggaaaaattataaggtattttaagcatggaatttcaaatttccctatgaaatttaagttaatattttagtaacttattaatgctttggaggcttcaaagtaacatattacaacatctctaacttagtacgcaacatctatagttgttaacagtataatattatttgaaaaggtaatttacggttaaactctctgaactttgaaatcgggcacgatatcaacccttagattggaaaaattagggctcaacttctcaatcttcacaatcgttttgtttaatactcctgatatggtgtatagaaattacacgtgacatgaattttattggtccacttaatattaataattaaaaaataaattaaaatttaaaaaaaaaataattacaaatattttttcttttttctttaattgaaaatcctaaaaccaaactcatctttttctctctctttctctcctgataatctctctctttctatctgcttgtgcggcatcaacgatgaatggactaggagtaccgtgctctggtcctcctttcatcctttttcccaaaatccaaaaccccaaaaaccctgacactctatggacttaaatgccttaacccccaaatgccatcgatcccttacagaccaaaatgttgtcgaccccctgtgaacccaaacaggtcgacccttggaacccaaacgttgtcgatctcttgcaaacccgaactggtcattgcccctgtcaaataaaagacactaaagaattctttgtaatgggttttgggtttcaaattttggttatttgttctatgggtggtggtctcgtcaggatcaaaagagagatgatagagagaaggaaaagagagatgtggtctggccaagattggggtttggctggggtggtgttgggtttcgagatgggggttgtgttgggaatattttactaggatctagatttactaacaagtatgttgaattaacatcc

SEQ ID NO: 224590 - DNA, 1724 bp, Cannabis indica
tcaattgtcgagaagcataggcatccaccttgccattttgcataagggcacctcctaatccagtacctaagattgctctatttttggttgtgtgctggtgtaagagttctgttcaagaactcagattgcatgaaggaagaaattgaggttgcattcctaacagtttggtatcagagctggacaggttcttaggcttgattcaaggagggccaagcgtgatagagcgtgaagaacatctagggaaattatgggaaattctaagtttgatttggagaagtttacaaggaagaacgactttggattatggagggtgaaaatgagagctttactagtgcaacaggggattcaaaatgttcttcttggtgctgaaaagatcaaggacaagactgagaaagaaaatatcaaaattctggagaaagctcacaatgtgatcatcttgagtcttggtgacaaggtcttgagggatgtttcaaaagaaaccactactgctggtctttggacaaagctcgaaggtttgtacatgataccaaatctcttgcaaatcgattgttcttaaaacaaaagtcgtactctttcaagatgcaacctggataggctatgaagaccatctcactgatttcaataaaatcattcttaatttggaaaacatcgatatcagcatagaggatgaagatcaagccattattttccttaactcacttcccatggaaagctatgaacatttcatagacacaatgatgtatggaagggattctttgactttagaagaggttcaaagtgctcttatgtcaaaagaattaaagagaaaatctgagttgaatgaagagcaacctggggaagcgttgttgattgttcaaggaagaacagatcaaagggagaaccagtacaataataatcaaaagaaaggaaaaacaaaacggaaaattcaagaagaaatgttacatctgtcataagacaattcacttcaagagagattgccctaaactcaagaacttgaatttaaatcaaaggcacaatcatcacaagaatcatggcaatgctgatgtggttaatgactgggatgacagtgatgggtatgaaagtgctggtgtgatggttgtcacaaatggagattcaggagggggttggataattgattcagactgctcatttcatgtttgcccaaacataaatcaattttgtgattacaagaagattgatggaggaacagtaagatttggtgacaacagattgtctgctattatgggaattggatcaataaagctccaatcttcaggaagaactcacagtgagttgttgcaggtcaggcatgtaccagagataaaaaagaatctcatttcagtggccatgctagacaaggatggatgctcaatcaaggaggaaaatggtgtcctcaaggttcaaaagggtcagaaaactatcatgaaaggtaccataatgaatggtgtctacatcctacaaggtaataccttaaacaatttaatttctgttgcttctagagaaatgcaaaattcttttactctttggcacaaaagacttggtcatgtgagtaaaaagggattagaagttttaagcaataaatgtttacttggaaagaatgtaattaaggacttagatttttgtgaacaatgtgtttatggaaaatctaccaaagttaaatttggaactggcatacataacatcaaatcaacgctagattatattcattcagatttgtggggacc

SEQ ID NO: 224591 - DNA, 1634 bp, Cannabis indica
gccacgtgtggtgtgctgccccagtgcacaccgacaagtgggcatttgtaacatgagcatgccttggtgcttcatcattagtcaagtcctgcaccaagcaccgcattggggtggagagacttttggtgattagctttatttcttttgtatttccattcaaatatgtatagagagctataatcatatatgttcctggaaatcccttgaaaccccattaagctctttaggggtggtgacctggtgacttatgaagcaccttgtcaccagtatgataggggcccagctgtgtactcccttgccttatcaaggccatataataataaaacgatgtttatccatacttcttgtgtatgcttctatgttgcttttgtgctacctgtttgttacctttgttgggccattgcgtaccatttgtctatatgtttacttgtgggttgtgtgaaattgatccttggggacgatttatgtttgcttgctcatgcttcttatttgcactcaacaagtgcgagacatgtatcgtgcctaacctttgagcttgtttgcctccaggcgcgtttaggctgacttgctcgctcgatgtgcaagcaagtgctgcacgttctacctacttgggagtgtccaaatagtcggctcgtgacaccacgcgtgcgcccatcaggtcctcctccaactagcgcgcgccatgtgtccctactgagaagaaaattaaagaaaaaaaaaggcaagcaaaacccatttctcatcacccaaattacacacacacaaaagtttaaaaattacatattttcccacactttacacttaaatatccattttatcttcccaacttatttcacccaaataaaaattcttattttatttttaccctatctttttaactactttttcatccaaacaaacatttattttttccaatactcttacacatactctatttatccattctcttccaaacactaattaaattaattaattaatttattttgttttgattaatttaatctcttaattttgcctacaaatatggtgttggaagatcatttcaaaacacatctcttcatctcatacactcttcactttcattccacactcttcacttttaccatttctttcttaccattttctttctaccatttttacattttgaagagcatgttaagtatgtttatcttttgtaaattttatttcaatttggttatgaacttctaatcttttttcaagattattaagatgataataaagcaaaatgtaactagataagatttatttttgaatgttgcttttccatgtgtgctacattgttcatggagttttcttataaaaattatatatttttcatcttcaatatcacgtattttttattgttaaagcatgttacacttagttcttcattgtgcaaaaatatgatattctttaattaaatgtctttcattaaattgcttacatctaattcttagaacataaatattatattttgtctaaacatagtttctttaattttgtgtagtttcattaaattgtaacacatttaatgcttagaaattataccttttataagtgaagaaaaattctacattatgaaagaaagtcgtgcttaaatagaaaatatatttttggaaaatatagtgtgattt

SEQ ID NO: 224592 - DNA, 1959 bp, Cannabis indica
actaaaaaaatgatataaagaataaaaaatttaaatttaataagtaaaaaatagtaaaaaattaaataaaagaatataaatgtaaaattatttaaaatttaaagaaaaattagtatttgatgtaaaattaaaaatattataacttatacaacatgaaatttatttgaatttactataactagtccgaacttagaaattgatttttatgactataaataaaggagttattccattatagagacacttttaggaggttttactgtaaataatttatgagattcaaattattaagttgtgttactctatcttacagtactcttaataatattataattcaattatatatgtacatgcatgcccttcatgaattatgtcaccatttttgtcaaaccagcttttttatatattatgtaacataaaaataattatttgttttttgtctcgttgtggcttgtgttgtatacagtgacggacccaaaaattttaatttgtgggggcttatttattattaaaaaatatttatacatatattataattattcttactaaatttatttaattttatggggtttttttattattttagtctataattatcaaattaaaaataattaaatttaatttttaaaagataatatttttattagtggggcctatagcccccacaataagttaactgggtccgtccctggttgtataagtttagttttagtttgtttatatgcttggtttcgtatcattgttcaagttaattatttttcttaggtttattttgaaagcagtgtgagataattgtgacattttcagtttgagagatatatataatattaaaaataaattgtttttattatttttataacaaaataaaaattaatattttaatttaatattatcattattaataagtagtgtatgttgattgaattttatacatttatgttataaatgtgctttggctttacttatttattggtttttcaataaagtacttctaaagatttttatgagataaattctaatgattatttattttcttaaaacttctttatgtgtataattttaatttctatatgtcttccctacaaatttgttaataatttatttttattttaataatttgtaaatattcttttagtgtgatgtaaaaaaacaaaatgagtattttacaatcaaggactttaatttaaagctttattgtatctttgcatccatagaaaaaatattttattgtttacaagagatctatatatcttccttcatgtgttggtatcccttaattaattttccaataaaattttttaataacaaatttttggaacctaaaaaaaataataatataacaataattttgtcacaccgagataaatatatacaaagtttgatttaggtaacgatattatttaattagcctgaattatatatttcacattcatttaatatcacgtctttttttagacaatcaaaagatctattatcaaaatttttaaattataaagttaaattatataataattgcataaagataaatatatatattttgtgtgccaatattttgctttttatcattattatttgaccaagattaataatacactttgtttaattaattaatgaaaagtataggaaatctttatctataaacttttctgaaggctcatcgatcaaatcctttggatatatacatatctgtcgctgaaagtattttcgaaatgtttgtgaattctaaagtctaatcacttttttgagaaaattaaagtaaataaaaagtaacaataataatgatcataaaaaacaaatctatatataatatatagaggaaaatatatataatattatagaatactatattaggagaattatagagagttcatatgtcatacatattagctttctcttatagtttttatttttcttttacattttaatcttttaataatttaattttatatatcattaatt

SEQ ID NO: 224593 - DNA, 1370 bp, Cannabis indica
agccaagaccgttgtccatcacttttcctttggagacgtggatagaaaatgtagtttttaagcactaataattattttatcgaaatagtaaaaatttcacttttctgatagtggtacccttttgttaaatgtggtcaaaactcatctcgaaatatttctcctcaataggcacaatgaattttactactaaaacgtgaatatgtagataggtttcgcattatatttttttaaaatggcccacccaattcaaaaattgaaaatgttactctttcatggtaaattttaataagttttttccttactcttacactctttagtgttctcttaaaatctcaccctacacatctcgaaaaatcatgaaatttaatcgggaggaaggcaagattgttgcatatcacttttctattggacacgtggagagcaaatgtagttttcaagcactaataatcttttttaatcgaaatagttaaaatctcactttttttatagtggtaaccctttgtgaaatgtggcccagagccatctcggaatatttttcttctctaggcacaataaattcttcctacgaagatgtgtatatgtggataggtttcgcgttatattttttaaattgcccccttattcaaaataaaaaatgttattctttttaggggaaattttaacaagtttttcccttactcttacactcgttaagttatctgttaaaatctcaccctacacatctcaaaaaatcacaaatttcaccgagaggaagccaagactgttatccatcacttttctattggacacgtggagagaaaacgtattttcaaacacaaataatcatttttatcaaaaaagtaaaaatctcaattttttgatagtggtactcctttgtgaaatgaaacccgctagacacaataaattcttactactaagacatgaagatgtagataagtttcacgttaaatttggttaaaatagccccctaattcaaaaattgaaaatgttcttctttttaaggtaaatttggacaagttttttccatactcttacacgtgttagtttactcttaaaatctcaccctacacatctcaaaaaatcttaaaattaaacacgtaggaagtcaagaccaatgtctatcacttttttattttggacacgtggagaggaaacgtagttttcaaccacaaataatcatttttatcaaaatagtgaaaaccttacttttcttatagtggtacatctttgtcaaatgtggcctaaagccatcgcgaaatatttttcatcgataggaaaaatgaatttgtcctactaagacgtgtatatgtagataggttttgcgttatatttgtttaaaattcccatcttattcaaaaattgaaaatatt

SEQ ID NO: 224594 - DNA, 2839 bp, Cannabis indica
tacatattaagtttgactatagatgtaatataaatgtgtatacttttgacatatagactctaaatgtaaatgtaataaaagataaatacattttaaaaaaaatattagactctaaatgtaaatgtaaataaaaaaaatgaacaaatatatttttagaaaaaagtataattgtgaagtaaatgtaaataaagaaaaaatacaaatttttaaaaaatatatatactatttctccttgtgtgctcctcggtgtttatactaaaagtaatcctaataatatggacatcaatatttaacacgtgacaagaaagatgacattttagagtttagtagtctcgagtcttagcaagccgacctaagagaggtccctagtttaaataaagttatgtaggtgttcttaaatgtagaaaaatttaaaaaaaaaaaaatgaaatataatataaaaatattgttcgaataattatttcatttacgaagcatttacttttttattagttaattcaatttagtattttgataatattattataatttattgtttactgtaactaaattatttaatataatttttttaatattttaaagatatatatatattttttttgaaaaagtttaaattaatatttatttatataattttccaattagtacaaaatataagtcaattaaaaaggttataaaatttgacaacatcgcgcgaagtgcgacttaatcttctagtaaataaataaaagaaaattaaatactctcagattccataatgataagaatgattaatcatgaaatatttcatttatacatattaaggtgctataatgtaataaagattacatatttataaaatttataatgattactctggtaataatactagaatatgcaaagtatacacatctagaaaatgtatattgaaatgtaatgtaataaagataatacatttaaaaaaatatagactgtaatgtaatgtaataaaaaatgacaatatattttgaaaatgtatattgtgaagtaatgtaataaagacaaataacaaattttaaaaatatatatattgtttctccttgtgtgctcctcggtttttatactaaaagtaatcctaataatatggacatcaatatttatcatgtgacaagaaagatgacattttagagtttagtagtctcgagtcttagcaagccgacctaggagaggtccctagtcttacgctcatgttgacttcgagaactctgggatggaagttcagacttcgataaatcgtttccaactcactatccttcagtattttgtatgttacactacaagaataataacttactggtacgatataacttggcaccacaatgggtcgtgcccaattttttaataatctgtacacttgtataaaaacacatttcccaagttttttcttaaatctctatctttacttttctatctttattattattaaaataataaaattattatataattatatattatatatcaaacatatgcacgcgactcccacgctctcaaatttctttctttaccttttattatattatttattttgttaacctcaaaaagtgatcaaccgacaactggttcatggagatctgatgcttgccacgtgttttcacaaataaggatgaaaagcaatagacaataagatttattatagaggtttggtccctttatgatagcgggtaatgacctactttctttttaattgtatttatggtaggaattataaagtatttgttacattattaaataataaataataaatatgttaattatcccccaaatattggtgaataactgatatttctcccctaattttgtaggttgttgaagcccaaattgcagtttgaattgttgtctcggatgaagactgcacaccaagtgcctaccaaatgcaagctgggagcctttcatttgtgggaggttggccggcctatgcttgccatcgggcttgccagcgtttcatttgtggggggctggccggcctatgctggccatagggctggccagaggggtccgaccagacccctcaagtgttaggattttatgccctaaataaaacccattttaatgtaatctgatttgttatcaatagaagattagaaatcatttatgtttacatgtagtttttgttgggttttatgccctaaataaaactccatttcaatgtaatcttttatcttataaatatcaataaagaaacagaagtattttcatcacttatttgcgtgtcatttggttcattttatcatttacttgttgatttgatttataaattcatccaaaccgatatcatatttatatttttgtttattgtgtactcagcacagtggaaagtaatcaagattatgtgattaaatatatattcctagatttatcagtacacagggtttaactgatatgtgaatctacaacatagtttacttgcaccttggataagtgatatgttctttccagagcattggttaaagtaaagcttgggttgggtgcatgagtatgcatcggaagggaccgatattgaactttgaatcatatataacttaccataatatctattcaattcaatatcacctagttgatcctagatcaaatgatcttaatcctgatatggttaggttcgatctcaagagtattgctaggctatttctagcctatattttggatcacttttatgttcgctttttgatgttttaggacagaattacgcttttttttttatgtatttaggtttctcggagttatggagtgttgggttttatgccctaaataaaactcttttcaatataatcagatttacttattaatataggtcagaaataacatttaatgttgcatggtt

SEQ ID NO: 224595 - DNA, 1320 bp, Cannabis indica
ctactaaatcatctaaaatattacaaccccgattacaagaatacaatttatctacaatagatttgcaatccgtttttaaattgtccacaagcaagagaatagaggaggcccactgtagagcatggacgatagctttagcctcagccaccagtggatcaacacagcctgtaaacggcttagccaaaccagccacgacctggttagagtgattcaagacaacagtcccaacactatattttttcctctggatatcaatggctgcatcagtgaaaatctgaaaagccccctcaggaggaatatgctgcaaaattgtttgatccggattggaaacagtggaaggaacaggaacctgctgagcatccaaaaacttgaagaaaaaagtaacactcaaatcatacaagttagccaaaaattctagtatataagccacaacatattgtaatatatgtgtaaagtgtaatactaattagggtaataggggtataagtattcaaagttttatgtttgtaagcggcataaactcaatgtttatttttagtggcataaatactcaaagtttgtaaaattgtaatttttctccagttttgtcagtacaaattttgttttgaatatattaatagaacatttggaagtaactgataagggaaattttatttatactttaaaaatttttaagtctattttattaatttttattttatataaaattcatatttttaattgtattaagtttttttttttcttccaattcatataaaaattcatattttttttcttccaattcaattcttaaaaaatatacctatcaaataaaaataaattatattttaaatattatgataaaaaattatataaacttttcataagagaaaatataaaaaaatatatgagtttgaaaaaattatgaaaactaaattaaaatgaggattgaaattaacataaaataatgtgataattttttttttaaaaaaatattaaaagtaattttaaaaattatttaaatttatattttttttaataataaagtgtatttgtattataataatatagatattgtaaatatatgggcatgaagctattttcttagtaataaattttaaaatacattttttttgggagtaaagagaaaaaattgaataaatttttattgcatgcatattataggaaaattctacaatgcacccctttaaaatagatatattgatgcaccctatctgttttagcatccaaaataattttttagtcaaattttttcccatggtcatgtacgttatacttatttaagacatcctgcaaaattttaagaaatttgaaaaagtt

SEQ ID NO: 224596 - DNA, 2175 bp, Cannabis indica
tttatttccttaattagaaatattctaataattttcatattgtattacagaaacttatagaaatgaacatttttttaattaaaattattgttagaagtgtaaagttttatggttcatgagtattattttgagataattcgtgctactattaattaaatatgttttattattattttatcacattgcaggtttattatatctatattcttcctttggtattttacttttatttattataattaatggtccacaaataaattattaatgccttattatatattatagttatataataggtattatatcaatttttaaaattctaaataataataacaaatggtattaccgaaaatgtttcgaccttctctcttacaaaattatagttatattttatttatatttgtgctaattacaaactgtataaatttattattgagactatattacaataatataattaactaagtataaatatattctttctactattacaaataataaatatcattttagaactcgtattgcaaaagttattgatttgctatttttttttcttaaatgataattaaaaaaaaaaataagtagatgatctgaatttaggatttaccttttctttttgagtgtaaatgtaataccactaactaatatttacaaccactattaaataacaatttcgatcgaccctatgttttgcaacatagaacgtaataatattatgagcataattgtaaaattaattatagttaagatagattagaaatcgagtcacaattgctattgaggttaggaaaagaaaattttaaacttaaagtaaaaacgtttgattataattagaatcggtatatcattatattatattttgtaaaacacaatatttaaattgtaatctaactaaatagaaaaaacaatcactaacttttttaaaacacaatattctattacaaaacgcagatatatttactagtttagtataaaggtggtgtttgtaaattatttatttcaaggtacaatgatcactcatattctattgttattttatactgtgtactgtgttaagtttttaatgttgatttttagttgttgcaatattgatttttagttgttctgtttcgtgttctaacgttgttttataaaatacagtatttttaaaaaaaaattccatgtgacagtatttttgtaagttggcttaatagtaacatttgagtgagaggctttagtttgggcccaatgtctttcaaatctcagcccgttagagaaggcccatgggaagcaaccggatccatctagaaagctcccaaagcagctagagcaatattctgaggcggtttgtagaatgtctgagaaagtacggatttccactcatctatactataaaaacagagtcggactcgtctttggtcagaccaaaacagacacacaatcaactaatatactctgaacaatctttctcacctttctaagttttctaaatttctatacacaaaacaaaaatggcgatgattccaagcttgttcggtggtcggaggagcaacgtcttcgacccgttctctatggacgtgtgggatcctttcaaggacttccctctctctgtcccggatatctcgaaggaaacttctgccatggttaacgctcgagttgattggaaagaaactccggaggctcacgtgttcaaggccgatgtaccagggcttaagaaggaggaggtgaaggtggaggtcgaggagggccgagtgctgcagatcagcggagagaggaatgtggagaaggaagacaagaatgacacgtggcacagggtggaacgcagcagcgggaagttcttcaggcggttccggctgccggagaatgcgaaggtggatcaggtgaaggctgcaatggagaatggagtgctgactgtcactgttcccaaggaggaagtcaagaagcctgatgtcaaagctattgagatctctggttgatattgtgattaagagaaaattatggctttggaggaatgtgtttttgatgagagttgtgaaaaatatgtattatgaaataaatagtgagtaaatttgtaattgatccaccttttgtcttgtcttaccttgaagtttttagtcattttaagaaagaatcacgataaaggtctatgaatatccagagttaattgaaatggataccgatacttcaatttttttt

SEQ ID NO: 224597 - DNA, 1618 bp, Cannabis indica
ttccacctaagtgaaacctttggcaactaatattgccttaaagcttgctggctcatcctttgtcacaccttttttaatctttagaatctatttgtatgagatcaccttcttatcctcagttcttggagccaatacctgtgttttattctttctaagcgagtttaattcatcatccatagcccgagaccactcattcttgtactttccatttaaagcctcgtctatactcaatggttctggtatgtcacatgaatgatctattgagaaagcataggcaatcagatcagcttcggcatgctttggtggtatatggatatctcttctggttctatctctagcaagctgatagtcagacaaatctggtttttcctcagtcttatctggagctgtgtctgtactgtcattcttctaacctattttaaatcctttaagctcaatttcaaactctaccaaatcttccctctttctaaatgaatctgcatcaggtaacacactacctttctcggctttcaagtgaggaaaatcattttcattaaacacaacatttctagatataattaccttaggcttcccatttgggtttatgcagattctataaccttttgtgcctataggatatcatataaacatgcctttgacaaatctagcatcaagcttgtcatcggattgatgtacatgtgctgcaaatccaaacactctcaagtgtttcaggtttggtatcttcccataccacatctcatatggtttcttcaagtctatgactctcttaagactcctattaacaaggtaacaagtagtagctaaagcctctctccaataaggttttcccaaccccaaactaagaagtaaacatctaactttgttcaaaagggttctattcatacactcaacaactccattctgttgtggagttttcacaactttcctatgcctagttatcccatgctcattacataatctatcaaactcggtattgatgaattctagaccattatcggttctaagtgtcttaacctttaaatttattttgttctccacctaagctttccatatcttaaattgttgtagacattcatctttcgttttaagtaaatattttcaaacacatctactaaaatcatcaataatagataggaagtagtgtttacctgaatgtgttgggattctacttggcccccaaagtttagcatgcacatactctaggattgtcgttgtgttgtgagttgctgctgtaaacttgatcttgtgttgcttgccataaacacaagtctcaaaaaattgtaatgcacatgtctaaagcttttcaatgactcccttcgggtgcaattccctcatgccttgttcgctcatatgtccgagcgtttgatgccatagctgcatatcactttttaaaccttttactgtgtatgcctcggccacatgtacagtttcaccctcgagtacatacaacccatgtactttctttcctttcatcactagcattgaaccttttctgatccttagactcccattcaaggacttatagtcataactttcatcttccaaggttgcaagtgatattaaattccttctcaactctagaatgtgcctcacattatgcagaatcttcacttcacca

SEQ ID NO: 224598 - DNA, 1615 bp, Cannabis indica
ttttttattatttttgtattgtttttgtaaatactgaaaaaaatattaaaatcttaaaagtgtaaattagattagcaggtgtcttaccaacttgtaagtaaagatgaggataaacagagtggcttttgagtatgtagttgaggttatatataactacatatggatgtacaggggataatcagaagggttacagtttgaagagatttgtgaaggatggttgtaactgtttgtctgagcaatatattaattttattcataaaaaagaaagtgaaatttttttatcttatgaaaattttcattaaatttaaatttgtaaaactaaatattattaataaaaacttaatataaataataaaaatcaatttgaattagtcttttttttttatttgaaagacagtacaaacaacaaaacaacactaagtagggaaacgcatatcccaaattaatttgcattatttaatcctacaaatttatatatttcaaaaggatccggtattattgaagacgctaacttttgctggagttaattttattaatttgaggttaattccagttgtggttggatgataacccaaattgtttggattgtgtttgcacttttggtgatattatcaattacaaatatatatagtttgtttgggattttgataatttatagggggatagaaccagacttataatggttgtgtgtgtgtatatatatatatatatatattaattagtagtgagaaattgatcttcattgagtaagaaagtactataagtggaaagcttttggctttggaggacacccaccccattttctattttatctcatggagagacaacaaaatcttatgctctgttttgaaagtagcttttgtatataataataatactgtcatgcaataacacaaaaaacaccacaaataaaatcccttgcttttcgaaagtaagactagaactttgtcaccaatacctaaagaactttgtggagagctcaaatcgatctagctgtcttataaatatatataacacttttgaaaaagaaaaaactatgatgaaagcatatgaactatatattgaaattgtgtacgtacatatttcataagctatggttgcatgcgctttccaacctaaccagccattagattcaagagcatataaatatatatataaatttaataatgttaaaagtacatctttccttcataaagacaatgcaatggcaatgcatgcattttaaatacttatctagcttataacatgcaccaccagtcaaaagcaggaaagctaattatatgttgttttttaagaagaggaaagttatatgtaatttttaagttttctttgtatataagactcatttgaattgaattcatgtaatttttataaatagctaaatatgacccacattaactaatttttgaataacagaactaatcctttttattaataattagttaatatttaatttaggtgcatatatatgttatgcatatatatatactaggtgaatgtacgtaccgagccacgtattgctagtttcatttaagattttggtctttttaagattttgaatgtattttattttaaagattgcaaattttttgtgaaaaaattaaatatttatatt

SEQ ID NO: 224599 - DNA, 3028 bp, Cannabis indica
tttcatagagagctaaagaaagacgtaaaacctatagtgttactgctaccatggttttcatacgaaagatggttcctaagaggactcttcaaggcggcctcgagaatatcatggaggaagtaaatcccctatcgccagagcacgcccagttgagcaatgctagaggttgggatacatccaatgtgaataatcgagaggacgacctaagcaatcaacatgatgacatcgataatgaaagagatgatgagaatgacaaagaggaggaggacgatggagagtacataaaagatgggtattataaagatggctaccattatgagcaagaccctgaagtggttcgagtgtcttaagagttgctcgaaaccagacaaaagctggcccatcaacaaaagttttctcaaagaatggagaaaatgatggcttgcctttgagccaagttcggagatctagatgatgggaattctgacaatgacctctcagtggaacgcgtcagaggaaacaccagacaaaaccctgccaatgttggaacttttgctcctgtacaggacaaagggaaggcaaaggtaagtgaacctaagaacccaaatgctcctacacttccttaaaaaaacacgaatctggccaacaggccttctcaggcacagaaggcaaccaatacctccaggctcagatccccttctacctagaaaggccatgtagtgccaaaagggattggtacaacattacccaagcccaagggaaggaaaaactgctctagtaatttagtaaactaggacattgggatatggggacagtactccaatgatagttggtccatgttggatctcagaaggcgtctagacgctaagtacgaaaaggcaaaaggtgagaaggcaaggccacgtggtaaggacctcaaagaccacttaaatgacaaattctgtggaagagatctctcagacagtaacaccaaacaaatggaagaacaaattgatacattgacgaagttggtccgaaaataaagtggggccctcactgatttagaagatgaggacccagaggttccacttttggagaacttcaagatgccccaaatcgagctgtacgatgggcacactaatcctaagactcatctagccaaatacaacaagaggatgcaggtgatcagagtaagtgaggatgcctagtgcttgtgcttctctctgacccttatgaaatctactaaagattagtggaagagactggctccagatcaatccattcctggaaagaactatgatcttccttctggaaacaattcattggtgcccatgactatgacatagaaatgggctccatcactaatgtcaagcaacagatagggagagcttgaagaactttatttagcgcataatggaggcagcacccaagaaaaaagtaacggatgacatgaaatttgtggccttaaatcaggacttgcagttggctccctattgtgcagggaaatgcaaagaaaaagggtgagatgttgtctgaattcattgccagggcccaaggcttcattaatttggaatgtacatattagtaagcatttggagtccttccggcaccaactccaattgcctttgcttctaggttcgtttcaccagttcctgttcttggaacatagtataccctgacagtctatagaacatctgaattcgtataagcacctatgcaataccatctttttaggtatggagtggcactgactggatgcagtattactcccgaacagttgaaagtagaatttccaaagaagaatataagttagtcccaaaacaagagaggaggaaatgatccgagacaaagtaaaaattcaaagaaaggaaagaaggaatatgaaccaaggtacaccgactccagcctagtgcatacttgagagaatgtgtacaaagcaacttgcaacatggtccactatataaagcccccatgaacgcctcaagggggagggttcaaaagagatccaagtaaaaggtgtgagaatcacaaagaagtaggacactccacaaatgaatgtaaccacttgaaggatgagatcaaaatgctggtcaaagtaggaaacttgggacagtggattcgaattccaattatctatcctagacagggggttgatctagaatagttggtcattccaggatattagggtaacgtaaatcctctgcaaagggtaggtcaccctcaagctcctagatcgcaacttccggcactccttgctccaccagctctggctacagtagccatcttggctccgggactgagaaacccatatcccctaggcctaacttttccattagttgatggacatgtggctacaatatttggaggaccacaccatgaaggaagcaccaaaaactcccagaaaaggtatttgagggagttaggcagagaaggggacatgtgtagcattgtccaatcaccagctcaacatcctcaaataatgaatctacctattactttcacagaagaggatgcctaacatgtgcattttctccacaagggccccttagtcatcgaagcccaaattaccaacaaacgagtttccagagtcttgatggataatggaagctcagtgaacatttttttcaaatttgcattctaggaaattaggctcacggaggtagacctctcaccttttgccattcagctgcaaggcttcaatggggatgctctgatgtcaattaggaaaaaccaactccctatcacccttaaaggagaaaataatctttgtgccctcaaacattgcacttttgtggtagtggattgtcccacgacatacaacgcaatactaggacgtctagtcttggtagattttggaggaataacttccataaggaatctatgtattaagttttcctgtgacaatggatgcgttggagtggtcagggatgaccagaagagtacaaggagctcttattgttggaattattttaccaggatcttagatctactcacaagtatgttatttaacatcctaaacatgaacttctaaaacgatatgaaataagcacatataaagtataagaaacct

SEQ ID NO: 224600 - DNA, 1519 bp, Cannabis indica
acagacagatttaccctttcctgcacagtaaagtacttgtgagccaagcccactaaaacaacataaatatcattatacattataaaacatatcacatatatattaatgccattacacttattgtctatttgacatagacctgcatattacgcccacacgcctatttatgtctatgtggcatagacccacaagttacgctcacatgtctaattacattaaggccttagaacagtttatctcggttataattatcaagtctaaccaaattatgccttgaacgcataattctttacttcaacatatatagcatgtcatatcgtttaaaatcatttaatcactagggtaataaccctaggccatataaccgctcactttagggtaataatcctaatcccgattctcaattaatcacaattataatattgagcatgagcaccagtgcgcttaactctacatgctaacaactgtcttacctaatgtcccaagtgtgtggagattccaaatcctagggtgctcctgaacaagtgacagtaatcctagtcacagttctcgggattcacaaatagggttaatccctaaatccagtactttcacataatcatacaattggcatccaaatacagattaacatatagagctcggaacgagctttctaacgatatactaaacaccttaaacggattctaaatcaaaaggttatgaataatcaaatctaatattcaaaactgcccagaaacccctaggcgggccgcgacacctaggttgaaaaaccaaggatttcaagtgggcaggtcgcggcgctcatagagcgggctgcgacacttgggttccaaacccagaaaataccacttttcaggaaccaaaattcaagcccaaacataccaaaactcaaaaaaaaaaaatatgctcaaactcaaactcattattcacaggttaaagccatcaatatccaaaaattaaagcacaaaaataagctttgaacaacatccaaatatgcaattacataactcatcatgcatcaaattccacttctcaagcttgaaaactcacaccaaaatctcaattacaaactcaaaattttagaatattactccaagaatcaagctcaatttcagtattttaaaaccccaattttcaacctaagaatcacaagaaaatccagatgcaaatcacaaaactttcaagcttactcaacataaaaaccacccatatcacctcaattcttacaaacaagcattcaactaccaaaaatactaaaatacctaaaatcatcataatattcagcaacaaaactcaaagcaaagaggtgaaaaaaactacctcaagttcttcacaaattctagcaccacaatcttcaatcaccaagcaacaatcatcaacattcaatttgaataagattaggaaagtatgaatatggagaaaaagagagagagagaaagagggtacggttatgggaaataaaaccagaaatgtgtttttcattttcctaaaaatctattttgttgaaaataaagtcaaa

SEQ ID NO: 224601 - DNA, 1255 bp, Cannabis indica
gttcttagcttatcattccatgctcttcgggcttgttttagtccatagatggccttttgtagtctgcacacatgagttggttgagtagtgtcttcaaaccttggtggttggcacatatagacagtctcatttaaagggccattcagaaacgcatgcattgctcacatctaactgagatacattccagttgtgagttacaaccaatgaaagaactgttcgaatagtagttggtttgacaaccagactaaaagtctcatcaaaatcaattccagcttcttgtaagtacccttttgctactaatcttgacttgtatctgttgagagagccatctttgttgagtttcactctatgtatccatttacaccctgtgacattcattgaaggatcatatggaacaagaatccatgtgtttcctttcttcacagccgaaagttcactatccatagctccatgccactttggatggacaatgcatcctttagtgttctaggttcagtaggtagaaatgaatcaagcaaagggtgtttagtggctaggaatgattttggtttgaatatgctactttgagatctagtgcgcatagcgtgggttcgagtgatgcacggttcagctggtggttcatttatatttggctgagacattgtattaggtaccaagctttgacgagtaggtagtggtgtgttgtcaatggtaggtgtggggactataggagagtggttggtattttgtactgaggtgttatggtgaggtgatgcatgagctgttggagtaggggccatgttggggggctgcgcgggtgtaggtgcctggtgaacagtggtaggaccatgggtaggtgtactatgaacagtaggtggcattgtaggtgatgtagagaaatttgtagtaagaaaatgactagtcagagaaggttgtaccttagtggcaaaggcatgtgaggatgctagaaaaagttgttcatggaaaacaacttttttagctatgaatagtgtaacgccctgaccctcagggacgccacgtgtgtgcttttataaacttattatcaccaatctatcaattttggaaaagtgtggtttaatttgaatctttaattaaattcaaaataaagacttccattttaaatactattgtaatatagggatcccctgtttataaaaaaaaaaaaaaatctttttacaatagattacatttccaaacatagaaaggaattcgatcctgcttcctagaagccaagaccccacggttgatatgtaca

SEQ ID NO: 224602 - DNA, 1218 bp, Cannabis indica
gggaggttgagttggtggaacttttgcgttgttgttacttttcagtttattaatgtagcgcttttaggccccattacttattccagcaaagtgtggacctccaggaattaccaagacatcatctccttccaatggtggtgccatatgaacattttggccttgtggcggggctggcgcattgtttggcatggcctgggcattattttgggcctacgctagtgtttgggcatttgttccctgattgttgcgcgcataacgagcaagtggtctggctcggatgagatcttcaatttctattttttaaggctttacactcattaattgtgtgaccaacgtctttgtggtaccgacaatactttgaggtgtcttgaatttttctgattcctttcattggctcagtgactctaaaattcaaagttttctcattggtgaggaaaattgtttctggggtttccatcaatttctgtgaagatggtgtaaagagggtagttagccctccctttcttagtattgttgtggtccccaccatgttcgtttttccttttattggaagtatttgcactagaggggttgttgtttgttgaagtgggagtagcttctattgctccagattaaagagggaggttattagccaaccttgcctcttccctattaatgtatttttgaggtcttttcatgaactcatctatggtgggtgctcccttttcttgcaaactatcccaaaattgggacccattagcaattcctgcccccagcgccataagtcctccactatcattaacgtctctagccttcgtggcttcgacattaaaatagttgatgtaggcttttaagctctcactcggttgttgcttcacattggcaagggaggaacattctaattttttgactttgggggtgtagaattccttcttgaagtcacgtgagagttgatcccatgaggtaatagagtgcctcttaaatttcttgaaccaagttttggctgctccagtaagttctacaagaaataacacacatctcaagtcatcaactacttggtgggcacgcataagtgtgctaaagtcacttatgtgtacttcgagatctgtactcccatcgtacttggttgtggtcaacatcttaaacccttgcagatatggtaaaaccaatattctaggagagtaaggctctgactcctcatccaaatcatacctagcgacattttggttgttggtcacc

SEQ ID NO: 224603 - DNA, 1791 bp, Cannabis indica
tactcactatacagctagcaagccataaaggatgagtatgtcgacttgacttaagagatgatctacgggttcaagctgcacaactccgaattctaattttttcttacatgggggatgcttcttttccttgagagcacactagctgaagggaaagagtaggatagaggcaaatcagaccaccatctagccaaaaggatcatcatcgggtgagttcaacgaggtcatggttagcccacccactaaggaagtggccaactagggttttgaccaggtggccggccaacctagaaaggctatggccagcccacacttcggtgatccagactttgtagtttttgattcagctccagctacacatgcacacatgtagcttcagtttattagtatttcagatttatgatttcattagcatagacattttatttcatgttcagtttggcctattagccttttacttttgaacactacttattttcagccttaaggcttccatgttcgtacttttggcctataggcactttgtttttgaacaaaactacttagacctgaagctttttattatggatgtgtgaccgtctaggcggtctttaatccttgctatcttcttattgccttgacatgtaagtatcttgatttgcatttttaatgccaagctgaagtatgcctgcacttgacttagaggcaggtttagtagcttaaactaagcattaaaatttctctgcataagttctctgtgctagttcgatgcattgtatggtgtgggtgccttccaagtgagcatgcagacttacggtctcttggtcgcttgcaattcaccaagtttcataaaccttgccttggaattttcttggggttctacctattgtacgcatgtggaactaaaaaaagaataactttaagaagttagtcttgtaagcaagtggtttagacacaacatatttgaacataaacatagttattttattcattaattggtctttgttggtgtgcaacttacataaattgaatctacaagcttacataataaaaatttttcttctagatataaaatagctacccctacttgacatgcaaagtagaggccactgttgaagaatgatgggcagccatgccaaaacgaccttgagcactagctcttttaatctataatgaggagttggtagaactactactattgagtagcattttataagctggtcactggtagtacctacaaaggtccattgtagtatcttggtaggagaacgagctccatgttctcgttgtaccttctcagcttgtaggctcccttactttttatctctgtaacttggtaagggccttcccagttgggtctaaatactcctgctgcaggatctttggtgttcaggaatactccttggagcaccaggtcccctaagaagaatttcgtgtcattaacttttttgtttaagtgccttgcaaccttttgctagtacgcctgtagctttaggttagtttgatttcttctttcttctattttgtcatgggattctgccagcaaaatcttgtttgtatcgtggtcataggttgtccacctgtgagacggtggcaccagctctacaggtaaaattggctcatagatataagctagagcgaatggagtttgcccagtggctgtcttctcggtagtcctgtgcaaccataggacctctaggagtaattcaggtcaattcccttttgcttcttcaaggtgcttcttcaaagtatccttcagggtcttgtttgatatgtgggccgacaacagagaagctttttgatgatgccatgttt

SEQ ID NO: 224604 - DNA, 2177 bp, Cannabis indica
ccatcactttacatattagtggcaacattatatgttgtgtcttataaattagtttaacatgttcttaaagacaataaactcttttaaatagaaaaaatcacttcactttacttctcactattttttttctaacataggttaccattaaaaaaatatatgcacttagtcatacgagttgaagtagccaagtggcaacacgtgtaattatatacctacaatttaccaaattatatattaaaattaaactatgactaaagttattatataataataattttttggaatgaattttactaaaattgttcttatttcattatgggtcatactataaatagttatagatagtgatcgaaaggttttgtatgattgtaaattaattgtttaatataataataataataataatatggtccgtacatccacaatggtagggtggctcactagacaggacaatttaacaattagtatcatcacgtgatcaccacaacttctttatccccccacacacacaaaccaatcttttcccatggggtataccccacagtaacacaaataggcttccaacttctcggcccctttaattatatatttatttttagaataattgaatcataaaatttttaattttttttatactatgtaagttttatactgtgtattgtgctaagttggcaaatgttaatttactagttattttttagttattttactgttgtttttagttattatattatgtgttctattgttattttataaaaacacagtatttttgaaaagattttcgtgtgacagtatttttgtaaaagttaacccgaatttcagtatttttgtaagtttccctttattttttcttatattgaatgtggttatttaacaaaaattgttagtttaacgattttttttttattgttttcttataaaattaacagttaaaactaatgtcgttaaattaatcaattaattattttttttaaaaacaataattttaattgtctaaatttaatttatatattaaaatataacctagataattatttaaagtatcaataatttttttcatataaatcttaatttaaatttaaattaaacgttaattcaattaattaattatattttataacaaatttattaattatattgtttaaaatatctaaacttatgtgtttaaatttattaatcatatttaatagatgatgttcgttgtcttctgtccttttttcttagagttactgtcattcatgttcgtaggcatgctaatcaagtggcccacgacttaataaagtacgctctagagttggatgaaaatgtcatttgaatggaagaaatttctcatcctattttctctattgttgtaaatgacctttgatttataataatagtgaaaatttctcaaaaaaaaaatatctaaacttatttatttattttcaataaaattagttaaatatattttcatataaataaatttaaaattagtttaaattttatatattttaaaaatataattgaattgaattagatttaattattattattatttaattattggtgtgttctttttgtccctatcaattatttcaggacacattacttatgcggctgcatctggtcaagagattaactttgagaagtcggttatcacttttaatccaaatgtgcaacaggtggattgagatggggttctgagagtatgggggttgacataagtgtggctactcatgacaagtacctgggcttgcccacggtgattagtacaaatataatttaatccagttttctaattaaatttaatactaactaatccacaattcaatttggcataccaacttttaccttaattgtttttcttcttgttactacgaaagtagttgcttcactttcagccactcgaataaggtctaaacctttgtacgggaggaaaggcctctcgattaaagcactaacattgccaaggaaagaaaaaaactgtaattgaaggcttaaaagagaggagactagagagaaaagaaaaaaaaataatcaatgaattaaaaggaaaaggattgaaggaaaagaaaagtagagaaaaaagggattcttttttatatatctcttgtattgattttcctcagtgtataaacaatgatttttacaatgtatttatagtacagggaataaaaattctaacaagaaaatattcc

SEQ ID NO: 224605 - DNA, 1615 bp, Cannabis indica
tcagatcaaccaacaaaatccttgtctttttgtttttatttttacccgtctttttaatttacggtcttaacaattttaagctttccgcttatgcttttttatgcataatgccgagagagttgagcgcccgttcatgttttaatgtttgtcttttgagactcggagactaagttgttttaactatacaaatatgtttgttgacatcttctcacacagaataatttgcatttttaagcatgtggagttggaaataggaggaatggctggaactttaacttgtaatctattctctctcctttttttttctttttatgtttattgttggattggcaggaaccacttcagtcattcattttagtgctaatatggttcaattcaacaaaatcatgctagagtattaaaaaatatgcaatgaaactttatagagtaaattgctgcataattcctaatagtgtcacctcgttagcaattaacttttaaaacttaaattttagcggtaaaacttcttaaacttaagttttgttagcatttacttttttttcatttatttttggtctgttaattactaagttggatgtctatgtgttgtgtacacatgatattgtctacatagacacaatgtacacatgatattatattattaactcacgtaaataaatatttaaaaataaaataaaataatgaaactgaacaaataaaataaattaattaatttactaaaaaaataatttttttttctttttttactaaataaataaaagaataaataaaaaaaccttaatttcccttataaactaagctttcccctttcctttcacttaatcccacctctttctctctgttcattgtcacacaacggctatgccacgatggctatccttcagtcgacaatgatcgaaacggaccacaccagtgtgctcgcaacctctggaaaccccttaccttgactccctctcgttgtcactctcgtctctctcggttgtgtacggatggagctaacttcgaccaccgtgggtccaaacaaatgccatagatggctttgcagagttctgaagaccctagatccataactcttaaaggtccctcactgttctgttgctgtcaaaagggatcgtcagagctgtgagttttgggtctgatttgggcacttccgggtctcaacgagccaaacagatggcgggtacaggttctcatcgtcaaaggtttccagatcttgtagcttttttctctaatttttttttttcatttttgtaacgccccaatttctcgagatgtaacacacgatagtccgtataaaataattaagataaagacaatgaaagacttttttattgaaaaataactaagcatgcaatctcaatattttaaaaacaaaacatcaatttattcataatctttaaattataaagctttacaaaaatattggtattataatcttaaatgaaacaattaaaatcaaaacgttgtaacaatcccctaacatgtaatctatgtcttaagctcacaatctcaccgtttggttttttttttacctgtacacagagtacccgtgagctaacgcctaataagaagagttatgtctcccacatgttgatcaaacatgaagtgtaacttg

SEQ ID NO: 224606 - DNA, 4165 bp, Cannabis indica
gtcccaacatcagcatgattatcctctattctgaccgtctccaaatcaatcattcatttttctatcttctctctgatccagtagagtcttatatttatatgctttctcttttaatgataaactgaattcttacaaaggtggatggatgattggctatccaaaaatacattcactccccctttgatttgtttcaactcataaaaactccctaaagccataaagcttccttgaatgcttctgtagttgccataaattctactttcgtggtggaaagagcagccacggactgtaactgggccttccagcttatacagttccggtttgttaagaaaatatgggaagtggttgattttctcgtatctctattcgaggcatagtcttcgtccatgaacccttttaactccaattctccttctgctttctcataggttagatcataatcccaagtgcccttcaaatatctcaataaccatttaagggctttttaatgttccatgcctggattggacatgaactgacttaggatgcctaagcgtgagctatatccgatctcgtgctcaccatcacgtacattaaacatcctagagctacaacataaggtacatccttcatattttctttctctttcgtactgttaagacattgttcttttgacaaaacaaattgacccccccaacagaacagatgtactctttacatcttccgttttgaacttttgaataattttcttgatgtacccaaacttctttaagctaatagtccattccttttagttccatgagacttcgataccaagtagcttttgaactggtccaagctctttcatcttaaattctcttttaagcttggctttgaaacttttgatcacatatttatctttgctcatgatgagcatatcatccacatagagcaataagaacacagttgtagattactcaagattcttgaaatataagtagttttcatatacatgttgtttgaacccgatttgatgcatgtacgtatcaaatatcttattccattgccttggggactgcttcaagccatatagagatcagtcaagcatccatactagttcaactcctttcccttctacttgaacccaggtggttgcttcatgtatatctcttcatctaagaatccatttagaaaagcagtcttaatatcaagttgttcaacctcgaactccatttgagcaactaaagacaacatcaaccttattgtcttgtattttacaataagtgagaagatttttgtgtagtttatagcttccacctgagtaaatcccttagccattaacttggaaccgaactagttcattctcattgattccttcttttaacttaagaatctatttgcactccacaatcctcttaatctctagcttcagcacaactacccaaatcttgttctttcagagtgaatccatctccttatccatggcctgaagccatttagacttgtttccacttaaaattgccttttcatagcttttgggctcttcaatttcagtttgttggactaccactagtgcaaatgctattatatctaattccacaaaccttactagaggatggatctctctctaggttctatcacaagccaactaataaccttccagacttgtctgtttgaacccttctagcacctctgtttggtcttcgttatcctgttcttcgtgctccataacagccttcgtctacgcattgtctttcagttctacactaggttccctctgtgaaccttcttttgggagcttcgttttgcactccatttctacacttgcaatgtctttgtttcctctttttcctacttcacatggagacacactacctttcctggaagtcaagtgaggatattccaactcattaaaaaacaatacttctagcaatcacaacctttggtttacccttcctgaaaatgtaaattctataccccttgattcctaaggcataacctaagaaagttcccttcacgaatctaggttctagcttgtcaatggattggtgtacgtatgcagtacacccaaatgttcttaaatgtgttaggttgggggttttgttgtaccatatttcataaggtgtttttaagtctatcactctatttgggcttctatttatgaggtatgttgtagttgctagagcttcccccaaaatggtttctctaactgagaattaaacagtaaacatctaactttgtttaataaggtttggttcatcctttcaggaacgccattttcctctagggtcttcactatagttttatgcctagtgattccaaattcttgacacatcttgtcaaattcagagttaacaaactccaactcattatcagttctaaggttcttaagtttaaggtcagtttggttttccacttgagttttccaatttataaacggtcccagacattaatccttagtagttattaagtaggtccaaacacaccaactataatcatcaattattgaaagaaagcattgttttaccggagtgagtgggcaccttgtatggcccctaaagatcagcgtgcacatattcaagtatctttttagttgcatgccttgttggagtgaactttagcctatgttgtttccctaaaacacgagcttcacaaaatggtaaggcataagaattaaaattttcaacgataccttgtttgtgcagttctttgaggtcttgttcactaatatgtccaagtctgtgatgccacaatttcatatccgattctagccctttcaccatgcttgcctctctagctgtgacaatttctccttggagaacatataagccattgatctttacacctttcatcactactaaataacctttggtgatcctcaagtttccatgcatttacttgtatctgtatccttcatcatcaagcgcatttggggatataaggtttcgtctaagctccaggatgtgccttacattcatcaacaccttgattctgccatcatattgtttgatggcaaccttcctagctccaatgactctgcatgaatgattattacccattagaactttatatccatcaactgacttataatcaaaaaatgacgctcgactcgaacacatttgataagtgcacctagaatcgagaatccactccctattcatataagactctgagatagagaataactctccatctgtggagctgtcatcactatcttccacgatcataatagagtctttcccgtagtgatggtgctggaagtcctacttatctccattgtgagatttgttgaagccttgttgctcttgtacttcttgcaaaatctttgcaagtgtccagacttcccacataagtaacactttcttgtgtccttctctttggacttagatcttgattgagagtgatggtgtttactcttcaaactacttttcttgggtgatctacctcttgccaagtacactttttctttcttggattccttctccaactgtaattcgaaatctttcgatttaagtttggcgagaacatcttccaatgcaatcacatctctgccatacttaatggctgtcttgacttcttgatatacgattgaaagtgatatcaaccgaatgatggcctgactttcttcatcaaccttgtgatctatatttgccaaacctacaataatcccattaaatctatcaatattctcatctaaagaaagggaaaaaatcactctaaaactgtaaaaactttctagcaaattaatcttgctagcaattgatggcttgataactctatggtacagagttatttagtaatgaaagtgtgtttgtttgatttacttcaattagttttatcttcattttctatttagcaagttagcttctaagtcttgtaaaaattgttatttttagttgtgtttatgtaattaaatgttgtttgtttgctgttaggaaagaagaattgacttgctagggaaaaggaaaggatgcaaggacaaagtggaaataaaaagctgaacctgggaggaaaaagttgaaaaacgaattttatccatccacatcagcacttatgtagcagccacttaaagtcatgctagctggctgctgtggtaggatgagagaaaacctagtgggccaagattggaaaggaatgggcttctatttttaggatattacattgcaccctaatgaccaagcatatttttgttggattttatgcccta

SEQ ID NO: 224607 - DNA, 2563 bp, Cannabis indica
ataacctaggggcattttggtaattttactaatccattaaaacgacattctaaaattctcaccgtagttcgaaataccctcaaaataattcttccatcaatgtcatgacatttctgaccataatgctaattttccatagtcgtcgggcctgataaaatatttttatttcaaaaatggtgtcttcgatacacacatatcccaatataatcttcgtaattaataaattacgctttatgatcattcaatgaacccttattaattaccctaagtaagatcataatcttacttcattaccaaaaaaattacatatttaataaaatatgtctatttaaatataatttattttttcggatattacatcttagcttttccaaatatgcctgggtactgcagaaactttgaggctatttacatctggcttctccactctccccgccaaggcagggacataggtcttcatttttgacgatgctcttggtgtgcgagccttcgacttttggccaaatctcgatggttagtcaagctctgacttttctcctttacgacttgatttcgtggtggcaaacacaagtgcatgtttaagtctttcctcaaatttcagtgaaagcaccaaaatgattatcaagattttcgaaaacaaaatatttagagctaaagaaagaagtaagataatgaataataaacttaaggatttttacatcgttcaggcattaactatcctaaatccacaagtctaatttattattcttattgacaagtaatgaatattacaagtagttacattatggacttgaactctgtattcctctcgtttaacttgaagaaaaagaagctcaataggaattttagtagagttttagtaagtgagcaattgtgtttttagacttccaagagtttcccctatctcatgaaatataggggtacttatatgcgatatcttctttcacgggcttgttggactgatcttactagaacagattcgactgttgatttggtaggtggctgatccatcacattgtgtatagaagtgtcagctcgtactgtctgaacatctcatacgtgtcgctctagggccttccctttttgaatttcccttataaatggtcgttggatcatttaggcaagtataatggcacgcatgtcctgtactatggcttaacatgggggataaaacctggcatcgtaccaaaaaaagcatgactgtgacctctataattagacatgtacaaacggagcactcacgtgacactaattaggcatacaactcattctaaattattttttgacctacataagcgcattttgagaaaactcctagcctctgcaaggcgcttggctcctgctcccaacactgagaaaggtcatggaatgcgggggctccacgtgtccccgccctgcgcagaaatacctcttgcgagtggtgtttaccgatcttttcggaaaaaaattaataagagcttaagaaaagaaaagatttaaaaaaagacaagcatatttattacatggttcaggcgttaatgatgcttagttcacgagttagtaatattagccttttagggtgaatgtttgagtattccaagtgtctacaacaataatctttgtatccttttgtttctctttagaagactgatctcaaagaatttcagtagagtttctctaagtaaaaattgttcacctctcgctcattaaaaatgagggtatttatcgccacacatggggatgagggaataccctttatcctcctagggtttgtactctactcactgcaagggtcggtacaacaatatgacaatctaaccattggttgttaagaaccttcttcattgcgtagcatatagctttagtgagagattttgtacaaactgtgacaagtgttgtgtaaatgtttctcctttgtaaaatactctctaacaaggccgttgggcaaaaggcacgtccagaaatgagtacatgcactaccatggcttggcatgggggacaagatctgatcttgtgtcagataaaggtgtaactgcctacagagcaatttttatatgatgtcgatgtggtcactgaccatgagactactaccacgtcctaatgccatcacctaagggatttttactcgggagccatctacctcaaccattctcaaggttcgaaagatgttacttatgggcagatggctcatctcgtcaagtgtctattgcacgtttccaggattgtcaagaagttctctctgggagaccttatgagttatttcgattaatccattcatctaatacaccatatcccttaatcatgccttaccccaagcttttgggactctctgaattataggagcttgtcatagtttcctactactaactgttaacttgtgctgaacatcaaaatcaaggacacatcttctatatgagctgcactctgctaagggtagatttgacatcagtatctacttgcgtggcaaccacgcgacaccttaaagatctcagttggtccctttggcgcgtgtcgaggaatatctttcaaaaaaggtggagtgctactgatagttaaatgttgtgaagagactcgtcttaatggt

SEQ ID NO: 224608 - DNA, 2812 bp, Cannabis indica
ggtccgctaatactagttaatagcggccaagcaatagcggcggaccaatagcggccgaggtccgccgctattgccctttagcggccagaatctagaccaatagcggccgaggggcccgccgctattggtccttaatgttgtagtgataaaacaacagtttctagaaaacctaatattgagtttttgtaactcttattcgaactaaatctttctctaacgtcccaacacacagtttctaatagctataaacttatccccattgatttcataacctccatatgtaataactcacttaattacatataattaaatgtaatctttaaattacaaaatcattttcagattttgtaaccactcttatgttacaaatcatgtgtattattaaactatatattatataatttttttttgaaaaagtattatataatttaattactaaataatatataatatgtcacatttgaatattttaatctatattatattataataaataatataacactataattaattagcaatttttgataatatttattaaagtaaaataagtgagacccaatattaagttacattaataacgatattacaccttacaagagtgctaggcagtatctataaatgccctttagcatttctcattcataagttggtttacacttgcacatttctacaataaaataataggggtattagttaaaaatatatatagaaaaaaaaatgtgtatactaatttggctagactataaagacagaagatcctagtgccataaaaggccaagtacatggagttaactcactgcatgactatgattatctcacttttatttacaaaaagaattccacatctaacggttctactctaaagcaatcatttaactttatatatctttatattatatataaaaaatatattagatatatattcatcatttcacccttaaaatcatgacccaccaaagtattttttcttaatcaaacaattttagtgacaaacctttgtacaaaactttttaaaagttcatataaatgaaattaagaaggtttggagacctcagtggtttcaacaattgaatcataaagattgcttgaattttcagtataagaagatgaagtttcctctgaaatcattctagtctcatctgaattcaacaagctagcatttaaaaatggaggttgttttggtgatggaattccatactcttcatcagtcaacattttaacaacatcagacatagatggccttagtgcaaccgaagcttgtgtgcacaatagcccaatttgaagcacatttgaagcttcttcaatagggaaatcactttttaatcctggatcgatagattctgatattttcttttctttgtaacacttccaaacctaataatcacacaagaaagaaaaataatatcaataaaaacatgatgtatttcacttgtaatgttgttaaatatgaagaggagaaaaaaaagaggttgaaataagactcatactgaatgtaaaattgagcctgatcccaatgtgaaagcactattcttcctaccacatgcaatttcaagaaccaacactccaaaagcataaacatcagccttttctgtgagttgccctctaacaagatattcaggtgccatatatcccctgtataaaagtttaacaagaaaagtttaacaagtaacatctatttttcatgaaatagatgataaaaaaaggattagaagaaatgaaaagcaaaatttgtgcttacaatgttcctgcaattcctgtgcttagatgagttctatcggccgaaacggatcgagcaagcccgaaatctgctatctttggaacaaaatcatcaccaagcaaaatattactagatttgatatctctatggataatcttcaaaccacaaccaccatggagatatgcaagcccttcagctattccagatatgatatcaaatctttgttgccaacttagtatatatgtgttcttcttatctatgtaaaacaaaaagcttttgagtattgtaaatttttacacaaagggtataaattttaagaggaaagagaacaagaaataaacttaccataaagtatttgatcaaggcttttattgggtacaaattcataaactaaaaggctttctggtccttcaatactacaccccaaaagcttcacaaggttcctatgttcaatcccactaatcaaattcacttcattgaagaactcatccacccattgccttgtattgaagaatagtctcttgacagcaacaactttcccatctgggagaatccctttaaacacagaaccagccccaccttgtcctaattttcttgtcatgtcaaaatattcagttgccttttccagtatttcatacttgaaattcaagtttgatttttttatagttattgaaacatcctcatgaatcactaagaaataaagaaagaaagagttagatcaaattacaattcagatgaagtaataaagtattatgttaaaatgttataataacctttgtttttcttggacttatatccacaataaacaccaacataaactccaaagagggcaagaagacccagcacaattgcagagaaaatgccagctatgatgatccaaactcggtttgatgctagcaaatcatgtagaggagaacctatagacaaaaaattagttaaagctatcaacattttcatgaataaaaacaaaataaatgagcaaatccactatagtatttaggacataaaatcaatagaaacaacatcattccaaattgtgtgacattaaaaattctctctttttttttaccaaattcaatcaaccattcataa

SEQ ID NO: 224609 - DNA, 2316 bp, Cannabis indica
ggtaccatacaaacaaagtaataaaagaaaaataaatgatgaattaaagtgaaaaaagtgttgtcgtgatgatgatgatgagttaagaagtatagaagaagaagataaaaagggaatctaattgtgagtgtccatgatgttggtctcaagtacaagtctctttaaattctgactacaacatctcaagccatatatctcttactcatatgaatcccatgcacaatttagtgaaatttatctcaattattcattcataagcaagaataatgtgagtcatatttgcttgcatttgcttttcattttaaaaatcagctctccaactttaatttttgttgaataattaagatttttacttcttgaattttaatatatatatcaaattatatcttttgaacttttttagctcttaaaaattcttcatatattagacttattaggatcagctttgtactcttaagtcttagttagttagaaaccgttagagatggttggctggttgttacaattttgttaacttattgtgttgtattttcaagctatatatagctttgtcattatattttatttctgaatgaataatagattcattttttttcccttatcttcttctttcttctttcttgtttctcttttgtttttctctttccgcactaatatatagtaacagagccacttgtgatccgttgtgagctcaaattgtcaccggtctaaatagcagtttgtgatccgttgtgagccaaagtgttgccggtccaaacagatacttccgatgtctcgcctttaacctccattgtgtgctaattttcagtgttggggtctttgacctgttttaaaattcacaaatttctcgacgtgtacacccacaaatttctcaatatttggccttgtgtgattctttcaaatgtcatgttcggtcatgtggtctgttaaaggtcgttcgttaaacccacacttttcaagcccaaacgtgaggaggatgtattaagagttagtctcacattgctaatgtgtagaaataaattgtgatatataagatgaatgaactactccttccatagccaattagttttgagatagaacctcattcatcttatcactaaattctaacatcatgaactattaagatttttgaatttaaagacattttacaaagtttcgtttaattttattaattctgtgattgttcatatactaaatcacacttcccaaattttaatatttactaaatcgtggtcccaaattttatctaaacagatacatagtataccattgtgaaggttgtactaaatatttttccaaatatattttggtagcagagattgcagcttacatgaaattaagcacgtaattatgcttatctgtatctagttttgttattaatttactttcttatgttacttccacagtatcaaaaaacgtacagtaataatatgatcaaccatacattctgaaagaaaaatcacttcatctcgaaccagtttactggtgcaaacacaattacatgagacaatcaatcaaactcatcgtccgattattagcattaatttgctctgattgctctacactctctacagtccacagtaaggagtaggccctcccctaccctatcaaacttcattgcctcaacgttttttccaatttaggaattaagattaggcagtcactatttcaaagtcaaattaattactgataattctttttcaatcaaaaacaaacaaaactaatgaagaaaatagaaaaactattgaatttataacaatgaataatatcttatgtaaattaagtatgaataataaattttttaaaaaaattaaaacaaagaaagaatttagagcatgtatttattagaatatttctaattaaggaaataaaataatattattgattctgataaatgaatattttatattcattgaatctggacagaatcaattacgtaatattctatatatggtcagatttctatattcattacctgatttgatttcctgaattaattgtcaaaatattctgacaattaatgtggcacagatactgatggagtatctcacctataaatatagggtctcggtccccgagctcctcactcattctgttcataacagcaaaatccatctaaagagagttgagagagcgaggaagcccgattacccacatcaaccagtttcctttgcagatcaaagcttatgtgggtttgaagctcaagaatcaatggctggaggtatttcgatccttaaattatagtgcatatatgatttattaattccgcactttattcataatcatgtatgttttagtctatacatataaatgtct

SEQ ID NO: 224610 - DNA, 1814 bp, Cannabis indica
atattttatcatttttctattgatatttttcaactcttcatctattttaaatctgcaaaattaaaagataaaagcgtaaaaatgctccaaacataatttaaattaaaccgaaaaatgtgctaaaattaacctaaatttaatactaaaaatatcctaacaatattactatacaaattcaactataaatattaattttaaagatattaaattattaaatttgatttaatgacaaataataaaaaaaattaaatttctatacttaatttatttatatatattaatttatatttaaattaatagaatttataatgagattgtaaataaagcaaacaatcttctctaactccttcgaccaagagagattgtacttcatcttgtgcaattcgatccccactcttctttcttgtgcaatttaagctcattcgaccaagatagattgtacttcatcttctctaactctagaccaaacgtcctaagattaatggtatcggctcgaacaaacttattattattattgttattattatcatctttaaaactttcctctacccttgtcactattgaagccaaagacgtgatagattggctatcaccataacaatcaatcacagcttccttgaatccatattcattattatggttgtttggagttgagactaagacggagtgaaacaaaggaatcttccttttcaagaattcaatcgaatgataatataaaataaaccactcccaaataatagctcagttgtaagataaatcaactgaatcgttttcgtgaaaataagaaggtttgatttgaaatattttaaaagcgttaaaaaataacaaaattagttaaactaagaattctgttatataaacacttttaatatataaaaatattatatctctatatttatataagaaattagtctcccattagctaatcttagatgatgtgggattaaaattagcacaatatcttattattggttattgcaagaaaattatttttggtcactactctttttacctcttttaatacatgtgaatgttctatatacatatgatttgccaattttgttctaatgaatatgaaatttaactctaagctactgcaatgcattaagttttgagcaccttaaatccgaagccaacacttaaaaagtttcaattttaagaattctaaagacacatgtgatgatggagcgatcaaggttgttacaattgaatcgactttaaaattagcatacttttgttatgaaggtattatctgttggaatgaatcctcttataagcaccactcaaccagtttccactgaatccaacattggccagtggtgctaagggtctaagggaaggagacccaatatccccctttctttttgtcataataatggagtaccccattcggttacttcatttcaaggctagggacaaatgctttaaataacacccaatgtgcaagagtttaaaaatcatcaacttgtgctttgcagatgatcttatcatcttctgtaaagttcaaagagtctttgttcattgtatcaaggatgcctttgaagatttctacagtagcactggtcttgcaatgaattgaagcacatctcaattgttctttagggggggggggggaatgtcttagcttaaaaaaacagctccttcaaattatttaatttgaagagggtttgtttcctctcaagtatcttggggtgctaatgagaccaaccaaatggaaagttgaagactgtggagtcattttcaagaaaatcaaaatgatacttgggcaagccatcatctttcatatgcaggtagatctcaactcattaactctg

SEQ ID NO: 224611 - DNA, 3522 bp, Cannabis indica
ttaggttcaacttagttgtattatttatggtcttcaagttgttcgtggaagctaacctatggttctggtgaatatttacatcttgggaacatggtagttcgattgattgggagcgctgatcgtagatatggaatctatagcttctatatgtatttagaagtgaaacgatgatatcctttgagcttggttgaatagagataaatgattgagatctcatttcaataattatattagattattgaaatattatttataggtagctaagtgttttaaggataaaataaattgaagggtagattggtaaatttgtcccaatttagtgtagatcattaataaaggatctttgactattacgattgtaacaataaataatcataacgtatctatatcgtggtacatatagagtgttctatataattgtgagtgctattcaattccaaatctatcatggcgcaaggcgggatttataagttagagaatttacttggtgaattctagatctacttatttaaagctcagttatataggcccacggtcccctcaatagttgagatagtaatgcttgtagactcagttaattgattttaatgaatcaattataattctaatattagtctatgtcttattgatgaatttacactaagcaagagcttaattgagaaaaaaagaggttttgtggtcaatttattaattaagagactttgtatggtctaattaataaataatataaatgaaaattttatttagtaattagttataattattaaataaatatttttgatatttataggattgaattggaaaatatggtcttattgaaagaagaataagtagttgaaaaagtggcaaaattgtaactagagattggtcctttagtggccggccttagagtttattttgcccaatattttattctattttaatcaatataattcagccttaagcgctagttgaaacactataaaaggaatatgatgctctcactcatccactttttgactcttgtcaacttgactattcaaccaacatagatgaaagaattccttccttagctccttcattgttcttcaccttatttgaaacccatagtgaatgagtgccattcccacacataccaagtaaagtactcaatcataatgagtaagagggtggtaaccaaacccgaaggagagaaagagatccaggttccgatcttgataatgctctgctacagaaatgaatcaagggctagagatcttgaacagaatgagtcattatattcttttgcaatcaatgtatggttttcttaaacctttatgtgtttatttcattgttttagaaaattcatatttaggatgtttattcaacatgcttgttagtaaatctagatcctggaaaaatattcccaacactatgatagacaatggagcttccttattcataacaacttatgagaagcttagactccaactaaaagactttatcccttacactcagctcgtacatggtttctccagcgaaagtgttgcacccctttgaaaaatctgcctgccgcttactgtaggacaagctccaatgaccataactataatggcttaattcctgataagtgatgtcctttcggctttcaatgtcatgttaggccaaccagccttatatgacctataagttgttacaactgtttttcatctgtgcgttaagttcccaataaaaagttgagtgtgatgtctcaaaggaaaccaaagaattacaacggaatgctataacctctaactaaggttaagaaggaaaatacctctggctagagttcagacaaagggaaaagcattacccaaaaggaagtcgcccaaggcgggggtgaagacatgtatccctgacttggggaaataaatacgaatattaggctaacttaagaacttccaaacaacagtaacgaagcttgcaaaatgatgagaaaagctatgcggtatatcatagtcgaaggtgtgatgtatggcagaggtttctctatgccattacttagatgtgtaacaaaagaagaggctacatgactcttgtctgaggtacatgaaggattctgtgataaccacgggtaaccacgggcagggcaaagtttatcaaagaaaatactaaggcaaggatatttctggtcgaccatgatggaagattcaaaggcctatgtaaagaaatgtgataaatgctagagattttcaaagacccccgtgcaccgtccaatgatctaatacatatgcaaagttcttggccttttgcgatattatgaatagacctgatctaataattgccaaaaggcaagggcggagtacaatatgcagtcgtcgtagtggattatttcacaaaattgacagaggtcgagcccttgcaacgatcacatctaaaaaagtgctagattttttagtaaaaaacttcgcacgccagttcaaacttccgcagaaaattgtttcgaacaatggcaaacaatttgatagccagatgttcacaaattttttttttgcggcacatggaatcataaaaagtttctctatagtggcacaccctcaaacaaatgggcaaatcaaagcaacaaataagacactcaaagacaccatgaaaaaatatcttgaagaagctaaagggaactagtcgaaggaactacctgaagtattgtggttgtaacgaacaatggaaagaacagcaaccgggcaaacaccatttgccatggcttatggttatgaagcaatgctgcttgtagagtttgaacctctgtcccataggagactaacctataatcaagaagctaatcatgccctccttgtataatcagtgtacgaaattgaagaaaaaagaggctaagcaaacgtaaagatagtagctcattagcaaaaggtgactcggtacttcaacaagcatgtgagggcaaggaaattctttgtgggagatatggtccttaacaagtgttcttaaacacaaaagatagcacgtcaggcgtactcagacctaattgggaaggaccatatcaagtagttgaagtcacaaattctaaagcatacaaactgggacagtatgacgacaacatggagcttattctagtaccaaggtattggaacagggaacatttgagaaaatactacctgtaagtgtgcaaggtctaatgatccccttcaagtactgatgatcaaacatctactcttaagtagatggccttctgaccatacctcacttaagggtttggataaaatgactggcactcaagtcgaatgaccatatctaatgtacaatttagaaaatacaattgttttatgttttaattagctaaagatcaattagatcatgtaacagcttacataattcaataaatgtaagttactacgataacaaaatcgttagaccaataaatgaataaagatattaatcatcagtctaattgtatcaatcatttttccttctatagcaagttatgaatttacctttaaaatgtgtacaaagggtctgctcaaatccaaaagccaaacagacaaaaaattgaacttgtgcaatacaagtgac

SEQ ID NO: 224612 - DNA, 2890 bp, Cannabis indica
aagcttgaattgaagtaacaaataccctaaccacttgctggttctagggtgcgagggagacagagagagagggagggagagtttggagagagaaagagttattttatcttgatttttcttatgaataataaaaataatatacctaggtattatttactaaatcaactaaggaaaatcataataataaacctaaatgaatctcattaaagacaaaagtgacaaaaggccaaaaagactaatttgcccttgcctaagccaaaaagcccacttgtcatttaagggtatttagccatttctaaaccttgaataattcccaacattctcaatgtctaactaagttgccccactactacaaaaatactaaaatgtgattctattgccaaaacgccgggtccaaaggtaacgggtacaaaacatgcaaaaacataaaattccatatatggcataaacaatacatcctgaatttaaataaatctctataaaatcataaatcataattaatattctactttcataattaaaccctaattctctgcaaatttcaaagttaaaattaagcggtctttttcaattatcccttgttaaaaggattttgtcatcaaaatctaacctgaataactctggatactgagccctcatgtgagatttgaactcccatgtggcttcctccaccttactgtttctctagagtaccttgattaaacctatggtcttgctccaaaaaactttatcttttttgtctaagatctgaactggttgttcttcgtgcaataggtctggttgaagctcaagattttcatagctcagcacatgagtgggatttgaaacgtatttccgtaacatagagacatgaattgtgagctgctaaaagtgctggaggcaaggctaggcgatacgctaccagtccaaccttctcaagaatctcgaaaggccctgtaaacctagggcttaacttgcccctttttccaaaacatctaatccccttcattggagacacccgtaagaacacatgatctcctacctaaaattctacatttatgtgcttcagatctacataactcttttgccaactctgagaggcatgcattctggccttaatctattctatggcttcattagtccgtcgcactgattccggacctatgtattttctttctcctgtttcatccaagtgaataggagatctacacttccttccatacaacatctcgtagggagccatccgtatagtactctggtaactattgttgaaggaaaactctatcagtggcaggtacttgctgcaggagcctttgaaatccatcacataagctcgtaacatgtcttctagtatctgaattgtcctttcaaactgtccatcactttgaggatggaaagttgtactgaatttcagtttggtacccatagcctgttgaagactgtggcagaatttcgaagtaaattttggatctctatctgatataatagactttggagtgccatgtaacctcactatctctttcggttataaatctgcataatgattcactataaagttttttttaccagtagaaaatgtgcagactgcgtaaattgatctaccacaatccaaatcaaatcgtacattcctatggttctaggtaacccaaccatgaaatccatactgacatcatcccacttctacacaggaagtgtaagtggttgcaatactcctaccggtctctaatgctcagccttgatctgttgacaagttaaacaccgggatacaaattctaccacctctttcttcatcccgcaccacgagtagtagggtcttaaatcttggcacatcttggtagtgccaaggtgcatgtatatggattggtatgagcttcctcgagattctcatttctaagttctgctttacttggaacacaaaccctggtcttatacgacaacatcatgttatctaacatcgtaaaatctttagcttgaccatttaaaacatcttctcggatcttcttaactgagcggcttcaattcgttccaacagatttgattgcaatgtcaagttatgaagtttgcttacaaccaacttaatgcctaatttgactatgtcatatgttaactgaggtgaaatcttaatcatactagttacctgcccaaaacccttcctgctcagggcatcagccaccacattggccttcccaagatggcaaaggatttgacaatcataatccttaaccaactccaatcaatgcctctgtctcatattcaaatctttttgggtaaagaagtatttgaagctcttacggttggtgtaaatctcacatttttctccgtaaagataatgttgccgaatcttcaaagcaaacactaccgcggtaagttctaaatcaggcgttgggtaccattgttcatactcctttaatggacgtgaggcataagtgatggtccgatcagcctgcatctgtacacaccccagaccctatttgtatgcatcgcagtaagctataaacgtttctctctccgatggtagggttgataccagagctgtaatcaatctctgtttcagctcctgaaagcttgcttcacacttgtctgtctaaaaaaactgctgattctttttggtgagttcggctaggggtgtaaggatcttagaaaatccctctacgaaccaacggtaataaccagctagacccaagaaacttctaacttctataactatcttcgatctcgaacaatctttgacggattcaatcttccctggatcaaccttaatcccatctttattgacaatgtgtcagagaaaagacacctgagatagccaaaactcacacttcttcaattcggcatacagtttatgttgtcgtagccgttgtagaaccattcgaagatgtagctcgtgctactcttctgattgagagtacac

SEQ ID NO: 224613 - DNA, 1801 bp, Cannabis indica
ctagatatttctaaaactagagtagttgatacatgatttcatccaataaattttaaaagttattttgtagtaattgatcttatgcaagccattgatgataatgactcttcttctttgactttttggctccatggtatatggttttaattattcttctaactaatatatttatatatatatatataatcctttaattatcagttatattatatatacataaaaattatatatacaataataataaagtgactaaaaaaaagttactgatatatatataattaatttttcagataatttcaagtgggcctgatgaattattttatttgtgtgattgaaatattttattttaacataccttattcattttaaatatgtacactcacattgaaaaaattaaaaactaaaaaaaaatcaaaaataccgatttaaaaatagagcaaaagagatatttataattaggaatagtgagctaaaaaagagttgatcgagttatccaagatggtgagcaaattaaatggggtgttagagagtcccacattgctaatgtgtagaaagataattattgggtgcacaaccaaagtctcccattggctagaaatgagaaagatcttgggtgtttaagaatggacactatctctattggaatgagaccttttgggaaggtgcccaaaaataaatttgtgaaggcttaggcccaaagcaaacaatatcataccaatggagaaatagatggtgtctgacggtcctaagaagtggtatcagagtcggggcccgaaattggccacgtgaatgagttgtcagaggttcagatctgattcgaaagggattttgaatctagctagtgaagggattcatctagcttactcaaggggatcttaagtgttagaattgagcgatttaggttattaactcagaaactttccttggtgatatggacatcaatgtttgacaagtggaaaggaggatgatgtcacgaagttgagtagatccgagtgatagcagtcaatttgggaggggacccctagccctacgcccaggttgacttcagtatctttcagtattttgtaccatgaagacgtggagcaacctaattcaagcgtcgagagctaaacttacacgaacctgcaacccagaagccaacttgggcacctaggatttcacccaacgccccaagttgacattcccagctagggtttcagtttcaaagaccgtcttagtgcaaatgggtcaaagtttgcattgggacatcaactagacataccacagacatatttgaggcatcataattagattcgaagcaagttcatttattagcacccggggcttgggcaccccaatgcctaggttaacaattagtcaatctaggcgccttccaagtatcaaatcgatgatctagctttttcatcttcatcaaaaatggggaacttttggggaagaaacaacacttcatgggtgccaaaaacaaggcccagcacccaggttgacacctagggctagcccaatgctcaagctgacattttgtcaacatgggccaatttcgatgatgttttcctagagatcattcgagcatcttctctgtttttcagaaaagattgagattcaactatttttagggaccaaacaaaacttttgaagggccataagggggacctaacgccaggttaactttgggagctccgagatagaagtttggacttcaataacttgaatccaactcactatctttcagtattatgtaccatgaatacatggagaaacctaatccaaagccctcaaaactaaaattacacgaacctacagc

SEQ ID NO: 224614 - DNA, 1422 bp, Cannabis indica
tttatttgcctcatccccaaaaaactaaatagctgtaaggtaaaagactttagaccaatcagtcttataacaagtgtgtataagatcattgctaaagcacttgctacaagattgaagtatattttgggagacacaatctcagacactcagtctgcttttgtggaggggagacaaatattggattcagtaatgattgctaatgagacagtcgaagattatagaagcaggggcaaaagtggtatggtgttcaagatcgacttcgaaaaggcttatgatagagttgaatgggacttcttggatttggttatgcacaaaaaaggctttggaagtacttggagaaaatggattagaggatgtctgtcaaccacttcattttctatttttgtcaatggcagaccaagaggaaaattcagagcatctcgaggactgagacaaggcgatcctctttcgccattcctttttactttggtagctgatatactgggaagaatggtggataaagcagttaactctggttctttatctgggttcagagtgggaaaagataaaattcagatcagccacttacaattcgccgatgatactttactttttgcgaatgatagagaatcccttttgaagcttgttaggattgtcgaaggcttttgtgccttatcaggacttaaagttaacttaagaaaagccaactgttgggtctgtatatggacgaattagttgtttcccaatgtgccgctcaaattggatgcgaggtgggctgctggccgatgaagtatctcgaaatgccattggcaggctcacctaggaagaaagttttttgggatcctgttttggagaagtgtgctaaagacttgatgggtggaaatgtgcattcctgtctaggggaggcagatacacactcattcaatcagttctttcttcccttccaatttactttttgtcactatttaaagcaccatcttcagtgattaacacattggagaaattgatgagagatttcttatgggaaggtggagatctaggtggtggcgatcacttagtggctcgggattgggtttgtaaaccaagattggaaggcggactaggcatcggaacattggctttgagaaataaaagtttgttgatgaaatggttatggcgattccccttagaatctgagtctctttggcatagggtgattgagagtcgttatggtttggcaaataatttttgggattcaaaaagaggggagcggatgcccctgaggggaccatggaaggacattgcggatctatatgatgaatacttaaggctggtgaagttcaaggtagaaaaaggggataagattcgattctgggaagatgaatggttaggtgactcatctctactacacacttatcctggtttagccctaatttctagagctaaaaacgtaagtataataga

SEQ ID NO: 224615 - DNA, 1197 bp, Cannabis indica
actcgttgctcggattatcagtcgtttactctgcttggacaagcatacttcgtacatgcagatatgttgcttaaagtctgttcggaacatttctcttcccaaatgtaaagaatgacaggcacgtgccactcgtatctactgccatgtcatagtgcaaaaaatagaataacattttccccccaagtttgcataggacttccgaagtcacccgtggacttcaccctgtttggatccttttttgaacgggtggcacgtgttcgatgcgtctgttggtgattcgacataattctgaccaagagtctcttcgatatttggctcattaatgctgattgctttatgtctcgaatttctccaaaaatttgcacgctttgacggttgctcttcaggtatttgattgcctaatgtttacttttggggagaaaccgaggcatttaaatttcgaaatgattacctttctcactttttttgcttataaatagggcaaaaatccctaataaactacttttagtatttttctctcttgacgatttcagagcaagaacaccttttcctcttaaatccttcaaagaatttccaggaagtgtcgatctgtgtcatctgaatagctctaaagcttcgaacagtgagtaagttcttcatccttttcctctttaatatattttatttgtttttattccatatcccaaccaaatactcatcttgtgtcctaccttttgtagatgaacactggtgattttttgggaggagaacatcatatcgaccaagaccttcttcaacttctgtacgacgatcaacctcgtttttgtgtcagtctgtcctcatcaagtgactgtaacgccctaatctataaggacgccacgtgtgtgattttataaactagtttaatactaatagaataattaattattaaaaaccgtgataatattaaaaacttgactaaaataaaacactaaaaatggacattataacggcataaaaagtgtgttccgggaatccctgttgtaaaaagttttgctaaagaaatatgtacgacaaccatttaaacataaaatcaaaatacacagcagatacaaccagtctaaaacaactcctggcaactcggcacgcaggccggcgaggtcaatatgtacattgctggagaagactgccacctcatggttgatctagcttttctttgcctttacctgcaccacatag

SEQ ID NO: 224616 - DNA, 1974 bp, Cannabis indica
ttgatggaaaatagcttgatgctcgagacaaaactaaaatcgaacatgaagaaccatgcacaccaagttgagtgtcaacctgggtgtaggagcagcttttgggccttgcagggtgtcattttggtacttcgatcatattttggtgtgaacatgagggctcctcccttgtttgggaccaaaatacgaagattgtctaaaaaaaaattcacatttaagtaacgaaaccacacgtgccatgttgaatgtaaacctgagtgttggagctagtgctcatgtaaacctgggcacttgctaggtcttctagctgccgaatcgtctcttttattttccaacaacacttgtaccttcgttgctaataaaaatgaagaaaattcctgagaaacatattcaaaaaaaaaattgtcagaagcgccccaggttgacaatatgtcaacttaggcgctgagagctgagtcttatcaacctgggcgctaggtctaggttgaaagtactcggatgttgtctttttgatgctcgatcttctttcttgtggaaagtactcataagaattcagttttgtcaaattttcacaggcgttactcgagaaacttgaattggtgtcctggcgcctgggtgacacaccatgtcagcctaggcgttgttcttaggggttgatcctcctaggcatagtttgacaaaactcaagtctcagttttgttccttgttggatttgaagaatcgagatgtaaagaagttcctgaaaagttaaaccctagttgtcatgtacccaagttgacttacttgggcgtcaggtgcttgggcactctaaactggaagtgttccaatgtttttttaggctagtagcttgttgtggcatgtctctcatgtgtctgagtgtaaagggtgagcaatttgcacaacagaaatggcttcggggaccaaaattgatgcattttagggcacaaaatgtcaacctaggcattggacgaggcccatggcattaggttgatttttgggatgcttgggggacatccttagctttgaggtccttggcttggaatcttcttaacttgttagctagactattgaaggatggttacatggaaacgacttcgtcagatccaaatacctacttagaggccaccttatgtcaacttgggtcctgggcaagacacttggtaccaggtcgacgaccctattttgggatgcagggctacaagattttttttttcttgctacgtgtcaaaaatgatgtccaggctagttttcggataaacaattatattttacatttaactattattttaaaatataaccataaaatttaataaatttgttgatattatataattaaaaaattgaataattcatatgttgaaaaaataaaccgtctaaatattttagtatttacatttagatatgatatctcattattgagatgttcattcacattcagaaatttagattttatggcacatttattaaattatagttataatctaaataactaaatgtgtgaaatgaaaggaaataaaatattaaacaaaaagaatcactattttagtatgtaatttattaaattggatagaaagaaaattaaaatcattttattttgcttatataatttaaaaaagtaattagaatgttttaaattgattaaattacaaatgtttattttttaatttctttattttaaaatgacatcatacaaataaataaattcatatatataatttatacttatgtaaagaaaacaaatgcacctaagtgccattaacttactagacattactatgccttaatagcaatgctgattcagaaacaataatgaaaaacagattcataatcataagggcttgtcaaggttctactcggtcaaacaggcaatgaagagcttttattattagttgaatagttaaaaccttttttcccataattagcgcacattccaaacttacattatgccattctcttcttttctttctttctttctat

SEQ ID NO: 224617 - DNA, 4084 bp, Cannabis indica
acttatttctaatgtaatttctcgttttcgtcaagctttacatttcaataatggacttgaagtccctagggtaggtctaggagggggtttattacttctatggaaggatgatgtcaatgtaacacttttgaattttaatgcaactttgtttgactgttatatggcgtatggtgatggtcctactatgcatttcactgcattttatggttctcctgaacaatcgaatcgctgtcattcttggacaactttaaagaggcttcgtgatgttgctccacttttgccatggcttgtgattggcgattttaatgagatactttcaaatgcgaataagcaaggaggtgcgttgagaaatgaagtgcaaatggacgactttagaaaagttttagatttttgttctttctctgagttacctgttattggtgatcctttcacttggtttaaaagtccacataaagctgacaccatcaaagaacgactcgactggtgctttgtgaatgacaaatggacaacaacatttgaacccttggtcacaactcacttggactttttcagatcagaccatcgggctattgcagtcactgttcaaccacttaatcagcttcctgaacaagtgaggaggaagtctcgcttcaggtttgagaaactttggcttacagatgctgaagctgctgccattatcaagcaaaactggtgtacatcttctacagccactgctgttgagtcattcttaaataatttggaatcatgctcttcatcacttcaaacatggcacaccaggaagtatgggaacatgaagcaagaaattaccacaatgcagaaaaaaatttctagccttaaatcacagtaccaaccgatcaacgaatcaatggaggagcttaaaaattcagaaactattcttgatgatttattggcacaagaggagacttattggcaacaacgatctagggtggattggatgcaaaatgggaccaaaatacaaagttttttcatgctcatgctacatcgagacgcaacaataattctatcaaatcgttgaaaaatgctgctggtgtaatagattattcgaagcaaggaatgacagcaataatttcagattatttccaggagctcttcgccgctcagcctcttgattccactgctcttaatcacacaataaacactatcccacaaacggttactgctgctatgaatgacaccttgactcagcctttcacaccagccgagattactgctgctttaaagatgatgagtccagacaaaagccccggtagtgatggtatgtcggctatgttctatcaaaactattgggatatagttgggtcttcagtaactgatgtggtcttgggaatacttaatgatggcaatgaaatggatatgctgaataaatccattatcactctcattccaaaaataagtactcctactggtatgggtgattataggccaataagcttgtgtaatgtcatttacaaattgatttcaaaggtgttggttcttcggttcaaagaggtacttccatttgtcatctcagagtctcaaagtgctttcttatctaacaggctaatcacagacaacatcttagttgcttttgagttagtccatatttaaagcataagactcaagggaagaaaggttactctgctctcaaattggatatgagtaaggcttttgatcgtgttgaatgggcatatctagcagctgtgatggaaaagatgggatttgcaagcacatggatttcactcattatgaaatgtctttcctcaacaagcttttccttttctttaaatggagaaattgttgggaatgtcaaaccagggagaggtttaaggcaaggagatcccttatcaccatatttatttttgatttgctctgaaggattatctcgtttaatgaatcatgaagaagacattggcaatcttgccgggctgcgcttaactagacatgcaccatccatttcccaccttttgtttgctgatgatagccttttgttctgtcacgctactaagagttcggctttagctattcaaagggttcttcacacttatcatcgagcgtctggtcaactcctaaacactcagaaatcagtcatgtctttatcgcccaatactgaccaagctattcaaatgtttttcaatcaaacattgaacatgcccattagtgattgtcatgaacgatatttaggcttacctgcttactcaggtagggacaaaaaggaaatgttcagcaacataaaggagagaatatagaaattgctcaatgcttggaaggaaaaattattctctattgggggcaaagaagtgctactgaaagcggttgttcagtccattccaacatatgcgatgagttgtttcaaacttccaaaaacattttgtcaccaactagagtccatgatggctaacttttggtggggttcaaacaagaatggcaacaaaattcattggaagaattggaatctattatgcaaatctaaatttgaaggaggtatggggtttagatcttttgtccattttaaccaagctcttttggctaaacaagcttggcgaatttttgaaatgccaaactccttactaagcaagttactcaagcatagatatttttctcaatccacctttttggatgccaatcttggtcattcgccatcactaacttggcaaggaatttgttggggacgggacttactcatcaaaggtcttagatataaaattgggaatggctaccaagtctctgctgcaactgatccgtggatccctgctatttcaaacttctgccccattactatgatgggccaccaacactgccagtttctttcttcattactgagactagggaatggaatatatctttgttaaaggctcattttggggacattgatgtggacagaatcttgactatccctttgagtttttttccaactcaagataggctaatatggcattacactactgctggaatttacacagttaagtcgggtttccatctggcttcggatttgaatgataaagagattgattctgcttctaactcacatcatgaatggtggaaatttttttggaatctcaaattgccttcaaagattaaaatctttgcttggagagtgatacataatgctataccggttgcaactgctctgtttcaaaaaaaggttctgaattcagccacttgttccttgtgtacacaagcttgggaatcaattgggcacgccttgttctgctgtaggcatgctaaggatgtgtggaaacaatttcatttccctattgattatgcaaaggcacttcatttggtaaatggtgattatcttttccatatagctactttgctaactcaggaagaatttgaaatgttgatttgcactatgtgggtgatatggactgatcgtaataagattatccatggagatagaaataaggatgctactgctttggctttacatgctacaacatatatgaataattatattaaagctaacagcaatacagttcctactgccacactatatcctcctacagttgccaacacttcacaacctgttgcaacttctgcaactgctgctgcaatgaatactcgcccaaaggaaggagtcccatggaagccacctttactaaacaagctgaaacttaatgtcgatgccgcacttaatacagcagacaaaattcttggcattggagcgatcgttaggaatcatgatggccaggttgttgctgcattatctaagccggttcaaggatgcttcaggtctgacgagatggaagccaaggctctatttcatgcactaaattggaccacacaactctctctgaaaattgattatgtcgagactgatgcccttcgtgtttcatcagcaatcaataatgcatcttctgatttatcatctttttcagatttaattttagatgttcgttgtcttctttcctttttcccaggcattgttgtttctcatgttcggagaaatgctaaccaagctgctcatggtttagcaaaatatgctcttgggttggatgtggacacttgttggagaggagaaattccttctcctattttctctgttgttgtaaacgatggttgattataataacagtgaatcttt

SEQ ID NO: 224618 - DNA, 3809 bp, Cannabis indica
gatcataactattatgttatttatgtatttttgcccttattatttatatttacctatttttatcattttttttaggtaaattgccattatattgaaacaaatagttaaaatacaataagcataataggagtaggtaaaacatgattgtaatatataaacgcttcaataataaaaaaaaaaaagttaggagtaggtaatttctcccaccatgaataattagtatccacagaaagagtaaatttggccaacagatgagccacattattagcagacatatatatgcgagatttgagctccaagaaaattggatactaaaatagaattgttgtttaacaaacaataaaaatctgaaacaacttttgagaatattgcaatcttttaaccacttaaaagagagtcggtctttatatagtgaactggtaattgaaggtctttaaaccattgcaaactatgaagaagagccattgcttccatcactttcggtcgaaaacatccttgaaagggcatagccattgcagctacaatatctcgcatgcttttacgaaggagtgcactgaaaccaaacttgttgttcattgagttaacaacaacatttgtgtttaacttcagtcgacctaagggtggattcagccagtaagaatcctgctatagcagctttgaagatggaactaagggagaagttccagtggttgttttgtttcgagtagcatgatattcttcaaggtagtcaactgcaaaaaataacagtatttcaggcggtttaggcttgttaccatggctttcgttatttttctcactccaaatactccaaaggattgtagcaaattgttctaattgctttgaggaccagatcgtggatacatgtagcattaattccttcaagaaaatattgtttgacaggtattcttggagagaaaatgaggaaaattaccattcttttcgagggcgtttacagtagaacagagcatggataatggattcattattaaagtgacataaagagcaactagctgaattgctaatatgacgagcatggagtataccagcaactaggagacaatacagatttttgaaggtaaagacaaagaccaaaatttttccaccattgtagggcctggtttaaactagcagtaggctgctgctcctcaagtcgagtagctaaagcataaccagatttgactgaatacaaactattagattcatagtgccatataagttggtcttgttggttacacatagttgatggtatacactaaatcttttgaacatcaaaatccaaaaataattgttctagcaaggagtgattctattgtctcgatccagtaatcaaagaagagactgtcacaactttattcgaatctttaaaaatcaaaagcttaaaagaggtgaaactaggcagccatgggtctgaggcacagaggatttgagttccatttccaattttccaacgcaaacctttacatagcaattcttcactccaaataatgcttctccaagttagcgaaggataagatcccagatcaacatccaagaaagaattatacttgaaataacgaggcttgagaaattagtgtaaaagtgatgaagggttggataaaattaaccatgcttgtttgactaataaagcttgattaaagtgaccaaagcttttaaatcccattccccctttaactttcgagtggcaaagaacattcaaattttccaattaattcccaaggacagaagaactggacccccaccaaaatatattcatcataatctcaatttggtaaaaattagagattttgaaagacaaaggcaactcattgcataggtaggaatagattgggccactgctttaaggagaatttcttacctccaattgaaaataatttttcctgccaagctgaaagtagattccataaattttctttgatctccccaaaaagaatttttttttttgtctttatcgttcatgacaaggctttatcggcatctacaagatttgttggacattgatttgtattgctggtagtgtgtttagaggaaaggataaaaccgatttacctgcatttaatttttgacctgaagcacgacaataatagtcaagagaatgtttgatagcatctatggaccttgtattagcacgactcagaataagactatcatctgcaaagaataaatgtgacactgatggagcaccacgcgcaactctcaagccttggagattacaacagtttttctcatattgaaaaagccttgaaagcccttctacacaaataataaataggtaaggcaacaggggatcaccttgacgaatatcacgactaggaatcacttgaccttgcattgagccattgatcaagaaataataaaaaacactatttaagcatctttgtataagatctactactgagggagcaaaacccatggcaatcatcatactacaaataaaatgccactctactttgtcaaaggctttactcatgtcaagcttcatgactgcataactttctctccccctttttaaattttttagggaatgcaataactcaaaatccaccaacacattgtcagtgatgaggcaagattgtaggaaagcactttgtaaatttgaaattaccatagagagaaaaggctttaagcgaagcataatggactttgaaactagcttgtagaacacattgcagaggctaatagggcgtctagtaggtgatgaggggatttctaaaaaaggggtgatagacatatttcttggctttttatcttttggaatcaacgtaatcaaagtcttattgaatgaagaaggatcgacccctcattgagaatatctagaatagctttggtgaccaaatctcccactatatgccagtaattagtataaaacatgactgacataccattaagaccacgactgctatcttcactcatcgattttagggcatagaagacttcttcaacagtgtagggttgagtaagaaactggtccatatcggttgtgattgtacatggaattgaagaaataacatgatggagagcttctaaacctatgccatcaatagcataaatatcgttgaaataattttaattgttttaccaataccttgaagagaagtttgttcaatgccttgatagtgttgtaagagcacctgttatttgctttttaatggaaaaatcatgtatttgagtcaccagactttagccaaagaaactcgagaatgctactgccaatattcttcttcctatgctagaagttcatctaagattgattcactcaatttcaatatgtcaaaacgagcagggctagtttcatttgagttgtttaaagaggccactttgtcttaagtaatcttgattttattagggagatcaccaaatttagagtgatgctaggaagatagataacaagagcaagctgagatgttttagatgatttgggcagcaggattcgagtttgtagcaatccaatattctgcaatgatatcagagcaagcagcctcttgcagccatattttttcgaacctaaaccgagattttgatttctgtacagccacatgttgcaagggagtaattttggttttcaaagctttgtggtccaattgataaaaatccaaatgagaaacaaaaatccaaatatttttctagtccaaaattgttggactagaaatgtttttctagtccaataatgttggactagaaaaacaccccttttatgtcccaggctattatgtccaacacagggactcgaaaaatttatatagtccaatattgatggacttaaaagggggtttttctagtagtcatctcaaaattaaaattaggacattaat

SEQ ID NO: 224619 - DNA, 1504 bp, Cannabis indica
attattatattaatatttatttatttttttatcataataaccaattttattgctgagagtcaaacaatacattggtcattatacaaggaggaatttcttccaaccaagaaacctcgttttccatctgtagtgcatatcttgctaacccatatgctgcagtattaccatttcgcatcacatgaagaagacatgcacccgaaaagacaaataacaaggacctaatagatctaacaatacaaccccattgggaagcacattctaaagaagaattgactgaattgacaatgatttcagcatcactctccacaaaagaaacgaaaaagcctaattccaaacaccattttaaaacataaggaatagccaacgcttcagcttctttaggggagaaaaaaccagtcaggggtttagcaaaacatcccaacggaaagccatcagaatcacgaaccaaggctcctaaaccaatagtactggtttcaccatcaatagcagcatccacatttaactttaacgaaccagctggaggtgtaacccaaagaaaaacacgtgggtgggagagaaaacttagctgtatacttatgtgatttctgagcctgaaaccaactatcataatattgaagggcccaactcaaaattgcaggagcattcctaattggggtaccatgtttttccttattacattcagtccaaatgcaccaagccattgtaatgaagacacaaaactgatgtgggaaaaatactgacatgagataattaagaatgtcgatgatcttccaagagcgactaggtttgaggaaattctaaaaatctgaaagcttctaaacttgaactgagagagggcaaaggaaaatagcatgtaaaacattgtcaaattgctagccacaaaaaaagcagctttcagaaaacggaacatgatgagatagaagcgctgagccagtggaaagaatatcatgatacacacgccaagcgaagtccttaatttttcggggaatttttagaggccacaaagcacgccaccactttgctaaaggaagtaacgaagaagaatttgaattgggtataaagtttattgctagggaatatccactcttgactgtgtaaactccactttcttcataatgctacgtgaccgtatacagaaataagagtaataagtataaatgaaataatatatcataataaagatcaaccttaactaataaaccagttatagacaaaactcatgattagaaattatagttagttgaaatattaatggattattcaacttaaatcatttttcaagtttctaaggaaaatattattacagaataaatactagagagattttttatttaataaaataacaagtaaattattttcattaattgaaataatttttaaattttttgtataaaataatatacttttaagttattttgtagaaagataaattattattcattaattaaatgtgagatataaaagatttcaatttttttttatttttaaaaggattacaatatgt

SEQ ID NO: 224620 - DNA, 1264 bp, Cannabis indica
atatatatatataaatgaatgaacaaaaaaaacaatagatatattcaccaaaaattttaaaggatcaagatagagatataaaatttgctttgataccaattgtttgacatttatatgtatgagatgaagcatatatgattattgtatgaagtgtgaaattaatgaaatatatatgcactataactaaggatcgaaatacctctaactattgattctttgagcttcagtcccacacaagctttgatttgcaaaagaaaaagaaactgattagtctgggtaatcgggcttccaagctctctctactctttttagatgaacttaccgtgttttacagaatgagtagtgagctcggggatcaagaccgtatatttaaataagtgagaccttatatcaaagtctcagctataattaattttcagaatattttaataattagatctagaatttaaaatgtgtaactgtaatattaagtagtagaatatgaccttaaaatattttaaatatttgatttattaccctacaaaaatattctaacaggttcaacaagagaaaagtatgtgagaaatgatagcatgaaatgtggggttttgattcttatggttcttggttggaaaatgggattttgagtttttatttttttattttttttatgcgttaatgtggagtcttcacaataccaaagaacatgcaaaatggggttctgattttgaaaaaatgggaatattgattcttatttgctttgctcactatagagatactagcaatatataaaattgaaatagttatacagtacaaaatttcagcgtaattaatttatgttctgaaacttgatgtatgttcttagtagcatttaagaattaatttctgtagcagtctttttggaattattgaatgagcgtggccatgaaatgttgttcacaactatatatgttatatgtgtagaatttaaagaaatttatatatatacatacaattctttcaagaaacagggcaaaatttcagcttaattcatttttttctgaaacaaatgatctatgtttttagtacaattgaagacttaatttcttggcataattgtttattgtaggcaatctttatataagccccaaaacctgttagaggaggaatcccaaatttgctttcaacagattatgttagaagagagtttagccataatttataaaagataatgtgggttgcatattattatggatctatctatcttgttagacttgattacctagggttagtcttgagctttgct

SEQ ID NO: 224621 - DNA, 1870 bp, Cannabis indica
gcattacgtgaaaagacaaggccacggatacaaccagcctagtatgcccaataacccaaataaccaggggttacaacctcttcttgttgaaggggaggacatcctagttatttcgagagagccacatatcgcaggggaaagcaataacgcccataaaagatatgtgaaagagataaagaacgagcagtcggcatttgccccaaaaccttccaagaaggtgaaaaccgaggaacctcccattatattcacggaggaagacgagaaaaatgtgaaatatcctcacgtcgatccattagtgattacaatccaactcgccaataaaaggatcaaaagagtgttaataaacaacgagagctcagtaaatatcctatataaggaaaccctaaggaagatggggctcgaaaaatccaaattgaggccttgtatggtgaatctctgtggattcactagaaaaagcattgccagtctcggcataattgagctcgcattaactttgggcgaggcacctctatctgctaatgttatgcaagacttcctagtgtcgacctgccatcggcttacaaaatattgttgcgtcgtccagcactgattggactaggggcagtcagttcgatcaagcacctatccttgaagttccaaacaccagaaggcgtgggagttgtgcgtggcgactagatactggctcgcgattgctatcgcatagagttgcagcataggaaagtcagtcatcgatggaggacgatcttggcagaagaaaatgaaaagaaagatgaatattttgacccccgagttcaagatgagagaaacctattaaaaccaattgaggaattggaagaggttatcctcgacccaggaaatcccacaaagtgtgtatacattgggaagaacctggacgagcaactcaactagcagctaataagttttctgaaggcaaaccaggatcaattcgcctagacccatggagatattatagggatcgaccctaatattatttaccatcattgaaacattgatccaaactacccagcaaagaggcagaaaaagagacccttcaattccgagagacaatgggcactaaaacaggaagtggataagttgttggttaatgactttatacgcgaggtgttttatccctcgtggatagccaatcctgttcttgtcccaaagcataatagaacttggagaacttgtattgatttctctgatctgaataaggcgtgcccaaaagattgttttccactatccaggatcgaccagttagtggatgcaactactgcgcacgagcttatgtcatttatggactcatattttggatataacaagataaaaatgtatgtcccagatcaagaacatacaagcgcctaaggaagtacaagccctgaaaggaagaatgggtgcacttaacacattcatttcaaagtcaactgataagtgtgtgccgttcttcaatatattgcgaggcaacaagaagtttgagtggacaaaagagtgtgaaaaagcctttcaaaacataaaaaggcatctagcaacgcctccagttttggcaaaaccaattactgaagagacactatttctctatttggctatctcagaggatgcaactagtgcatctatagtgcgagaagagggtaagcaccagcaacctatttactatgtaagtaaaaggttactaggggtagaatccagatatcccccctaggaaaactcgcggtgtgcctagtccacacgtctcgtaaactacagccatacttcaaggcgcaccccataaaagtgttaaccgatcagcccttgagacaagttttatcaaaactagatgcttttggaagattgataaaatggtcaatttaactggggcagtttgacataacat

SEQ ID NO: 224622 - DNA, 1578 bp, Cannabis indica
gaatataaatatcgatattattcattaattggtctttgttcctgtgaaacttacataaattgaatctacaagcctattccatatttagcttctagatgtgaagtggatacccctgctcaccttttaaagaagatgccactattaaagaacagtgggagaccacaccataaaagggtcgtgggtgctagcactttttgtacactaatgttgagtagatagaactactactttggagaagaattctgtaagccggttactcgtagtatttgcgaaggtgctctccattccagtatcttggttggagaatgagctccatgttatcgttgtaccttcccagcttgtaggctccattactagttatctatgtaacttaataacaaccttcccagttaggtctaaacactcctattgctgagtctttagtgttcaggaacactcttcggagcaccatgtctcctatgaagaattttctactcttgacgtgtttgttgaagtgtctttctactttttactagtacgcctacagctttaggttgggttgtttcttcttttttctactttttcaagagactatgccaacaaggtgttgtttgtttgttggtcataggttgtactcctgtgagacggtggcactaactctataagcaacattgcctcgtagccataagctagagaaaatggagtttgcctagtggtcatcttctcaatagtcctgtacagcataggacatctgggagtagttcaggccagttgcattttgcttccaaaaggtgcttctttagggtgtccttgagtgttttttttgacaacttctatttttccatttgcttaaggatgggccacggcagagaacctcttgatgatgccatgtttggtgaagaaaaaatgaacatgtcactgtcaaactatttgccattgtctgacacaatctttaggggaagatcaaactagcatatgatgtttttgacaacaaagccaatgaccttcttggaggtgattgttgtcaggggttcaacttctatccatttggtgaagtagtctactactacgacaacaacaaactatatacccctccttttccctttgggagttgaccaatcaggtctatcccccacactatgaagggccaaagagactacatcatcatgagctcattaggtggagctcttggtatcttcaaaaatctctggcacttgtcacattttctaaaatagtccatcgagtcttcgatcatcgttggccaaaagtatccctgtcagagtatcttgtttggataatctttgccccttgcatggttttcgtagaagccttcatgcacttctatcataagtcgttcaacttcgggtttggtgatgcaccttaagagaggcatagagaatctttttctgtacattatcccatctaggatcaggtacctagcagcttttcttcttagcttgctagctttgttttgatcttctggaaaaacttcggtttgttggtaagcgtcgatgggtgtcatccatgttggcatgtcatccaacatgtcgacttcttctgggacaacaacactggcttcctctaggaactgtatgggca

SEQ ID NO: 224623 - DNA, 989 bp, Cannabis indica
tattatcataatgggccttttagtatttttttggcccataaaagaaatgaaattaggcctgagataaagtcatcttttaacctcaagcttcagactttggagccgtgggccagcaaaggaaaagaagagctggctatttgtttaaaaaataatacagagcagattattaatgatttctttgaagggaaattaaaatcaattaaaccaaagtctcgagaggattttagagctgcaactataatgttttgggcagattttgaagtaataaaaaaatcagttaagctttctattcttgaaaaaacggcagaggtagaacaagatgaagaaaaggggtttgaacagtttgggaaggtctatatcagaaaaagaaagtcaatgggacacaccagagttgaatcagcagtgtcagcagaagaagaattttattttgagggggaggaggctgatgtagagtcatttgaagaagaaatgttggggctaagttcagagagtgagtgttcagagggggaaggaatagattctgaggccgaggatagtgaagagcaagaagatattattggtgacatcaaggaactgtggagacagaatgaacacgaaaagcagttaactactgattatctcaggaagggacagaatacaagacaaatctatcatgaggatcactcgtggtctaacatcgttgaattcatggcggagatgggaatggagatcctgcacaataatgatgacaacaatgtgatcaaaggagaaaggaagccaatgagaaagttaagcagagaattgaataatctgacatttaatgtcaattatgatagaagctgcaaaaaagcaggggtgatcaagaaagcttaatgaagatcctttcatggaatataagagggagtggggacaaggagaagagcaattaaagcgacaatatgtaaggccagtccggatgtggtgattttacaagaggtgaagaaagatgttgtagatagaaggtttattgg

SEQ ID NO: 224624 - DNA, 1437 bp, Cannabis indica
ggtccaaaatcagattctggtttggatctcgagttttggtgcgagtctaggtcctagtacgagttcaagtttgagtctgggtccgggtgttggtcgaagtccagatccctgttcgagtccgggtcgtccaggtccctgttcgggtccgggtcggggtcccgatccgggtcctagtcaaggtctaggtccaagaccaggttctggtcttggtttgggtccgggtttaggtcctgagtttgggtctcggttcgggtctcaattcgggtctgggtctggcttctaggttctgatctcggtatgggtatgggtctaggcccgtgtccaagttaaggtttagggattgaggtttagtgtttatggatttagggcttaggttttaggggtaagtgtaaagagtttaggatttaaggtttaaggtttagggtttagggtttaagaattcgcttccagtttcaggtcacagggtacgatttaaggttcaggtgtgggtctgggtttgagtccgtgtctgggtctaggtccgtattcgggttcacgtttgagtcttggtcccaaatccaaataccaccacatgtcgagtctagttcgagttctagtacgggtacaagttttggtctgggtctgggttcgggtcaaggtccaattccctaatttaaacaccgactatggggtcgggtccaagcctctggtcttggctcctgggtcccaggtccaaatccaaatcctggtccagatctagctcatgtcttgggtcgcagtttgggtctcaaatcaaggtttaggtcttgggtcctgggtcatgggtttgggtccccaattcaggttaaggtctttggtcgttgtctgggttagggtcccagtcccagtgcaggtcccggtccgtgtttggtactggtccttgtctcgggtcttggcctggtctcggccttggtcacggttccattctaaggtcctaggtctgagtatcaggtccaaggtccgaatcccggtgccggttccagtatgggttctgttcttagtctatgttcaggtctcggttgtagtgcgggtctgggtcccagtcttaatctcggtctgagtcctagtttttggttcgagtttgagttttggtacgagtgtggttctaggtcaaggtcccgagtcacgggtcctgggttccaggttctgggtcgtaggtcctggttcaagtttgtggacttaatcccggtctaggtccgggtccgggtccatgttctgttccacgtctagatccagttttttgtcaaggtcaattcctgttccatagtccttattccgattcttcttccgattttgggtctcgggtccaagtttgggtttggatgctttgtctagaaattgttctagatttggatcttggtatgattcgaagatcaagatgtggaatatgggttgggtccaagcctcgggtcatgggtc

SEQ ID NO: 224625 - DNA, 1729 bp, Cannabis indica
tatattttagcacacctaaaaaactgcaatggtgttctaaaaagtacgctaaatttgacacatgttaatagttgtgccaaatatagcattgtgctaaatttagcccacaataaatgctacttttttatttactataatgtcactaactattgtaattcattgacttttactaaactttatttgctttatttaccatattactattatttaaaaaataataaatgttgtatattctcaataaaatatgaaataaccatcaatataattaatttttttttttattttacattttgtgcattggagcacaattataaatagtgggctaaatatagcacactcattttttgtgtcaaattcaatacaaattttagatcttccattggagatggtctaagagcatctcctaaaatataactcacttatggtaaaaatgtactctaatgctgtgtcaaaaagtaataaaaaatttgtatcacctgtacaattttattattgtcttttatctatcatttttattatttcattaatatatttaactataacattaatgaagaattatttatatttttttattttacataataaataataataatgaaaaagttattatttcttctatacatttaataaaaatattaaattttgtatcaagttttataattatgcattgaagcacaaatttagagataaaaattgagtgggtaatgagaaaggaatgcaccccaaccccatctctactccctatttatgctcccatctctgcccttctgtctagaattacgtatcaacgagcctggtattgaactcaatttatggtggctttatctgtgggtatctctttggaagttaaaaattttaggatgggtcacatcctagagattaaatgattgcttacgcttaccccagtgcattggtgctaggcatgagtaagcaagaacctagtactactccatgggcctcaatttacagatatgtggctagcttgactaacatgtccgtgaaggcattttagtctttggggatcagcctaattatataccttttgaagccttgaagtagtttgtaagtatggagacatatgcagccatattttttctctttgtttgatattatcccgacacttgattcacaaccagctcagagtcgttgtagatgttaatattttcagctccgacttctttaacttgatgtaatccatctataatcacttcatcctccgcttcattcttagaagctgaaagctcaaaaggaatggcactttggagctggtgtccttgaggggagatcagaataatttcggctccaaaacctttttcatttgaggctccgtccacatcaactttctagattaccaaccctagagctggttcttctggattgtcatcgatcttggtgcactcgaaaataaagttagttacaacttgacccttgattgaaattttgggctggtattggatgtcaaattagctaatttttgtagctcattttaatagtcttttgagggctctaacttctgaagaacttgttggagaggttgatttgttaatactttaatggcatgggcttgaaagtacagtatcaacttcctggaggcaattagtaagcagtaagaaagcttttcaatcattaaatatttggacttcatgcccaagagtctcttgcttacataatacactcgtagttggacccttccttcttcacgcacgagtgtaacattgatagcatgatc

SEQ ID NO: 224626 - DNA, 1740 bp, Cannabis indica
tacattatatacatataatcatgaaataaatcatgtgaaccatgcaacattaaatgttttttctgatctatattaataagtaaatctgattatattgaaatgagttttatttagcgcgtaaaatcaaacatggagtggacgagataatcatgcgctgacaccgtagattcgctgtcttgaatctcaatggttcctggttcagggagctcctgcaccataatctcaatatctgtagaagacatcaggcctaattctatacctccagtagttgcgatctcctcttctgagatcgaggtcgggataaaactatcttcccgttggtcctcgtcaccgtcaaatgcgttgcctcctgagccaagcatctgactatccgacaggtcgctcatctgaaagatagaagatcttttcagcgtggtgaatgtgtgaaaaacaaagtaagtgatctcacccgcatataaactataaaatcgtcttgggaggatgatttgaattctcacgaaaactaaccatcccaccaatacgcgaaaagataggtgtgcgaatagaaagacatctcaaaaaacggctgggtgtatcccagtgacctaagcgacatgcattttttagcatggccctgaagtaactgggagacacccaccgtttcgaggagtccaactaatcacaacctgcgagtgtgtcacgcatctttagctagcgatatacctcaaaaaacagctgggagaatctcagtgactcaaggggcatgcgttctcaagcataaccctgaagttactgagatactcccaccgtttcgagaatatctaccagccaaagaatacgcttatcagaacattagcgcatgccgcaaatggctgggtgtatctcagtatttcaaggaacatataatcgcatatatgaacattagaatactgtgacacgcccaccatttgaaagacttaaccaatgttcccacaacaaaatatacagagtacaaaatcctaaagttctaagtaacagttagaagtgataaagtctctgtgaaacctaagatgaacagacatgcgagcattcgaagtgttcatcccaatacccgcgtgtattcaaaatataaagtggcgactattcaagcatttttcctaaagttcacgattatgccaattttaggtcattttctctgagattacccagttccatacctaaaaacatagtcccatatgtatttcttacaaaaatgtattcctaaacaccctccaaaatgccaaaacccagaaaatagcattttttctccaaacagaaaacaaaaatgcagtgaaattcgaaactaaactttagttttgataagttgttcctgctatttctctcgataacacctgaggttgagaaaatcctacaaagaaaggcagaaatctgggcaaactatgaaaatctcttttgaagtctctgagagggagggaatagggaagttaagaaaatgagggaaaatggggaattttgattcgaatcaaagggtttaaatacccatatccctcattaattgggatcacgacatgtggcaaccggaatgcctaaggtcacccaatccaacgaccaataatggccacgtttgcatgaaaaccgaggagttttctgacgtggtatcataaatggaataaaagtaataattacggccgtcattttttgaaaccctcgaaaggacaaccaaaggtcacctcctcgtgacaaccctttcacatgtctgtcgcgtatagtttcccttgtgac

SEQ ID NO: 224627 - DNA, 2066 bp, Cannabis indica
aattaataaataatataaatgacgattttatttgataattaattataattattaaataaatagttttggcatttataagattaaattggaaaatatggtattattgaaagaagaataagtggttaaaaaaagtggcgaaattataactagagactggtccttttcatgtacgaccattatgttatttttgcctaatattttattcttttttaatccatataattcagcccttaaccctagttgaaatactataatagaaacatgatgctctcacacatctttttttttaacaatttgactattgccttcaacctagataaaagagttctttccatagagatttcacctccttcattgttcttcaccatttgaaacattgagtgaaagagtgccatgcccacacatagcaagtcaagtactcaatcatagtgagtaagacggtggtgaccaaacccgaaggagagaaaggatccaggttcaaatcttgataatgctctgcgatagaaaagaatcaagggctaaagatcttgaacggaatgagttattttattccgctgcaatcaatgttttttaaactcttatgtgtttaatttcattgtttcagagatatttatatttaagatgttaatcaacttacttattagtaaatctagatcctggtaaaatatttctaacaattgctacataaatctcatttttctacttaggtcggcttacatgtacacaacatgtaatatttttaaaagattttacaggatcccaaatttgtaatattattttggtttaaattaaaattagttactacaagctatttgtattttataagttgttttattttaattcacatgacttagtagacctcgattaacggaattagtatattgtaatcacgacaaatggtgttccattaattagggtattgcactctagtatcactaaatatcaatatctaaatgtaactatatgtacattcatactgctattatactaggtaaacgatatcataaaacatgtatatctaaaaatgtgcgtatgtgtatctaaatactaatcttatctcaattctaaaattaagtctaccggtaagtgtgagtaggaaaattgctcgacgattagaggccttaagtcacattaatagtaaactgataagtgtctcgctaaaacactatctaggacttaaattcacaatttaaagttttcttatcgatcaatagtgtggcaataccctaaacgtcgggaaaacataaaaattggggtacccgaaaatatcccagtcaggcaactaaaaccccatctgggtacccagaattctcagtagcaactggtagcccgaattgcaccagagaacaagaaaactcaatttttctctatttcaaactaccccaaacctgaaccaaatcattccaaattgtttagaacagccctatgacatattctaaacatattagatagctcagaatctataattgcatcaagaattaaaaaataccattgaagatcaagctttgagttttcaaaacttaagcttcgcttcaacaactatagctgctcaactacatacaatacaaactgaaaacacctcttaaaacatgcaactaattcaactctcaatctccaccctcatcaaacaaccagaacctattcctccaaaacttgcatagagactaaaatgttttcaccaaaaacaaagaataaagcatgaatacatgcctagaacttataggattcacttggctttgatgggcaagaactcttgagaaactgaagaaaaaactggtttcccttgggttcttgttctggccgaaaaaaggaacaagagagagagagtctattccttgtgtttatctaactctttctttaattttgtatttatctcattaacttaatttgttttttttttattttttttttgttaaaaaagaattctctacataatactatcttgaaaatgaaaaataaaatcattacttattaactaagagtaatcattttggtactaacaaacattaaattaagggtaaataccattttggaccatgtgttttgcaaaagttacagattggacc

SEQ ID NO: 224628 - DNA, 2309 bp, Cannabis indica
gagcaaacttttgataatgacactcaaggaccatgggaagatgatttattaagagatggaatatcaatgatgagtgcattcatggagaaggtgaatgcatacatggagaaggtgaatgaatatatggctaaaaatgatgacttaattcacagcaatgccacatccttaaagaatctagagaagaaagttgaggagttatcttgggagttgcataataattcccaaggtgtatttccaagtgatatgcaaaatgtgtggctagatgatgaagaaatcacttggaaaaacaatgaagattttgagaagtgtaaggaaacctttgagcatcaaatggagcctacttcaatctaaaatgatgaagaaaaaggagagaaaataataaattcaaatttgttgaattctatctctacccaaggtgttgagaaattatttgagcaaagcattgaagaaacgctaattccaccaccatcgctcatacaacaagtaattgggtatcaatatagtgagaaaatggtcatggataagaacacatatgaagatccatatttgctaccccacaatccacctccattagcgtcattccttggcttccattatgctcaatcaattaagaagagtcaagttgaacattggagctcgcaaatttcacgtctcgccaagcttgagggtgtccaaaagaaagacccatatgtgagggcatatgccactctctatgggcggaagccactctttgatgagcatttctccaaaagtcaagctagtgactttaaatcaagctcttattgggaggcaacctatgtttctcaactttatttttaatcttataactctagttgatatcctttgaaaaaaaaataataattatgtttaattttgttgtcaatttctagtttacatttttatttttgtgtggattttacacttagtttggtgctttaggtattttcggagaacaatttagagttttggatgtgatttgggggtctgaagttttggctaaattttttattcaattttgctacaacaaaaactgggtatgaaaaaaaaaatcgttgacttggaaaacttcgcctgctgcagcatttttctagcaaaagtggtccaagttaaatgagcagtcaagaaggtttttgctgaatttttgcgaaaaaattgctacagcaagcatgtttgagtttcctttgagagctgtagtaatttttgaaaaagaaaaaggcaaatgcttaaatagtttttccccaaaataaattaaatgaaaaaaaatgaaatcccagaattcctaacactatttccccacatattttttttctttttcacccatcttcttccccatctcaaaaccctccatagctgcccaagctcaccacctcacctgaacacctatcttcattcaccatctctcagtcgaacaccattcaagctccattccactatgtgcagcatctttcatggcctggtctcacctttccaaaagttcacactcatgtctacatgccataattctcgtgctttgagggttgatttggcactatactagtttgtatttttttgggattaaaatgatatattttgtcaggtgctctgtgcattggaacaactggttcgttgttagccttggtgactattatagatcccttttggtgcttgagaagtgcaatttttgtgagtatttattatggtagcgtctacatcaggatccaacaagcgtttgcaaccaaccaaaccagctgttatggtaattggctgctagagcaaataactctttattcaagagttatcagaggcataaaggacgaagagggtagacagatatttaattcccttgggagtaaattgggtcacgcagaggcggaagaagtctgccacattcctaaaatacggtgcaaaggaaacaatgccccttgctgggcatgggcaccccaccaagcgcacattcccctctcagggtttgtggcttggttattgtgagctagaatgtaacagtccaattcgcccaagtagccatcctattcgagatcccgtaggcgcgcctcagtaaccttggatggacggctcacccacctggcacccaaggtaccttgccttctatgaggaaccgcagtagtaagttcctcactggcttagtccacgccctgaacgaggatgtcgtcatcagcatcgactgtctccccggcctcattgtaccccccatagtttgggggtgcaacctcctccgcttcctccgcctcgaagggactgctaggacggacatcgtcttgcgcttcaatctcttggacctcagcgtccccttcatgatcctcccctcctgg

SEQ ID NO: 224629 - DNA, 2218 bp, Cannabis indica
ggtgtcaagacaagcaccccagtcagcaatcgcaaaagctttgagggtgagttttaatggtgttgaaccatgaaagaattcaggtagtgcaatactctgtatgcagcatctacatgaggttgtcgaggtgattgagtgtattgagtgagtttgttgacaacaaaagtgatgtttggtcgtgtaattgtgagataggttaattttccaattagacttttgtattgtgttggatgttgcaataatgttcctgggtccttgtgcagcttgaggttgggctccatgggggtaaaagttggtttagagcctagcagcctgtctcttctagaatttgcagggtgaaaggccaatgagaaacaaatatgccctttgaatatctaactacttctagtcccaggaagaatcgaaggctgccaaggtctttcaatttgaactaagaatcaaggttgcttttaaagtttgttatagttcattgaggttattagaggcaacaagtatatcatcaacataaatgagcaaggcaagaaaaacacctgatttgtgtctcagaaataaagagtgatcagattttgagtggtgaaagcctttctgaatgaggtggcttatgagtttagcgtaccactgtcttgatgcctgttttaaaccatacaaactcttttgtaatttataaactgcattttttggaatcactcctttaggagtgtatccttgaggtagtttcatgtaaacatcctcatttaaatcatcatggaggaatgcattattgatatccatgtgatgtagatgccaattattgatggcagcaagggaaaaaaggatttttagggtattgaattttgcaacaagggcataggtatcgaaatagtctatacctggttgttgtgtataccctttggcaacaaggcatgccttgcacctttcaaaactgccatctgggttatattttattttataaacccatttgttgtcaattgtatgttgaccatcaggtaaagtgacaatgatccatgtgtggttgtcttcaagagcctttatttcaattcccattacattgttccaaattttgtatttgcaagcttgggagtatgacttgggttcaaccagctgatgtgcagcaagtattgctactctaaatgaatttaaaaatctagtgtatgccagggtattggcaagaggatgtgaagtagaggcagggacttgaatcatgtcacacaagtattgctgtaaatgcttgggcttgtgtgtagacctgccagatttagtgcgatggtcatgaacattttctgcattattgttgatgttgattcgatgtgtatcaacattttctgcattactgttggtgttgagccgaggtttatcaacattttctgcattatttctggtgttgattcgattttgatcaacatattttgtattattgctggtatcagcagtgttgtttgttgttgattcagaaatatgttgaggggttataggtgatgaaaaaaaaactatcgaaattgtcagtgggggattcgtcagtcatagggtttagggtaatgtaatgagaattgaaaaatgttgaaaaatgtgttggtcgcccacatctctgcaatgaaaaatttgattagtgttgatgtcaagtaaggtgtaagccttcatattttcaggatttccgataaacacatatactttttgttcaaaatttcatatgaagttgtatcttttaataaaattgaaggtgttctattgatcaaataagttgcagtatgtactatatagctctaataaatcagaggcacattagattgaattgctagggcccgagcaacatttagtatgtgttggtgtttttactctacaacagaattttgttgtgggcgaccaacacaggaattgtaatgcatgagtcccttgctggcaaaaaaacttgttagagttagttcatttgcattgtctgttctaacagactttatattagatttatattaagtgtggagaagggagaagaaatgtttgattatggcaggggcatcagatttggcatgtaggtccatgtatatcgtgaatgatcatcaactatggtcaaaaaatatttatatccttcaatcgattctatgtgatatggacctcaaatgtccatgtgtatgagattaaaggctgcaggtgtaatgttgttatgggaaataaaaggtaatttcttttgctttgcataatgccatgttttgcaatgaaaattaga

SEQ ID NO: 224630 - DNA, 1759 bp, Cannabis indica
caattcaaaatctgaaaagtgagttttgggaatgctaaaattggatgaactagattttgatgtgaaatgaaaatatttgcatagctttagtggcattaagattattgtttaatgctgattatatgttagtctatttcagaaatgattagataacatgtgatttaacacctaaaagatctggaaagagttgggtaaattatctgtcattcactttaagaaagagaatagtaattatcattaacaattagaaaattaaatcaacatggttctttttcctaatttcttatccttaaacaattttagcttaattttagtttattgtattctttatttttattgttatcaaaattattgtttaccaaatagaaatataaatctaatttagtagtattcaattaatttccttataaaatcaacattacttgtgtgaatactatttgattacgtgcaccgtaactattcatatttttttctactgctgcatcactttcctactaaaaaaaaaaaaaactcaaaattttttttgaaaagaaagaacaacgtcaattgagaatcattctagccgaaaagtccatcagggaggtcgggccacccccattatggaatagtttgtacaaaagacaaaattattaaaatataactataaattatattaaaaatctaatatattgtatgaatatttattaattatttaaatttatatagcgtgtgaactttgagcgtataggtataaaaagtctaaaattggcttaataaaaaacagaaaagtgagaactcgtctctaatccttttggataagttagaacattttttttttggatgaacggataagttagaaattggagtacacgagttatagcaacggatacatcctcttatatttattacatctacatagttttaattaatattttttatataatatgatgtatttatttaaaatattttataattaaaaaaaaatttaatatataaaaaataaaatttaaacagtatgttatattataaatttaggtactttttttacttttacactttaatacatttttttgttgtatttttataaaattctacatagaaactcctattacaaccactttaaaatctaaaccataatttaacaaaaaaataaaagaataatatataaaataataccctattaattttttttataaaatatcataaataagtaccatatatactattatataataaaactacaattataactctttaaacatcaaactacataaccaaaaaaaaaaactcttaaacatcggaaaaaaataccagcacctaattataaaatacaaattaaaaattattttccaccttagatttattttttttattattattatattttttttgttgatgagttcacctagtttagttttgtttgcccagaaaaagctaaaacatgggcaatccaatttttacaagcacattaaaaaactgaaaataaaaatacaaagatgatgtttaaaaaaaaaaatacgaagatgatagaaaaccacgtgattatcacgtggagattcttatccttcaccggatttaagaaccagataatcgaaagtccagaaactatcatccacatattattcgccaagtgtcaacatctccttttgtttttaataaccataacaatcatacaattattattttaatattttagggctgacgccaaagcagaggaggcaaactcaccgagttagggctcgccggagcttttgagcaaaaagccacggagcactcaaat

SEQ ID NO: 224631 - DNA, 2600 bp, Cannabis indica
  modified_base (2565)..(2565): a, c, t, g, unknown or other
tgttttatttttttaaaaagaaattgaaagaaattttaatattttttatggtaattcaaagtgacatatcccatatatgttatgttttttttaaatgccttatttttttctattaaatttcctcaccatatttatataaagtagctttattttttttttctatatttatgtaaatacccctttaattaaatagtcattataattaaaatttaaattatgtatattgacggttagaactcgtcaaccaagttagtggtcgaaaaatgtgtaactattaagagatgagataaagagaagaagtaaaataaaagtgaaatgatgaatactttctctctattgcattcactatatgagttacaaaaatgaacttccaaccccctctcatatctgagatgggcgtacttataggcattagtggccagtggtacaacatggtcaaaacgtaccaacacatcgctctcaagctgagggctgtaggtgctggtagtggccttgcacctcatactcttgtcgggtgtcaggtgatccctgactgcaggcctatggtcctaggttgcaagtgcgtggttcccagttacaggagagtgatcccgagctgcaggtgtgtggtcccgagttgcaggtgcgtggtccctagctgcaaacatgtggttttgagctacaggtgcgtggtcccccaatcacaagtttgggggtccccacctgcacgccttaggtgagtggccatggtgtacctttggtcgggccgtcagaccatgcaagtccattaccaccgctactcgtactcccttgcattcaaaggtttcagaaggcgtgggagtatgccttcctctgcacatcgtgtccctggagtttccatccaacttcacccatgcaatctcatacttgactcccttctcccacaacctcccacttggcttcctcttctcacaacttcacactggcgccctcttctcacaactccacacttggctccccccacacacacttgcccgtcccccctcgcacacacggctcgcgtgcgagccccccatgggcttgcatgcgagcctctccactcgcacgcccatcacacccactcgaccgtcccccttcgcacacacacggctcgcgtgcgagcccctcatggctcgccgcgagtcccctccactcgcacgcccatctcgcacacacgcctgtctcctcctctcacacatggccgtctcctccccgcacacacgactcgggtgcgagcccccaatgggcttgcaggtgagccccataccccctcgtaccctgccaaactcacctttcaccactcacccgcggctcgcatgtgtgccccccatgagttgacatgcgagcccccatacacttgctcggacactccccgcacacgacgtctatccacacatgtatagcttctccctctttcacctgcgggtcgaacagatgctccaccacttgtatgaaggttttatgactcaccaaaaaacgcccccgactcacccaatggaacatggactcgaacgatcccccatggggtcgcacaatagctagggagtcgcttaacagcctaccgactcgcatgggagccatcagctcgcataccaagctgtcacagtttggtagtcatagtaatttggccataaatttctcaatatacatcagaattggatgaatcaagatgcattggaaagataagaaagagatctttgaatcttatgtttgtggcaagatccaattctaaacatatcactacaaaaatcctctaacaattgtaacctagtgagttgatcttactaactctactcatgagttgttaccgggttgacctccaagttgcacggatataccccgagatttgaaagcatggatttccaagattaatgatccttaggccgtatgcattgactcagtcattctttgaccgaatcttacagttgatgtctctcgactgctggggccgattgttgactaatctcgaaaatctactcttctaatttttgggcttaacacttgccccagtctaaagaattcttttaagtgttcttggagactatataagttaggggatctaccttgttgaggcatgagatcctctcagttatctctgagacagtgctccctttatacggggggcttcccttggttaaactttactttgcaccaatatgtcaagcaacaattttacttggccttagctgaatgactttgagggtggctcgctgacccaataatatttgtaactggccttggccgagtgacactggggtcactctctggccaagccatctttgtaatcggcgttggctgagcaactttagggtcactctttggccaagccatcttcgtaactggaattggctgagtgacactaggatcactctctatccaagccatctttgtaactggtattggccgagcgactctagggtcactctctggctaagccatcttcgtagttggcattggccaaacaactctggggtcactctttggccaagccattttttgctagtggtaggcagccatatactatgggagagttttggctatttgagcagtctccctcttatttaaatntttaaaaaactatttataaatttttaataagtaaa

SEQ ID NO: 224632 - DNA, 1734 bp, Cannabis indica
agcactcccaccactggaatcccatccacaaccaatgctcaacggacggtgggggatgacactaagattcaaaacctccgtgacgccctggactcatgcaaggtcatagtaacgccttgcaccatgataaggaggatctccgtgctgcaataaaccttgcattctatgagcagcaacgctagttcattgagtggagggacagggagatggaaatattgaaggctcaataagcagccatcgatgaccgaacaaggcaggctactatactgatacagagagcctatcaagttgctaatcggcaaccagctgatacgtccagtattccactgggtggtaagaagaaattgttgctgggcatactgcccatactcataatggtcagtcgtccaattcccggccacaggccccacctgtgggccgaacggtagacaaccagaccctctcctgattgtcctttaggtggagttatacctaataacttcatccaaactaacagttctggtcaacccaccggccaaactagtcaaacactgagaccacctggtacttcagtattcaatagattgggtgcagcccatgatctcaggactgatttgaacagaagaagaggtctagatgaacaatacattcaaccagccgcccaaccaggcatctgcacttaggacccaactctaagagatcttgacgtgacacaggttggtgaagaggctgaaccagttcatacatctgtgcaagcacaattagatcaaatgaaaaatatggttcaaggtctgacctgcccaaaactcactgttctcgagctggaccgagcacgcggatcaccctttacctccgagatcgacgtccttgagctacccctaaagttcaagatgctgacctagaagatgtacataggaaaagaggatcccttatcacatcttaaatactttgagatgcaaatgaatctacaaggagtacggggtgacgtacagtgtagggtactccctgccacacttacagaagtcgcacaatagtggtacttcgagctaccacaagggagatttaattcatggaaggctttttccttagaattccatgcgcagttctcctcctctcgtcaactcccattacatctagaagacctgatcaaagtaaaataaagaccaggagagccgctcaaagcctacataagcaggttcatgacagaggccacaaaagtcgcaagattaactaaagaggggaggttgactgccatactcgggggcattgagttactcggagaattgtggaaggacattaaaagatgtggccccgtggggtctatggcgtagtttctagactgagaatatgggtttctcaacctcgaagaggctattcagcgagtagacgtcaaacctaagccgggccaaccacatgcctcttcggcaggagcacctgctcagagcccacaataccctagcagctcaactccaagcggaaaaatgtaacgcccgtatttgaaaacttgctaaaccgaatataaaacacatttgaaaaataaatttaaatatataaagttacgtaataattttttttacaaaatacaaggcagctcaaaatgccataagaccggaaccctccaggttgtgctgccgcgatatgtacaatccttgccaagctctaactcactactcctctagcttagcttttcccttacctacacagggtagcaaactgatgagtcgatggactcaataagatatgcataacatatat

SEQ ID NO: 224633 - DNA, 1079 bp, Cannabis indica
tggtaaaatatttccaacagggtttaccaagaacaatagggtactatgactctatatgggtgattgtagatcgatatacgaagtctgcacactttctaccagtgcgaacaacatatacagtggatcagtatgctaatttgtacatcaaggagatagttcggcttcatggtgccccaaagtcgatagtttcaaatcgagatccaaaatttacatccaagttctgggaaagcttacaacgagcaatgggtaccaagttaaagtttagcatatcttttcatccccaaactgatgatcaatctgagaggactattcagatacttgaggatatgctgagagcgtgtgtaatggtttttgaaggttcttggaacaagtaccttcctctgattgagttttcttataccaatagttatcaaagtactattggcatggctccacatgagatgctttatggaaggaagtgtcgttcacccatgcactgggatgaagctggtgaacgcagatatcttggacctgaagctctccaaagaacgagtgaggctattgaaaagattcaagctcctatgcttgcttcacagagtagacagaaaagctacgcagatccaaagcgtacaaatgttaaattccaaatttgagattttgtgttcctttgggtatccctaatgaagggaatttggaggttcgggaagaagggaaagttgagtcccaagttcattggtccgttcaagattcttcagaaagtaggtcaggtagcttctcggtttgctttacctcctctctatctggggttcataacacgtttcacgtttcgatgcttcagaaatatgtatctgatacgactcatgtattaatatcgagcttcaaaccgacctgtcctataaagaacaaccaatacaaattctggacaggaaagaaaaggtgttgtggaacatcactattccactagttaaagtgttgtcgcaaaacatcaaggtggaagaagcgacttgggagttagagtcgtagatgcgggagcagtatcccgagctttttaggtaaatttggaggacgaagtttctataaggagggaatagttgtaatat

SEQ ID NO: 224634 - DNA, 1466 bp, Cannabis indica
ccgacaatcatgattttgtggttccccaaggctgacgatggtcgtgaaggaccattaaggccttatcgtggtttcaccaagagaggaagagcgagaaagatatgagtgagaaaatacaggggtcaagctttctttttgggtttcaaggatcatcgatcatggtggtgtttaccatttggccaaacaatggctggagaagctccgtcggagatgaacatggtttctcaaagagaagagaaagaagggaagagaaaagatgtgtttgagctgaaaaaattagggtttcaagaggttccttatatacttctaaaaatttagggtttaaataataataataataatagtaatagtaatacgtttacaatcaagcttctacacccgtgctgtaatgccctaacccgtaagggcgccatgtgtgtgcttttatgaattagtctataataattaattattgagatttttggaaattaataaaatagagcttaagaaagaaataaaatagtaaataatagacatatgatttttacgtggttcgggcattaaaaatccgtagtcctcaagttagttgtattggccttacaagtgagtgttgaataatacaagtgttcatagtataaattctatctctgcactccttttatttctcttgaagaagaagaaagttaataggaatttttgtagaggtttggctattatagaattgttcaccctttgtacatagaaaatgagggtatttataggcttacatgtgggcaagggtactccctttacccacatagagtttcgtactattgcctgttggaagggtaaaagaatacagctgtaaatctgaccgtccaaccgttggataaaacacacgtgttgctcgaagatttctcctttacagaacactctctagacaagccgttgggcaaaaggcatgcccagaatttcatacgaacactaccatggcctagcatgggggacaggatctgatccggtgttagaaaaaggtgtaaccgtttgtaggtaaattttcatatgaagctgacatggccatttaccttgatgtagcggttgtgatctgtgaccagtccatagaggtctttccccaaaatccatttaccaaatcgtgctccaggacttctcggagctgaggaagaatatggttcttctgtgttctggagacgctacttgtgatggggatggctctctccataaagtatccataaaacccctcctagattaccaagacgcctctacaaggagcctttatagttatctctgctcatccaggttgttaaaaaatcttcttctctaatcatgccatgtgtcccttgcttggaaatacagataacttttactcccaagcttttgggactctccgagtttgaggagcttgcaatctcctcgttggaattgatcattggcacgtgctgactgttagagttgtggacacatctttttggtgaactgtaattcgttaa

SEQ ID NO: 224635 - DNA, 3816 bp, Cannabis indica
gaagttttgattttaagcaacccaaaccgctcgaaaaactgcctaaaactgccccctaaaaaactgcccaacccaaacttttatgggcaggtatgggttgtgattttgaaaaactgccaaataaaaaactgtcaaatagcccaagaaccgcctaacccaatccacgtgcagccctatctgtaccaggttttcaaaagttcctttattgagtaattcccaatcattggactcaaaggttaaatagcactgccaattattggtagcgtgtagcaagcagagttgtgagccttctgtgtcagcttcaatgggcaaggggcaagagggctcgaggaagaccatctctgggcaagaaccagagaatttcacctagtgtacaaacccaaggggttgttcattggcgctcacaacagtaggtgcagccttttctggagactttgtaggctcgatggtgagctggtttaaagatttcttcttattcacaattgtttttgttcttttgggttctttggtagaacctgaggcttcattcgcctgtgttgcacgttttttggatcttttgtttacaagattggggctgagcatgtcttccaaattgagatccatatctacgaggtaaaagagacacatcaaaacttactcagaaatagataatagaaaaatggggaataaactcccacataaaggaagttaccataattatcaaaagatgacgaggaagaactatagtaattactaaactctctagaccctgtgatcatgtatatatcataagggtatattggagataaatcccaattcgaatctggatggctcgccctatccaagttggtaccatactactcaacaatcccatactatgaactagtgcaactaagctggacatggaattgaaggtacgaactatcaaacctatgggttatgtgatctatgcagaagttgtcccatgtataaaaattatattggctatccctaaaggttactaacaatgtacgtgcagccctaagtatggtgggtgaccatccacattgattaccttgggatgcttcttctttagcatcccgagggattactttctcgagatagtggacgcaagcaacataatcttggctttcctctttggttgggactgagaccttctcccacgaggagtatttcaaaaccttgtagtcacaggtgaactggtccgagccaaggaggttgatagtcctcagattggcctcgttcaaaaggaaatttgctgatcgcaatccgaaaagaagacccaacaagattttgtggcgcttagccatctcgggggtgggaattggtcttttggtaaccgctgtcaacacaataaatgtaatgagtaagcaacctcaaagtcataaatataaaaagaactcaaaaccaagtttttgagatagaaattacttacgtataatgcgaaatgcagttgcattgacaggagaaagacaggtagtccagaagaaatcatccttgaactcggtcttgtttcacctcacaatgatcctacgaccatttgtgtgggtaccaagataataaaaacctcctaaacaccgcttcctcacaggaatagctttgacagaataaaaataaactatctcgagggagtgggacactcccaaccaaaatatggtacaagacttttaggccctcaagaatcctgtaagaacttggaatcaattgaaaaggtacaattccaagataattacagaaccctttgtagtactctctcaaggggagaaccgctccatccttgatgtgctcgaggctccaagcacctatcccaaacgagccactagttatagggccaccacactcctcgcaaattactcgttcttgtggaaagcagctgaattctctaggagcaatagatatgatgcggcatccttgcccttgcttaatgccacaagtctttaatacgccaccaacacagtctccaatggcccttatcttagaatcaataagctcgacctcaaaagggacattaggatcatagggggtctttgatttacaagtcttgggggacataattttaaaatctaggtcacctggtgaaaaagcaacaataactcgaggtaaaaacaagggtctcactaaagggatagaagataaagtatgaggttcaagccaagctgcatctcacagataacaacgtttaccctaagttatctcttgtgaaaatcgcctatagcaactggaaatttcatcctgattggtttttgttaaatgatccctaattttggaatcattaatctcaagtttggatttaggtttttggattttggatttgaatggaagggctaattctttaggatattctatttctaggaaatctagatttagaatatcaaaactaggttgggcacatattggcaaaaaataataagaatcccgattcctggaaggagttaattcgacttaaaccaggaacctaggaatttaataaacctaagttcactccttaaagccctagaaattaccaacaacaaaatcaaaaaatacttaaaccaaacacaataaaagaagatgcaatcggaagcaaaaataaaagtaccaactcaagaaaaagggaataacatagagtaagaaataaaccacttactatatttttgaagatttttgggcagtgaataactttgcgattgggatcgtgacgaatgtgatgatggcctctaagaatttctaagattaaaaatgaaatatgatgaaatacgcaaaaaataggtcaatgacaatgagggcatgcaaggtgatgaaaaacgaagatgattttttgtagaaaagctggaaggtttgaaaggcagaaatggtaaataagtgttttcacttgagttttatactttaagaataatcaccgttagattgaaagaataaagatctaacggatgtagacaaaggagaattggaaaagatgggcatttaatgcatgcctcaaaatcatgaatcctcaaaactcaaagcatgccatttttcaaactaagattaagacaaaaatacacttataatcatttaaaaagctctttttattaaaaaagaactttttaaggggcaattgttatacccaaaatttggcttaacttcaaaaagtgacggtcttgcattgaaaccacctgatataatgaaattatatcatttaatgcaaagaaaaagaataactcgttaaataaaggattaatagaaaatattcataactcgctgactacaagtgagataaggataaaatgctattaaaacttatatttacgagatacacacctgcctcggaatacacagtcaaagaagataatttatttattcaaaggagtgaatacagtcgaacaaagcaaccttggattacaaatggcgagatagctacctcgcaattctaaagaagcttgacgaggcaaactatctgctaacacttagcgttttttctacattatgatagacaaggataataactcggaattaagcgagatacaattgtccaaatcagcattaaccatctatagggataagaataaaaagcagttaagcagttattttatattatcccacatgctttgaaataaaacgtgagaactgtcaacgtttcatgaacagatacatttcaaatcgatctcaaatataaataactgacaacctatatttttataaataggggcagatttcacaaaaaacggatggagaattttatagagaaaaaagatatattatcaattatatattgtatcttgaatttagaaaatatcataaataagatagactcgtggagtatgcaaatttaactgcaaaactacgtaaaaatatatggtgttatatatacatttatta

SEQ ID NO: 224636 - DNA, 1711 bp, Cannabis indica
aggcgttgggtgctctttttggaactttggggatgtcgtttggatacttccaaggttcttaaaatcagtgacaaggtctctgaccccatttttgaccatgctagagagaatgctcgaagcatcatttgcatttggatgattgagacgagcataccaagtggattgtcaactttggcattgggcctagaaccaagtcaatctgggcactgggctcaactttcacgccccttggattctcattttctccccaagtttacttgtatcttcattatttctgatgaagaaaaaactttctggaacacttttttgggtatatgattagaaacagcccaagttgacaaaatgtcaacctaagcgttgggcccaacattaggtgtcaacctgggcgttgggtctaatttctagccaccaaatgactctgtttgatttccaaaaatacttgtatcttaatctttgacaaaaaaaaagagaatatgcctagaagacttctcgaaaaaaactccttggaaatggcccaggttgacaaagtgtcaacctgggtgttgggcccaggactaggtgtcaacctgggtgctcccccttttagcctctatgttgatccattacttccttgaaagcactttttttctcgtttttgatgaagataaagaaaatgcttaggatagttcttcagtttgatgcttggaagtaccccaagttgacaatatgttaaccttggcattgggtacttagggcacctggtgctctaggtgctccaaaaatgaaagtaatttgaatctgattcttcatatgatgcctcaaatatgttcgtgacatgcccaatttatgtccctgtacaaagttaagacccattttgtaacgccctaacaataggcaagccatgaacaacaattaaaacaaacgctaatctcgttaagctgggattactagagttaagagcgaaaattaaacttaaaaaaaaatagagagtaaaatcataacttgtaattattaaactttacaaacatccaaaaattacatttaaaaacttttcaaaatattacaagttatccgtacaccccgacctatgcggcaaaagtggagattacaacattttctcatggtagacccaaccctcgtggtctagcttggcctgaacatggacaacacaccgcaaagctctcgatctcatggttgatcaacaacagatataccctttctttcatagtagagcacccatagccaaggcccagcaagacaatataaataacaatatgcataacaatcagaaatcacataataaatattgatgtcattgcacctatcatctatttgacatagacctacgtgttacactgacacgtctatttacaataataccatataatagtttatcttggttctgactactgagtctaacctaataatactaataatagtatttttaaaaaaatatctcacaattttttttcaaaaaaaaatccaacaaaaaaaatatttaataaaactatatatctttatatatatcaataaagcggagatataaaacggtggtataacattttaaaattactctaaatacctctatttattctctccttaattctctcacgttttaattttttattaaattaaaaaatgtatatttaaaaaaatatctcaaacaatttttttctaataaaaaaaattcaacaaaaaaaatatttcataaatatcttacctaatatataaa

SEQ ID NO: 224637 - DNA, 1561 bp, Cannabis indica
ttactgtgtttttttataagtttcatactgcagtatactgtgttaagttttcactggtcttctactggtgttttgtaattgttttactgttgttttgagttattctgctttgtgttttactggtgttttataaaaatacagtatttttgaaaacttttccgtgtgacagtatttttataaaagttaacccaaattacaatatttttgtaaatttccctaaaaataattttgactcccactgggctagtgtcataaaaataaaccaatttataacttgtcatatttaaggggaaaaaaaaataaaactgagtgtaaattttctagtgttccgtataggaccaactgcaacaagttggccgaataatactaaaggaatggttaatttgatagattttgataattttatatttactggtaagcaagaccagtatacttttgactcccactgaacttatttaataaataaccataaaatataatcgtgtagtttattataaaaatggtacaaatcaaataagaacataataatagtataaataataataggaatggaaggtcctttgggctataggcccaatttgaaacacaaaagaagaactttctttcattggttggaagattataaatagcaccacacaaacatatctcaacatagataaatatcgaatatgagaagtaaagttaatagatgaaaatgatacaataagagcaagaacaaatgccaaattgcagtgagtcttagaactgtataaagataaggtaattataaattcttcaagaaaatgtcctcatttactactagtactgctacctctaacattttctcgagtggggattatgcaactaaggtccaaatggtagaagcaggaacaagctttcatgaggttccaattccacctcccaaaccacttttgattgctatgcctatgcctttgccatctcaatctcaagatggagaattcccacttctagttttctcccatggcttccttctctacaactctttctactctcaactccttcgacatgttgcttctcatggcttcatagttgttgctcctcaggtatttctatctataaatttctctagatatttttgttttggtgatttgccagtggaaattcatctattgggttcgttttgtttatgaatatgattaatttggtaagaattatgctttgaaacaatccatagtgatttttgctgttgattctgactttctgaggtactatttctcaatattctatgctgtcatgtgtgcagctcttaaaatggttgtactcgcttagtgatgacccaatgaaattagtaacatttttttttatctaaacaataaaattagtaacatttgatttatttggttttgagaaaatgattcagtaaagttgaatgttctggctttaagctagtgtcactgcgcttttcttgaggacaaattatctgtaaaaagttcttttcaaatattttcatgtgcttgccttgccttactccctaagctaggacaaattattttaaagagaacactttggtgtggtagtggtatgtatttgattagtaatg

SEQ ID NO: 224638 - DNA, 1892 bp, Cannabis indica
ttaaatagttacttaatttttttcgcaacgttgcctgaaaaaaatcgtttttaggaccgtcgcctgatatttgtagtagtgcaagagccgaacccatacccaattccgaaccaagacccaggcccatgactttaaaatggaacaagacctgaagtgggactctagaacgggacccagacccagacctaaatcggacccggacccagaccgagatccaaaacaaggacctagaccaaaactcatacctggacttgaactcggacctgggacccagaactcggaactcgtcactcgggatccggactagaactcggacccatactagaaatcaaacccggacccaaactcagacctgaacttagactaggaccgagacccaaacccagactgggaataagatcgagacccgagacacgagactcaagactcaaacttgggactctagaaccaaaccgagaccaagagccataccgagccaagaccctagaccaagacctgcactagaacacgaattaggacatgcacttagacagggactagaactggaactactacctagggcccttacttaaattgaggacccatacccggacccgaacttggacctggacctagacccaagactcgagacccaagatttgaccccaaacccaaaaccagaccagggatccagaaaaagaccaaggacatgaactaaaattgaagcagtatttggatctcgacccgggacccgagacctaggggttagagtcgacccatagtcggtatttgaatctaggactcggacccgaacctagacccaaacccaaacctgaactaggacccaaactggaccaggatccgaactcaaactcgaatcgagatccggacttaaatccaaacctgaacctagactcggtacccaaacccaaaattgaacccgaactcggacccaaacccagacctaggactcagacttagattgaagacccacacttggacccgaacctaaactcgggacctggaactcggaccggttcttaggacccgaacggggtctaggtccgagtttgcttcgggtcctggtttgagtctaggtttgggttcaggtttggctccaggtcccagatctagaaacctactaatggtttgtccaagcctcaagtcccaagtcccagctcgagatcaacaatctggatcccgatcttgggtccaggtgtagcttcgattcgggtcacgtctccaagttcgggccctactgtgggtccaagtttgggtctagatctgggtttgggcctatgtccgggttcggtgtgggtgcgggttcatgtatgggttcaaatctaggtctgtgtctaggttcaggttagggttcgggttcgagtctaggcctgggtttgggtcctagtcaaggtctgggtcccggtctagatccaggtctttgttgggacctcgctctcggtctaggtattggtcccggtcaagatccaggtctaggtttaggtctggctccgggttagggtccaagttgtgtcctagtctgagtctgggtttaggtttgggtctggttccaattctaagtctaggtcctgtcccggtcccagtccgaatatggttccaatttcgggtcccaggtgtatgtttgggtccaactccgagtccgagccttggttcaggtttgcatccgagctcgggtctcgagtcaaggtccgggtcttagtctagatctgggtttgggtttggttccatagtcttgatccgagttccggtctgagttcaggttcgtgtccgggtctgggtctaggtctaggtcccagtttgggtccaggtctaggtcgaagtctaggtttgggttcgggtctgggttagagtccatgtctatgccaggtacgtgtctgggtcctaggtcccag

SEQ ID NO: 224639 - DNA, 1351 bp, Cannabis indica
gtctgagttcgagttgggtccgggcctggttggggtctaagtcctagtttgagtctaggtccgagtttgggtctgggctcgggtcctggtctgagttttggtcttaggtgcaggtccaggtctgggtctgggtcagggtctcaatatggatctaggttccgagtttcgatcccgacctgggtctgggtctgggttcgagtctaggttcgtatccgaatccctatcgaggtccgagtttgagtcttggatcgggtccaaggcctaggtcaaggtccagctctagctccgagcgtgggtacacgaccgtgtttgagctcgagttttggtctcgctttgggtttggggctaggtcagagttcggttctaggtttgggtccgggtcctggtcacagtcctagtgttattcaggggtcctggttttgcagttcttgttcaggttccagttccgtctccggggtctgagtcagggtccgcgtttgggtcctggtctgggttcaagtttgggtcctggtttgagtccctgatctggtccaggtgacctgtcccggtctagttccggttcaggtcctgggtcctatgtccgagtttgggttcgggaccgagactggggtgcggttctaggtcccgtccccaattttgtgtcctgagtctggttccatgttttggtctgagtttgggtctaggttcggcactgagtctaggtatgagttgggatctaggtttgggtctcgattcgggtctaggtcttggtcggagtttggcacctggtctggttacagtatttggtctaggtttaagtccgattacggttctaggtataagtccaagttctggttacggttcctgtcccattcccgggtcccggtctacttccagtttcggttcaaatttttggtcacagggtacggattcgggtcctagtttgggtttgggactggttttggtccgagtcttggttcgcgtccaggtcttgttctagttcgggtcccgagtcttgtgctgggtcctaagtttaggattgggttcgagttcggggttgtgtcccgatagtcatgtccttgttttcgggtccagggttgggtcccgtctctcgagtttcgggtcgagttttgggtcttcatcccagttccagtgcctagtttctagtcaaagtactcaatcaagatccgaatcctttgtcaaaatttgtgtccatgttcgggtttggggcacaagtcccccatctaggtctagatcttaggtcctggtctaggtccaagttcaggttcgggtttgaatctcaagtttgggtccgagtctaggtcccagtcaagttcaggtgttactttggtctgggtccagaatgagtcca

SEQ ID NO: 224640 - DNA, 1542 bp, Cannabis indica
ttacattttgcttcggtggaaaagagacgcaaatttctttggcttcagttgtaaacaaaagttaaaaagtttgcgactgttatccactgaagcaaaatgatttaaattttataatgggctttgggcccaataaaaaaccctaacttaaaatataaacttaacctaaatatcacattcacacacagccgcacctgtctctctctttctcgctcgctctctctctctacacagccacacagtcgcaccatggcatctctttctctactctctaaattgccaccattccttcttcaccaacgatgatgtagtgcattgtgtagtgtttaaatggcaaaaagcatttcaccagtggggaccaacctgttttccccttgcaagatggccaacttcaacctatctcacaggttagtcacccaagtccacttcaatagatttttgttagtttgaaaaactcagaggacttagatatgagtttgaactgattttcttttgcttttacttttggtgtggttggcacttggccagggtggtgcttgcgcccatgacaaggtgcagagctatagatgaaatctctggaccggccctgactgactactacaaatagaggtctacccaaggcggatttctcatcattgaagggacttccatctccaacacctcaactgggtacgttttactattgttgctatttggtatcttaaggtaacgaagagatcatgaagttacactttatgagtatagtagagtgttgaatggtgcttctaacaattctatttctattgttcatttctgataggacatggtaaatatagtttagttggcctttatcaagatagatagtttagttgccaatagttcgaggatgaaccgtattatttttgttttccgttgatgacattttttaaatttctaccaaacatttgaagtcattataaaatttaatccaagtgacacaaatattacactgaaacacaaatacactacacagttggtctatatatatgtttttatttttgaagcattaagagtgattttgtggaattgttctatttcctaaagaattgatatcatgctcaattgtttgaaaatatatatatatatatttatataattgtgtataaatttagttcttatttatgagattttcgcattatatgtatttatatatatgcatctctgtgtgttttgggctatgggtatagaagaatgtttacttggctagtgtgttgattgtgttgtgagaagttgagtgaattcattttataaaaaacaaacttttcatttaatatttcttttcatatctctttttgggctaatgatcattgttttgaaagggtttaattgtaagtaaagatacccatgtatgtagaattaagtgattggcataacgcaaatttgaatgagaagattagtttgagttattggaatgaaacccatgtttagtttatagtgattatatatgtacatgtgaccaaattagaataaaaaaacttgtgatcttgatagtgcagagtaggtggaatgtttgacactagcatattg

SEQ ID NO: 224641 - DNA, 1542 bp, Cannabis indica
ttaatttaaaaaaaaataataaaaaaaaattagactttagactaatcagaaattaccataatttattaatacttgatatctatgtagctaacatatataagttcaagaattataatataagtattattatcaattaaaattaaatttaaatatttatttataaactaaaaattaaaacttaactattatatatagggacaattacgtgttcggctagtaataaataaaaataaactttgtgatgaactttattaattattttctattatcttgaggtattatttgattacatatatattttgagaaatatctaagaaattcttcgatgtgccacgaggtatattcattccatgtttttttgttatttcttggaaagttattaaaaatatctatctcagtaagttgaccattgacttctcaaaatttcatttcatatacttttctatataattatgtatataatatataagctaagttcttatattaaaccggttaaaaggatgtttatcttctatatatgttatggactaattacactaaattgtttagttttttttagtgagtgtataaattgcagttatatagggttattttgtaaaaatattgttttaaaaaattaatataatttataatgttaaattatgttttaaatatattttgttacatgcaatattttttttttagtattgttattgagtactagtgatgtctagcacctctatgcctgtcactttgtgattgttagcaatactctctaacagttattacattaaattatatacgactcgatatttaattagatcaatagcgataataatacaagataatactagatacacatggtaccttttagcattttttagtttttttttttttttctgctcatttttctgttttagtttgctccatatatgggactctcaattacaaaacattttagctgagctttgtgtaagtgttttcttagtcctactcttaaaaaagtggatggtgacctaataaattatatattctaattaattatgttaagtgataaattatattactattatggttgaatgattaatagtatatatagaatctcatgtagaattcacaatcctttgttcatttttttttttaaaaaaaaaaaaaaagaaaaaggaatacaatttgacccaactatctaaaaaaaagtgttatgcctatcagactaacttagcctaactttaaatgattaggctttgtaacattatatccaatataaacaaattttaataatttttctcaaattttaccgactaaaagaattttttttcttctgcttttcccaagtcgatatactattaattatattccttttcccttcttttttgattgaacatttttacattatgttcatttaattgcttaataattggttgcttgcctaagaaacatatatttccaatgcctcaatgaatccacccacatttgttttttctcctttttctattgcattgaacatgtaaagcccgtttagttaatttggaaattatcagttgtttatgattaattatgaaa

SEQ ID NO: 224642 - DNA, 1995 bp, Cannabis indica
cattaaattattgggatgttagtatgaaattgcctttcataattcgacccaatgttgtttgcaaaagtggggaagagaaaaggaaaaagggtaagtgatgggacattcatacatatgaaaatgttgtgttcggtgttcataaaatatttaattcaatatgcaaagtgtagatactaatacttgtgtcgattgaaaagtttaaaattcgcacttgtgcagattaaatattaattgatatgtaaaagtgtctgattcaatgaaattcacacatatttatatttatttattaaaattatatatctaattaatatttaatataaaaaaatagatcaaatgtatattttaaaccttaatagattaaatgtatattacattcttattttaatacatatatgatacaaatatattttaaatcttaataaatcaaagtgctgctaattgagattcttgaacacacacttcaatcttttcagtttggacacaacttgatacatatttgtaccagaaatatgctgcctccattctacagcgactaattcaacatatttaagatgatttgaccacatcctaaaatatttaaatggtttcttgccaccaaggttcaggttgtacatggttaatatggcaagtgaatgatcaaaaaccccttcattttggaatacttcttcagcagcagggtgcttatccagccacttttggtttgcaagcactctatcaatcttggaataaatctttttctctcatttttgtttgttattccaagtaaaaaagttactcgtaaacttaacatcttcaagtacatacatccacacaatctttgaattccttagatcctttgtgtttagcccgattaccaattcgctcatcttgtcttaagatgttattgaagtcaccaagaacaatccaagcatcatcggtatccaagtttttaatatccttccaaagctctcttcttccatcctcatcattgaaaccataaataaaagtgacaaaaaactttatttttttttatctatagtttcaacatgaaaatgaataagttgactggagcaatggagaatattaactgaaaaactaaatggattccaactcacaattattctacctccgtcatgccaagcactattggaagtaaaacaccatcccgagaatattctaacatataagactcttaggttaggagccttaactctcgtcttgaagagaccaacaagcccaacattttgatgaaaaatcaattgcttgactgcattttacatttgttggttgttgatccatcggatgttccaactcataattctatctattgacaagctatcatgttccccaccatttttagttgaagtattccccattaagacttgaaattgattagttgttactgttgttacaccaacaaccttgtctcttgatttcaaccccttgaccactggctgaaagccctcaaaatcaacagtggctccaaccactctgacatcattttccaccgattttccattggctttttcaccacccaagtttgtttcaagacccctttcttcctgcaatcaggagacacatgccctaaaccagaacaatgactataaatgacaggtttccattcataggaaacatctacggttgtgttataccctttttcatcctcgaattctatagtgttaggaaattcctgcttcgaagatacctttggaagaactctaggaaagctaagcttgtctctccttttagttgcttcatctaccataatcagttttccaatttggcctataatttttaaagatatttttctcccctatatttcaaatcaaggtcatcaaggtgaacccaaataggcaccaccctaacatctgctttcttgaagttaacctcataatcccaaggtttcatgacaataggctttttgttgaaaaatatgtatcccctttcaaaacattatctctgtctgttgggttttatgccctaaataaaactccatttcaatgtaatctattttat

SEQ ID NO: 224643 - DNA, 2801 bp, Cannabis indica
aaagacaattatgttatgtacattatcatctagttaaatttaggtaaatttaggtgttgatctaggaggaaggaaaacataaaaataagaatgaaaaatgagaatatgaatatgaatgcgatagaataaaatttaaaatgcataaaagaaaattatggatttttttatcatatattagaatggtctatccttttattttaaaatgtaatagtcattagaaaggtcattctattggaatgacattctaatactttaatatgcaactaaataaagacatagaatgaagattgcttcattttatttctattctatttcattacctcaaaccaaatgccaccttaactcataactatctggtctccaaccctaataattattggttatcggctaatggaattttgatctcctcacgagataattttggttcatcctaaaattgttagtttttcggtactaaatcagatatgttgcagtaacattttatgagattatcgcactaatcctaaggatctcccatatagtagtgcatatattaaatccaaaagcaataatggtaaaggaaaaataccttttgatgcttatcaagtgtccttgcgttctttttgtatctatttcgatcatcctatatagcagggtaaaaaatgtcaatcattagtgtggattaataagattcgcaaaatatttttttgttgttttgtcaaaactcataagcaagaaaagtaataggcaaggagagacaaattatatgattaattaaccattttaggtctcttaatatattgtatatattgattttggattattatacccgttatgtttatccaaaaaatgaccgtgatgatgtgaatatcaatgttcaatgtgtgacaagaaagaaacaattcatggagttaagtgccccgagtcatagtagtcaactcttggaggggtccctagctctatgcataggctgactctgggagctctgaaatgggtatttctatcctgcaaattattttttcacaataacatccttcagtattctgaaccaacaagtcaggaagactattgtctgatgtctaagaattaaaaatattcaattggcatcctgaaagcaaacccaagcgcctagggtgtcaaccagtggccaggttgacattctaggctagggttttagttttcaagtctatcttagtgaaaattgactaaaccttgaacttagacatgtataagacctatcacaaggatgctaaaggcacgataatcataatcgaagcaatttgtcatttgaggcacctagacaccaagtcacctagcgcccaagttaatgtatgttatcaacttgaaatgtttccaacaactttctacagatgtttcttgggcattttctttttcttcatcaaaaatttggaaacaagtacatttaggaaagaaatagatcaaccttgaggccaaacaagtgacctaattcccacatcgacactgaacctagtcaccagcgcccagtttgacatattatcatctcgggccattcccaatgatgattcttacgaagtcttcgtggcatattctttattttcttaaaaaattaagatattggcttttgagaaacaaacagagccatcagatagatagaatggggagccagcgcccaggttaacctgatgctaggtctcagtgcccaagttgacatgtttcaagcatgtttcttgggaattcttcaagatattttatgtgttttcatcaataatgaaggtataagggttctcaagaagcaaacgagaccattcgagggccaaaatacggacccaacacccaggttgacattggtgttggaccctgtgcctaggttgacactgaacctgattcacatgtttttgctactaaaaaaaagttctacccttggaatttttcttatcttggtctaaaatagggtagagacctcgttcaggatgtataataccatataagtaccaaaaggactcccaagaagctaaccaagaagcacccagctcccacattgacacgtggcctggtgcgtaaggtatcgcttatctaattcaagttctgtctcgggcatctaactattttttttatagtaaatgagagctacgacttctgaaaagtcaaatttgcacttcgatatttcaccacttttacaaagtggaatattaataaaccagtcacaaataaagaaattttaagtctaccaaattaaatgaaattgtaacatctccgacaactagtgaacaacttcactagaactagaaaattgactaagtgatgatagaatataacttagacatcaaaaaatacatgtctaatgcattttcccactcatacagcatctaggttgaagttagaatatcaaccttgccactggttactgaacaaccttcagtaaaatggttataaatcactcattatttctctgattgatgcaattctagttgtgtttgaaagttcttttcaagatcttcgtacacatatctcacactcatatctccattttgaagacatcaagtcaaaagttcatccccaagtcaagtgtaatctttctctacaaaattcctgaaaacgatcccacggatgtaattcgagctccgaaattgatgatcatcatttagagtcatttttggcaattagatcatcatcaatgaccaagataaagcaagaaatattttctatatcttttgtattattttattaatattttaatggacctcattgccaataaaatgagagctccattcgctcatattttacattcaaaaaagtctccgtaaagtcaaatcatctctttgagtcattcaaatcctttt

SEQ ID NO: 224644 - DNA, 6012 bp, Cannabis indica
ggcataaaacccaacagtgtcttatagtgagagagtacttgcccacatatttcaagtcaatactcaagataatgtggaagattgttttgtgttcttgtcacctgaaggagaaacaaggtttagattttgatcgtactctacgataaaaaggatcaagggttacagatctgaacagaatgagcattatattccactgccaccaatgtaaggtttttataactttatatgtgtgtattctattgttttagaaaattcatatttaggatgttagattatagttttataatcaaacatacatgttagtaaatctagatcctagtaaaatatttccaataaatactccacggaccggatctccaaagttgtcttgcaagatcatacttaaaaaatagatgagctagagaatccacattgacattacataggacacagctctgagcattcccaaaaatctgatgcaaacgattcccaaaaggaagagtatccttgcctaacttccataggaaaagcttgagtttttcagggatcttgtatatcgaaataagtttccataaatcatttttaatagccagccgatgtttaatacaagtcatacaagcaagtttagtcgagaacgatccatcacaagattctctccaaaataacccatccctagagccaaggggtaggcgagggatcaaggccacaatatccccaatagaaggaacaaaataacgttcaatttgttccagaatccattcaccattagcaccattaagcaaggaactgactctaatgtttttctcacgaactcttagattgaaggcaattgaaaattggtcccaagagacacctagtatccaaggagcatgccaaagatccaccatagagccatcaccaataaggtacccagcttatttccaaataaggtcactggaagctaaaatccccttagcaacataggacataccatgacttaaataaggtgtaacacatttgttgaaaagtttatttcctccatctctaagcacttttgcgtttggttggaggtaatgaaatggaatggaaagaaaaagaaacaatcttcattctattcctttgtttggttgcatattaaagtgttggaatgtcattataatagaatgacctttctaccattttggtggaatgactattccattttgaaatggaaggaaagaccattccaatgcatgataagaaaaaatttaataatttttttacaaatttttttgtgattttattccattcctattcccattcccattcctatgttttattccttccaaccaaacgccacctaagagaactctctaagaaatagctttagaaattacaagtcttaaggttttctagcaaaaagtgctctttttgatagaatactaaattatatcaaatgaacactttagactcctttatatagtgttttgcatatcactatttgaaattctaatacataacattccataaatgttatgatctcaattaaatgagtataaaactcattctataataactataactcctataagctttaagaattttaatttaagtttaagaattttaatttaagatgtttaacatctttttcttttttttttattgataataattgtggaggttaccagtgattctactaaaaaaaaaaaaacaagagcttctgtgggtagttttgagattatccccaatcagaactttgagggctatgtgatcagatccgtagaatcccaaatgtgaaagacaagcagaaggaaaaagataattccaagattggttggcaatgcaccagtcaaggcgctcaagaagttgaccatgcctccaagtatattcaattcccgtatgaataagaggcaataaatcaaatttatgcaaaaagaataaaaaattatgcatagcatgagagggaggattagtggaagagtttttattgctaatggaaagataatcattaaaatctcccataataagccaaggcatgagaggggcagagtcatgaagtctatgcaagagagtccatgtaatatgtttagtagaaagataaggggacccataataacaagtaaaatggcatttcttatcattaaaaacattaataatacaatctatatggttaaggaaaaaagtaagtacattagcatctatagaattgttccaaaaaagcataagtcctccccttaaaccactccttggcacttcaaaaacacagtcaaaatgaagctgattcttaagatgtgttccacggccagcctggagcttggtttccataataaaaagcaaaatgggtcgatgttgcttgaccaacagggagagattaaggaatgctcgagggctccttaaacctcaaacattccaacttatgagactcattttcctcgacggggtggcaaaacaacacccgtcgtttcttcattgtcagaaagggaaggaacaacaacttcattatttggagtagctcgagccctcttaagcatactctcaacagaacctccaatttgggcagtttgtctggtaatagggcatttagaccctgaaatgatagcagtgatgggggttgtggttggttctctgatggtgagacttttatttctggtggtagagctgactattggatggggtgactgggattcaggaatggctatgcctttacccttgtcagtgtgggtgataactgaagtggtcataataggttgtgggataactgggttggtggtttggtgtagatcagtatgttggggaggaagtttagatgagctaattggattggtactgttgaggattggggcagcaaaatcaaaatccatattcagaaattgatcaaccgcctgttggaggccctgatcagagttggtggtacgaggaacatattcgttaatgggggtggaatttgaaagtttgaaagggttcttcttgaggtttgttttggcagggactctgaggtgttccttataacccagtttagggggaactgggaaattatcacaacgaaggatatatttcctacacttattataagtgtggtccaacaagccacagaagtaacaaaagttttgaagcccttcgaacttgaaactgatccatttggttcttgccagagtccaaaaatggatattcattcccctccttggaggcttggtgacatctaggaggatgcagatgcaaaggtaggggccgaaactttccaacagggacagaggatgaatttcgatgagatcacccagttcatctgcaatgaactgggctagttgaagacttttgcgccctaaaggaatgttatgggcttgcacccagaaagggccacaatagagttggtcaggtgtgagagtatcaagaccatcaagattagcaaagatcatcaagaacaaatcgaaatgccacgaatgatcctccaagactcgacgacggtccccttcacattggaatgtggcaaagaacatgccagagaggtatttagaggtttcggcggggaacctgagggtctaggcctcacgcatggccttttcaatccaagcaggcttgacaaattagcgcgttaaggttttaaaaaccagacagtgggagcttgagtcctcaggatgattgagggatatatgatcaaactcaaagattaggttttcttcatcagtgagggaagcgagagattgggaggtgttagatgaggaagccatgggatcgtgaataagaagtgaaggaagatagcagtacagggatgaggaatcttgtggttgagtttggtagcttaaatagcaaaagagaatagacagaagataagagaaatatctggagattaagggtcgccttggatgttgggaagattgcatcatcatcattttagattctacctgagctagatgatggaggtctagaagggaaatgattatccttctgcagcacctgaaagggcaaaatatggcggttgagttactgttctaggtgtgattatgggagaaatggtcgtaaaattttcggggtggtattatttttgacaaaacatgcaccgtcaaaattaaatgaagctttgagagagagagcaaattgaagagccgttggaaatgaaagatttgggtaatcatggggattttagatgacatcagggcaattaatgagggacgattggggtaataaaagcgtatgacaaaatgaggagaagaaaggtcaacatgaagcaaacaagggtgcaattgcaggagaagtagaaggtagaaggtattcacctagaatagcaacagagcaagtctgtaggaagcttcagctactcggctgtcgactcctcttggaagtcttccaacactatcaccttccaatctcctctctaaacaatccatttgtgtcagtgcgattaaacactggaatctgtctcaagatccgataaaagagcaaattgctcatactcaaaaggatcttaatcttctcctaagctcagatcaaccctctggggctgctctatctcaggccaacatcatgcaatccaaattggaagctcttcttcaaaagaatgagatttattggaagcaaagagcctgtgtggattggcttaaaacgggtgataagaacactaagttttttatcacaaggcttcaaatccgtaaaaaaaaaaacttcattcgaagtattatcctgacaggtggattccaggccactggcaccccaaccatcctttctcattttctccagttttactctaatctttttcactcacaggaaactaaccaaaatgccatcaccgatgttctccatggaatctcaaatcatctatcctttctccagatttctttcttggatgagtcatttaccctagaggaggtcaggaaagctatgtttagcctttctagggataaagcccctggtcccgatggcttcgattctctcttttatcagaaaaattggcatacccttaggcctgacctttgtgatgctatcctggattttttaaatcacaatggggacgtctcgactatcaatgaaaccattatggttttaatccctaaaaagaagaatgcgtcaactttgcgtgattttcgtcccataagtcttttcaacaccatataaaaatgtatatctaaggtgcttgctaacagactcaaagttgtcctccactcaatcattgcctgcaatcaaagtactttatttgagtggtagacaaatctttgacaacatccttattgccaatgaagttatccattctaggaaaactggtaggattggctgggctgctattaagcttgatatggaaaaagctttcgatagtgttgaatgaaatttttcaagagcctcctgtctcatgtaggttttccctctagatttatcttccttatcatgagatgccttaccactgtcacttatcgcatctctcttaatggtagcctcttagataccttcacttcatctaaagggttaaggcaaggggaccccctgtccccttatcttttactcttagtggctgagggacattctgctgctattagggttaaggaggttgtcaatgatttctctggaattaaaaattggcagaggggctccctccatctcccatcttttgtttgctgatgaaagtatgcttttcatccctatttctgagaagtcaaccaggggtatcgcagacattttgaacatttatcacaaagctacagagcaattggtaaatttagaaaaatcttccattcttttctcacctaatactcctcaggaggctcagctccacttcaaaaaatccctgaggcttaccaatgaaggtttcatcagtaaatatctggggggttcctcattgtgttgggcgtgtaagtaactctgttttctattatcttattcaaaacgtgtaatatcccgataagttaaatggtaaataattagggtttatattgatattatgaattaatcaggtaataagtgggattatgatcctactaatttatttcagcataaaatttaaattttgctataagtgagtaaataatcgtaatttgttaattacggagatttatatagcatgtgtgaatgtaatatgagctatatgtggaa

SEQ ID NO: 224645 - DNA, 2262 bp, Cannabis indica
aataacaatcatacaagctgcgttgttgtatgaaaaataagttgcaatttttccttgatcaataaaatgggcaaacatgcctttttacatcaaaagtgggcaattcatgcttttacattatcaaaatttgttggtaggcatgacgaccagctatgggaatacactttgcgggtacaccaaccagcctaagtcattactgaaaagcaacttatattggtcgtacttttgtaggtgctcttcgtttgaatggaaaggctctagtactaactttgcgttggcaccataacgtgctaacttgtatattccaggtgggatgacctcaactacatcgtactcgatggtaagttattttttggtgggattatgagttatcataccctaggcaaggacaaggggaatgtcgcacgtggctgaagattgcatcaattaggaggacatagtcattcacgatgatgctttgtttggctttttgttgttaataaagttatttccaccattatcgtcgttggccctctttccattgttaaacccatttttattgttgcccctgaccttaggggccttgggcactagagcttgccccattcttgttgcctttatcttgatcaagccttttggaatttttctcaacctcttccagtttaataaattcatcagctctatccaggaagtccttcatagcatgagttggcttcctccttgtatctttcaatagtcaacttcccaccagaatgcccttaatgatagcggcccattttccatcatcacttagatttttcaccttagtttcttcatgcataaagagttggatgtagtctttaagcggctcgtcgagcttttgcttgatggcgactaagtcacccaattctgctggtatctatcaggctgaagaaagttgggtttaaaataacccttcagactcgtcccaggaagtgatcctccctagaggtaatttggtaaaccactattgcgccatgtttgtgagggttgcaagcaagattcgacatctaaggacatccctgatcccttgaaggtccatctagattataaagttttcagcatgagtcaaagggtcttccttactcgtgtacttacaagtagacatttttaattttactaaaatggggaggtcattgatggtttgtgagaaagcaaaccctctcatcctttctagttctaagtcaatgagtttcggtgtagtaagatccttggctagtcaggtcaactcatccaaccgattctggatcactagtgtccgcttgaggttgaacaatattaacgactacatcaccctggtttccttgaatcgattcaggtgggtttaatatgtatgaacaacagtggtccctattcctgttgagggaatctcgaaggtcccctacattttgattgtcagcccttccatcgaccgggggtggtactctgccatctctacccttcaagggtagattctcacgttaatattgcctattaggggcatactgcccttcggcttggtaacccccagctcaggttttggttggtcgctggcccgacttttagctctgtcatcgccatgaccattagggtagttacgacaatattcactattcacctcagggtcttcccttctcactgtgggcctactgtttctcgggcggttgagagaaaagagatataaccctaatgttaaatgaaaccctacaacctaaaatattttatttatatatgaacataatgactaacaatattttatttatttatttatttattttgacgtggtgaacagagtcatacataattaacaatgcagcaaaccacaatcggcgatagaacctcctcaaacgaggatagctcatcgcctaaccaaagggcatgttttgccaagccatgacctgtagaattctaattgcgagccacatgggacaaaactaacctcaaaaatttagacaataaagctatagcgttaaaataacaccccatcacattcaaaaataccttctcattattgtcgccagagctaacgaaactaaaaaaaaatatcgtaacaccaaatcaaaaacacaattatattattatgacaatatttaaaataaaaattaatatacaaacttagaagttaacacacaacccatatcactatatcaataaaactaataaaaaaccaacaaaaatttttagtataactaaccaacaatatactagcaccctaacttaaaactgcttaaatcaataacaaaaagattatagctaaaattaaacttatcggtaaattctctgtaa

SEQ ID NO: 224646 - DNA, 1103 bp, Cannabis indica
ttgtatattctaatgtatgatttgaaatttgagtaagattttctatcatggaaccaggtggggacgatgagtggattgcttggttagattatgatggtaatgatggtccatccataccagaaggatctagggttgatcttgaacaaccatccatgaaagaaaaaggtagtggtgatcctgaacaaccaacacatagaagtactcacgggagaagcaaatggagcgctataacaaaaatggttagcgagggaaaaaagttggacgttgagtacaacaactatagataaaaatggggaaagagagcgacgacaaaagttacccgaattggagcatgattataattagcgttaacttaattagattttaaatatatttatatgatattagcgttagtttaattattgtgactatacagaattttaaatatatttaaatgacattagcgttagtttaattattatgactatacagaatttaaaatatatttagatgaaattaacgttagtttaattattgtgactatacatatttgtaaaaaatttaaaattaatgtatggaaaaaaattgcaataaatctattttttccctatttttccaatgtaacgactgaaaaaaattgtcgctaaaaaaactttttataatgaaaaaacgtaatcaatactataaatcacggtttaaaatcatcgcctataccctgttataggcgacgattttaaaccgtcaagaagtccacgttggcgatatttttgaaccgtcgcctattctacccatttttcgacggtcgtatcggcgacagttatagaaactgacgggaatactttcaacaagtgtttaaaagcatcacgaagaaccatttttgtagtagtgaatattgcgatatgtcacagacacgtcgaaaatttacatttagcaacatttaaaaatataaaatacagcatgatgttgaaaacctatatcagtttatgttgcaaaaagtatctaaacaactaaaaactaacaaaaaatacaaaaaaaaaaaacaccgaactatccaaaacagaatagaaacataacgctggtttggaatagttgtgtgaagttgctcgccttcacgtcctctttcg

SEQ ID NO: 224647 - DNA, 2416 bp, Cannabis indica
agcaggtacacttggatctttcccctcaccttaagatcacaagcctttgaggttttcctcaaatggagggcattagtggaaaaacaattcaatttgcctatcaaatctgttcaagccgattggggaggggaatatagacctttcaaaaggttacttgaagatcaagggatacattttcaacatccatgtccccatactcatgaacaaaatgggagggcagagaggaaacatagacatatcaatgaaataggccttactcttttggccaaagctggattgggaatgacatattggtggcatgcatttagttgtgctgttttcacaataaataggttgccaacaagagttctagactggtcatctcctcttgaggtactatttcacaataagcctgattattctctcctcaaaccatttggatgtgcatgcttcccccatttgaggccctataacaaacataagttggaatttcgatcccaacaatgtcttttcttgggctattcatctcatcacaaaggctatatttgtcaagcaccagaaggaaggatttacatagctcacaatgttatttttaatgaagttctcttccctgatgaatttaataactcagcaccagtttctgatacaccaacacaggtacatactgctcctattacacctattatttttcctcaaacatttggtgttcaatctccatctactaatgttgttgctccttgtgttttgccactgggatgtcctaatcatgcaacaactggtgttgccacaattgcaacacctggtgcggctgctgctacaacaactggtgcggctgctgctataaattcaccaactggtgtggtttctgatgcaccatctggtgctgttccaaatgcaccacctggcgtggctactcatgcaccatatgctacaataactggtgcgactgccacaaatacaccacctggtgtggtctctcatgcaccacctgatgtcgttactaatgcaccacctggtgcactatcatctgaggctcaaccactaattcccagcatgcccgaccctatttccaatgaccctctacccactactaccattcctactcacccaatgcaaactagatcaaaaagtggcattaccaaacccaaagcctaccttgccacaagacaccccttacccgagtctatcctacccactgaaccaagaaatataaaagaggctctcaataatcctaaatggcttgctgcaatgacctcagaatttcatgccctcaagaaacaaggtacttggacattggttccctatgatccatccatgcatataattgacaacaaatgggttcaccgaataaagttaaatgctgatggttctttggacaagtataaatcacggctagttgccaaagggtatctccaaacacccgaaattgactatcatgacacttttagtccagttgtaaagcctaccactgttcgtattgttttaagcattgctgtctcctccaattggccagttaaacaacttgatgtaagtaatgcttttctttatggcaatcttgaagaaaccgtgttcatgaaacaaccccaaggctttgttgatcctactcatcccaatcatgtgtgcctcctacacaaagccttatacgatttaaaacaagcccctcgggcatggaatggtcgactcaaaaccactttatttcaatggggatttaaagcatcacgctctgacaatagtctctttatatatggctcgggcaactctcttgtatatcttttggtatacgttgatgatatattgattacaggtcttaatccatccttgatttctcaattaatctctgatcttaacagagagttttcattaaaggatatgggtcctcttcattactttttggggatagagatttatcgtgatactactggtatgtaccttactcaaagtaagtacataaccgacatcctcactcgacttcatatggaaggagccaagtcttgtcctaatccaacaagctaaactaccaaactaagcctttgtgatggggaacctatggaggacattaccctatactgaagcactttgggtgcattacaatagcttagcctcacacgtccggatgtagcatatatcataaataaacttagtcagtttattcatgctcccacggttaaacattgggaggtatgcaaacgactccttcgatatctcaaaggcacactcaatgatggtttatggctttcctcatctgattcaatgcaacttcatggctatcgtgatgctgattgggccagttgccttgacgatcgacgatccacgggaggctatgtaatgtttctgggcaaaaaatctggtgtcctggtctgccaaaaaagcagcaggtagttgcccgatcctcaaccgaaagtgagttcagagcattagcaaatgctgctgctgaact

SEQ ID NO: 224648 - DNA, 1026 bp, Cannabis indica
atagttttttattattattattagaagaagtgccaatagcacaaaaacaaagacacggacagcacgtgattttttaaagttaaaaaaattggaaaatggcaaaagaaaaatgccctttttcgtgcatacttaggctttaactctaaaatttttaaaaaataaaaacaatcatatctttttcaattttaatccaaattgagttatgtaaaaggctaatttgtttaatttttcacaaacttttcaaataaaataattccagatcaaaaatcatattattgttatagaaaaatttgtaatacacaatcattaattaatcacataaactaatatgaacacatccaaatcaatcaaacatcattttaaatttatatttcatgaaagtaaatcattacaatggctctgaggccaattgttgaaacttattttactaggtactagatttattaatatgtatgttggttataaaactataatctaacatcctaaatatgaattccctaaataatgaattaaacacatataatgttatagaagaccttacattgattggcaccagaataatatgactctttccattcaaatctctaactattgatcctttctgctacagagtatgattaagatctgaaccttgatctccttcagttgacagtttttctacacaatcttcctcacaatgctaggtattgctttgacatgtgtgggtatattctcaatcactataggtttcaaaattattgagaaaaagaagaaggaattcgaaaatagaggagactctttattttataatttgtttgacaaagagtcaattatgtttttctaattaggttagaaaataagagtcatctttctctgtttatagcatagctattagggctaggtttagaattaaatgcaacaaaaaaagataaaatattctttatttaaacccttatggtcgaatccctttagtggacctattgggtttcaattttgctattttatttggaactttatcttttttttttttttttttacttctaaatg

SEQ ID NO: 224649 - DNA, 1542 bp, Cannabis indica
acatcctcctcttcgtctgctacctgcaccctcataacctcctcttccaacgctttcatattccaactgccagacgccataatgctggagaaagaaacagaacgataatacaaactaattccagaaagaaacgattaacacaccatgtcacaagacaagactttttatacttaactcataattaatcacgccaagatctagagagcggatatggctagatatcggtgtcaagatttttgcgtcaacacacaaatatatataatatttaacaaaatatatatactaaaaaaaaattactacagagcacattattattagagtacttagtacaaataagattatcaaaaatgatatgcttaaaaatagtttattaagtgaattaataacccacattattctatttggtaccttgagtattgattgttaaaaaaaaaatatattgttttacttctgtaagtattcgtaatcttagtttataatcttacatattataggaaataattatttgcatgaaataaaatattgttgattagtttccaacacttaaataattatagcgttgcatacggttaaggtgaatgtcgactaagcaatttttgaagtagagaataagttcaattttggatgtgtagcctgtgatcctaattaatggcaatttgattgaggcaagtcgtattggcctagtttaacctaaagttgcagaattaatagggatcaaagaagttttaagttggataaagagaaagtgatggtctaatgtgatagtcgaagttgtttaagctatcaaaagttctatacaaatgctatttcagtttggtttgttagcacaggattgtcgtgtattgcttttttgtttaaataatgtatctttgttttttttgttaaacaatctactaataaagccgcttattatgttgctagagaagcataaaatcactttatatttcaaaatatatatatattagatttaatagaattaaaaaataatctagcaaataataataataataattgagcttaaaaataacacataatccaatgtctaaacctataaaaaaaaaatcactaaatccgatataagtggttctcatttgctaaggcactaatatgtttaaaagatgtttaaaaaaaaaagatattgtttaaaagagatgggattcaaatgctaaaatttaatattggaggatctaattgcaaaagtgagaataaatttagggcttttgccttaaagtacaattttatttttgtactttcttctctttcttgttcttcattcactttctcacttgttaaaaccccaaaaagagattcaaaagattttctttttctttcccaaatttcatagaaaaaaaccctaaaatttctcaatttcctctctctgccgccgctcctgtttggatcctccggccacccattcgccggttctgtactcttccctctcatctgttttttttttttttggtattcttcatgcatatttcgattaatttgtatattaggttaacgaacaaagcttaattgtgagattagaatcttgttgta

SEQ ID NO: 224650 - DNA, 9639 bp, Cannabis indica
taaaaaaataattttttgaatagaaaattatttttaaaaaaagttatccatgaatttctcataaacgcaagaattcagttatataggcacactttatatagaatagatatatatagatagagagcccatatttctgatagatttatctaatggttttcagagcctgttggcatgtggtgatgctgctttcacaagcaaataccagctcattctcattattacaatcatcattgccaatgacccacctaaggatttttcttctctgaactatttctcaagccctcaaacacttaaactacttccactactagatctatcaaaactttggtgtcattgttattgttagtaccaatccttaattgtcagctacctaagcaagtaagtcttagttatctctctctctctctctctctctgcaaaaactataacttttatttctctctttagttctgccagaaaaacttaaaagaactcttatctataggagtttgttgtacatgtgggaggcaaaaagaaaagcaaaggggtaatgaatagtttttctctgatctcagtgtgtatcttaaaaaatgattcttttcttgtttatgttggtttctgttgtgatactcaatttttgttttgtccctaactagaagagtgaagtttttgttttttttttttcttttcttttttgagtaattttttttcaagaaaattaacccaacagagttggtaaaagtaggcaaataaacctatctggttcctattcttaattcaaactttgaactgcttttcttgactaaaaattcctaactgtaaagcattaaaagtcaatcgttacagctcaaatatgtttgattctcttctaattctcttttgtttaatgttctaaaactattgcagatgtgacaaaagatttctgaaccaactactgttctgtttatatctttgggctgaaacatttgatttgagtcttgtgatcatttttttctgaagagaaaatgaaaacaagactagacttttacttaattttctcagccattttgttggttggaacaatctctacaagtgtcacagcatatatagaagaagataaacaagctttgcttgatttccttggcaatatttctcattctcattctcttaattggtacaagaacactactgtatgcaaccattggattggagtcatttgcagcagtgatcagaccagagttacagaactccatctccctggagttgggttccgtggtactttcccatctaacactctaagccgcctttcagggcttcaagtattgagtctcagactcaataagttttcaggttcttttccatctgatttctccaaacttggaaacttacatcccttacttcaatccaatatttctatggctctttgcctttagacttttcaccttggaagaatctttcagtccttaatctttcagacaatggttttaatgggagtattccatcttcagttaccaacttgactcatctcacagctttgaatctttccaacaactctttttctggtcagattcctgatattaatattcctagtttagaagagttggatttatccaataataatctcacaggtattgttccaaggtctcttagaagatttccaagttgggcatttttgggtaataatatttcatcagaaaatgccactcctccttctctaccagctgagccaccaactaatgctcatcaccaaccaccaatgaagatgaagaaactaagtcaacctgcacttctggctattgtaattgggagttgtgttcttgtgtttgcaatggtggctatgatgatgctcctttgtcgatccaacggtggagatcgaaaaagttcagttgttgctaaaccaaataagaaagaaagctcatcaaagaaagctgtgtcactctctgagagccaagacaagacaaataggctctttttctttgaagggtatagttttgcatttgatttagaggatttattgagagcatctgctgaaagttcttggtaaaaggaacttttgggacaacttataaggcagccttggaagacacaaccactttggttgtgaaaaggttgaaggaagtaaccgtggctagacgagaattcgagcagcagatggagattgtggggaagataaggcatgataatgtagctcctttaagagcatattactactcaaaagatgagaaactcattgtgtttgattactatgaacaagggagtgtctctgctatgttgcatagtaagttgaaaacaatttttgtcttcaattgtttgaacatttatgtaaaaagatagttgatttaatgagtgttatttctcttatttcaggtagaagaggagagggtcaaggaaggattccagtagattgggaaacaagactaagaatagctattggtacagcaagaggaatagctcatatccacacacaaaatggtggaaaacttgttcatggtaacttaaaagcctcaaatgtcttcctcaactcacaaggatatggttatgtctgtgatactggtttagcaacactaatgaacccaatgccaccaccaacagcgcggtcatatggataccgagcaccagaagtaactgacacccgaaaatcaactccagcatcagatgtgtatggtcttggagttttgctacttgagcttctgacaggaaagtctccagttcatgctactggtactgaggaggtagttcacttggtgagatgggtgaattcggtggtgagagaggaatggacagctgaagtttttgatgtggaacttttgaggtatccaaacatagaggaggaaatggttgagatgttgcaactgggaatgagctgtgtgacaagaatgcctgaaaggagaccaagaataagtgatgttgtgaggagtttagaggaaattagacaagttaacagtggaaacaggccatcttctgatattaaatcagaagtttcttctactccaatgccaactccagatgctatagttagtcattcataataataagatcatctatcagtgattcatttcattctatagtgttacatattttttcacttattaaaattcatttcttattgctcaaaatggttttgattgagattattactgaatgttataatagcagtaactttagaatctattgtattacaaattctggcctttgaattgaaatgttgtggagtaacacaattttattttcttgtactttataaatacaaaataatattcgagtttgattggccattgtctctcaattcacaatttttattattgaaattaaacgacatttatctgtgaaaaacgacaccaccaaacttgaacggtgctaaataagtggcacattttaaactttcattaagaaaaaacaacaaaattgacgttaatcattcaacagaaaaaaatggcactagttattattattaatgaaaagcttttaactcattttttataaagaaataatttattttattaattgttattaataagagagctttaatttcttttcattaatgaagtaaattatcaataataataattatttacttttcatatcaattgttcatattggaggataattatatattataaatgctgtgttttttttttttcttttgacgaaaatgcattttatattaaataagcattcataatacaaaagcatttaacgggagaggcattttctccgaccaggaacaaatagagtccaccgaaagagcatatttggctagcaaatgagctaccgaattagcagatctgtatacatgagagatttgtactccagggaagttggacactaggttcgtaatgtctgataaaagacaatgaaaatcaaaaactgaggcagaaggtgattgcaaacctttggccactataagagagtcagtctcaatatagtgtacattcagacgattgtctattaaccattgcaacccatacatcaaggctaaagcttccatcacctcaggccgaaaagagcctataacgggcttggaaaaagctgcaacgatgtcaccagcagagttgcgaagaactgctccacagcttgttatttgagttcctttgttgacagcagcgtcagtgtttaatttaagtctacccgtaggaggattcagccaagaagcttcatgtttgtgttgtatattgttgagagatacagcagcagttgctgcattgttcgatttctgggctgcttggaagtcttcaaaataggatagagcacagtataatatagcatatcatgtggtttagtactgctgccatatttttccttatttctctcattccaaatgtgccaaagaattgttgtgaattgttcaatttgaaagtctgaccatattttcgaaacatgaagcaataattctttgagggacatatgctcagaaatcaattggggaagagagaaagtagagtccttccagatcttctttggtcgattacagaagaacaaagcatgttaagttgtctcacttgcattttgacagagagggcacataggagaatcaaaaatgtgtctatggtgaagagttgaagtagtagggagacattcatttatagcacgccataagaagattctaactttagaaggcagagataaggaccaaaactttttccaccatttttgagtttgaatactcgatacagcaggttgttgttcctcaaggcttgttgctaatgtataacttgatttaacagtgtatgcaccattagtttcatagtgccaaataagtttgtcagcaactggaaagatagacaaaggtatctgaagtattttgtcaacatctgaagcaagaaaagtggcatttaataactccaaattccattgtcttgctagtgggataagtgaagacactttctggtttatgttaatcccattcgatcttaaaggttgaaagttggagataccagggagccaaggatcagatgcacacaagatggaaagttgggaacagcccttccttgaatagagccattaattaggaaggaaaatgtgacacttttgatgcatcttccaatgagatcaactactgaagtcaaaacccaaagataacatcatttgctgaatgaaaatgccattccactcgatcgaaggctttgctcatgtccaatttaagggcgacataaccttcctttcccctttttaagtgcttagagaatgtaaaagctcaaaggcaataagaatattatctgtgattaaccttgacttgagaaaagcactttgggattcagaaattatatcaccaagaatcggttgtaaacgaagaacaataaccttggagaccaatttataaagcacattgcaaagacttatgggacgcagctgagtcattaaagttggctttttcacctttggtatcaaagtaatgactgtttgattgaagctagaaggatcgcccccatcgtcgagaattttaaggattgttttagtaacaagctcaccaacaatatcccaatagttggtgtaaaacatgacggacataccatcaatgccagaattgccatcagtttgcatggatgatagagcatcgtaaacttcagatgccgtataaggtcgagtaagtatctagtttatatcagctgttatgagacatgggacagctgacataacctgctgtaatgcatcagagtcgacaccttcagacatgaatagggagtgaaaataagtctgaacaacattagcaataccatcaattgtagtgtgttccatgccttggtcatcagttatcattcggatggtgttattggtccttctacttgaagctttctggtaaaagaagcgggtgtttgagtcacctgattgcagccaagaaatccttgatctctgtttccaatattcttcttcttgaaacagcaactcatcaagaatagactcacttgatttaagctcttcaaaatggttgttgcttgtgtcatgtttattgttaagtgctgcaactttttcttgagaaatcttgatttttttaggcagttctccgaacttagaacgatgccaatgctgaagttgagtagaacaattggaaatattgagctgaacttggctcacgggatcagtagcagaactttgccaatattgagtgatgatgtcaagacattgttcctctttcagccataatttttcgaactggaagtgagacttaaacttctgaataggtgcagcagcaggtgtagatatggtgactcgtagtctctatgatcagagccaaaaaaatccaaatgatcaattgtaggggttatgaaactgtcagactaggaatggttaataaaaccatagtctagcctttctttgacatttgaactttgagcatgcttgttgtgccaagtgaatctatcacccgtgaattccatttcatgtaatccgcagcagtcaatggcatttctgaaagcatcaatttgatgttcataacgcgaagggccaccaagcttatcatgattagataaaatttcattaaaatctcccatgacaagccaaggaaacaaaggagcaatatcttttagtttgttcaaaacttcccaagtgaaatgtctttgagaagcacaaggagctccataaaaacgagaaaagtgacaagatggaccatcaacaaaacccatgtaacagtcaacaaagtttttaccataattgagaatagatacatttacattggacttccaaaggaataaaagacctccactaagacctactctaggaatttcaataccattaggaaactttaaagcatttctaaatttagtaatagaccctaatttaagcttagattccacaataaaaataatatcaggacaacactgagaaacgagcaaacgcagttgacggaatgctctcggattgctcaagccccgagcattccatgagacgatattcatggcgattggcgaggctgggatacagccttcgccaaggaaacaacacatccttcatccacccgtgagttgttagaacattcaaaagatgggtcaggttgttggtgcagattgagattggtagtgtcagcaagaggagagcctttggtacgacacctcttcaacacattacaaacattcccccctgaagtggttagttgtcgtttggtaaataaagaggacaaccgattctcggataccataagagaatctgatgcagaagttgagatagtagtggtagtggacattagagggggggttattttctgtagacatgtgaatgtatgctggtggaattatcattggaatgggcactaattttttcatatgtggagttgtaagtgggggatatgtggcaacagggggcgaagttggtgatagagaaatattaggagataatgtgctggtaatggtggggctaatagtatcattcagaggagggttcagggttgtgggcttggctgcagtggtgataatgttgcccatgttcattaacttatctacttttatttctttagaacccgatgaagatgcttgatccttgaaagagaagccttttggagactgagaagagagacagttgagttggagcgagtgtaaattcttgttgttagactcaatgattttagtggaatccaagatttgctttcctttctcagaattggtaatattggtagggacagcaggcaattgtcttgagtgcgaaaagattgaattgattgtgtttcgagcaaggcgagtgataaacggccaaggaccctctttagaaaagtcttgcctgtaccgattgtaactagaccttggaaggggagatccttccatccaaggaccatagggcagatttggttcaattccttcatccaatttttctaaaaacagagggcatttgtcaaagacatgtccaattattccacattcatagcgaaaattcggcaattcttcatagcgataatcgatccaaagttcatcagccatccaaggaaaagtaacaaattgaccacgcagtaaaggtttcgagacatcgatttcgacacacattcgaagaaatggcccccaaccttcattgagagagtcgtcatagacttcaagaaaggtaccgatcatgttgccaagaatctttgcaagggcttcagatttactaaggaaaggcaatcgaaacacttgaatccaaaatggagtgatggtgtaagtttccatagaagcattttgaaggacacttggtaggcataagatcatatgttggttatgaaaatgccaaggctcctttgccggaattctcttaagatcaccttcacatctgaatgaaatagtgaaggagtctgttaaagcatcgtaatctgaaatggtaacagaaaaacatctcacccattgcttggctatgaaatttttaaatagcttggggttgtatccctttttggagaagatcctacagattagaagattaacagcaggccttggggaaggaatattcaaattagaaagcttaatgacttccctttctcagatcgacagagcatcagacatattaggaatgaaattatccatgaatggatgagaaagaagaaagatacgccacggatggaaagaacgtacaggaaacaaagcaaggaaggaaccaaggaaccagagaaaaattaaaaaagaggctggtgggaacggttataatcgaacattgagggaggaaaatacaaaaaggagcagttaaaatgaaattaacagaccaactgccacagagcaaattgaagggcagacaatgctctaacaaaaataaatgattcaaattgtatttcattataaatgtagtgttgaatatagcatttgtttatttattttttatttttttaaatttagcattctttcgccaaattaatataactaaactacttaaaaaaatttgaaaactttcaccaagtcaatacaactaaactatttggaagcaatattctcgacaaaagtttgagctagcccgctggccctggccttctctaggcatagatgcgacttggtcgtagttgtgttttgttattgtaatttgatttttgttactgtgattttagtcttatttgtgtgatatagttttattttgttttgttgctaatttttctttatttttcgatgacttgctattaaatcgctattagagcatgtttggtttgaaagaataaggattttaatggaatcattattacaattatactgtttgctttaacttttaaagctttgtcatgacattacattgtaatttccatttcactatatattacaatctccattacataataaaaccaatgtaatggtgattacattgttaaaaaagacctattttgcgcttcttctttatatttattttattttatttaactttaaatattaaaaataataaaattaaatatattttttatcaatatacttcatactttattcaattacaataatcattacaatattaaaccaaacattataatatcatttccattacaattcttattctattacattaccattatcattcccattgcattatatcaaagcaaacatcaccttagtggttgagaataacaagttcgactaaaagagttgttagtagtgcagttacataccttgcacaataattgagtgttcacgctacgagattgaaaaaatttgatgcaacaatttatactatgtgtcttctgagcaatagatgaaactgaatataaatgttcctaagatcaactgtaatgttacaatctttttcacttttagttttttt

SEQ ID NO: 224651 - DNA, 1175 bp, Cannabis indica
taatctggattacattgaaacagagttttatttagggcataaaacccaacatttattctattcattcatcaaatattttttttataagctctctccttttttttattctttcttaatttaatatatttttttatataataaaatatattaaaaatatataatatttaaattgaaatttcgtattttaaattaccaatttattatttaagtgatcattaattaaatgtgaaataataaagttggtactaaaatgtatattttgtagctacataccacgattctgtaactgtagaataaaaaattagcaaagaataaaagtacaggaaaataaaaacacaagattcatatacgtggtatcaacaatccttctagattgttactaatccacgttgccacgtccagaaataagattaattagtaagatttcaaaaatataaagtttttgacttatgcataaatacactccatcttattatatgttgcaagcttgatatattccaccttcacgaataaatcttgctgaaacttcaagtgttcgtaatcccttcaatctgcttgaagattgcttgttttctccgagacaaggcttgaaacactttctcccaaaaacttgaggaaccttctcccgaaagtttgcacttttgttcttattgcttgttaacttgattgcggactcaaagaaataacaaagacatatacacatgggtagagtggaacacactctcctctataaaacatagacatgcactcttttcttaaagtatgaatgaaatacaaagtgtgtaaaagagataaactctctaattgttaatataagtatttatagacattatacttttattagctcgcttatacacagactcaattgtccacagcccataggaaaactttcttgaataaaatcttcaatcaagctatatttttcttattctacacatacaaaattgtgagcattaaatgaagtaattggtataggcgctccgaatttagctgaaacaattaatataaaaaaagcgctaagctagattaaaactccacctgtaacaccctaactaacttaggcatattacgtgatttttgaacgtactgtgcagctcgttgctaatcaacgaggtttatggaaaaacatgattaattaaaattttactttttaattaaacttataaaccaaatta

SEQ ID NO: 224652 - DNA, 1364 bp, Cannabis indica
atactaaggaagattggaatgagactatactaaacaaatactttcataaggaggatgttccttggatattaggaatcccaatcgacaatcactcggaggacattctggtttggcctttcactaaggatggtcactacatagtgaagattggatatagagttgctagggagataaatcttgctcctacccgctgctctaatatggatcaaactcatgcttggtggaagatgtggtggaatctgaatttgcctccacgaatgaagctatttggatggaaaatgtgtagaaattggctcccggtaaagtccaatctatgtcatagaggtacgaaaatcgaccctacttgtaataactgtggcaggtttgaggaatcactatcccatgctctttggacttgtgaaaaggtcaaaaaagtttggaaacttttgccttattacaagttaatcaaggaaagcagaaggcattcaatgatggatttgctagtggaatttagacaaaagctagctagggaggagtttgaagacgtgatcaaggttctttgggcaatctgagagaatcgaaatagacaatggaacaatcaaccttatatgagtggggctcgcttgctggactaggttttcagtagctacccgagagatatcagtgggaaagagagtcttcctactgtgcactctgctgctccaaaagatcagtggccggcccctcctgttggcacttactgtgttcactgtgatgcagccatccaaccgaaccaagtaggggtggggctgggctatatttggcgtgattggtcgggcaacattgtttctgctggtatgcattatctccctgtttgctgcactgtgcctgtagctgaagcaaaagctgttgttgctgctctgcaggataggccgaagaatatgcacaatccttatgagatcaaattggattgcaagcagctggttgataaaatctcagcaaatgacagctttcttggtgatattcagccgattgttaatcaaattaagagacaccctggtttttcttttgtacaaagttcattcatgtaaaaagagtccataatgtaggtgctcatagcttagctaagagaagcctagaaacaaaattaacccatctttttacaattcttttccagattggttagctattgtttgtaaggctaacctctccaattctttgtaagtttgttggtgttgtttaataaaagtttttttcaaaaaaaaaaaagatcctatttaataatttgactaaattaatttatttaaaattgcatggtttattataattacttcaactctaaatatagaaatttatcttttaaaatatatatattgtttactaagattttcagaaacaaaatataa

SEQ ID NO: 224653 - DNA, 914 bp, Cannabis indica
catgtaccaaatcatgttcctaaatttatttggcaattaaaatttttttctgaactattaagattgttagatttaagtacttttatctaattttattcaattttaactatttcagtgattatttatgtactaaactatgctctatagactttgatatctattaaattatgtccctcgaactttgacatgtactaaatcatgttcctaaatttagacttttttttttattaaaattggataaaaatccttaaattcaatagttcatagaaagtatttttaacgaccttaaaagttcagagaacatgatttggtacatgtaaaaatttaaaggaaaaaaatcctaattaacttatatataatattatcccacttaaaatcccataattgtcaataggttggcaaaaaatctttattgggttgcctacatttagtgctaaagaacatataatatctcgaataacaacacatggctaagattttttacagacttttctctctaacatgaatgagaacacataattttcaaatatgaacgcttagctaatacataatttcaattataattataccaaatataataaatgaattaaatgaatgtagttccatggaggaaagagcgttgaagtatccaaatctctagccatgactttgaagtttgaacattcaacattaaactttcaaagagtacaccattgagtaagtttggtggtacaaataattaattaaataaatgtaatagtaaaagtggcttatcgtttcttacttttctagaactatatcatgaattagtaaaatgaaaaaaaatgaaaacgagagtgaacatagttatggtataaaacttacacacgtggctaataatgtattattattatatacacattttgtaatcaagttgtaggttttttttttttttt

SEQ ID NO: 224654 - DNA, 2487 bp, Cannabis indica
tttacaaaagaaaaaaatgcccttcattctagatattattcagccattctgttgagcttttggggcccaattcgcagcccattgctcctagccatgtgtaagagtgtccagtgagacctgcagagcaccccttggctgactaggcccttgtggtggccaggttggtcggccatggtgctgtccttaggctggccggccaggggtggctggccagcttctgaaagggagttggtctgtcacttgatcctcatttgagtgctagggtctttgtttgagtgctgacttgggcttccttttgggagctgtactgtcatgtgacactggttttgtccacataagcatatcacgtcatggggataaaaatttggataaaatttccccccaagtccctatgcggacatctgtacaaatagggactttaccagctaatttggcaacgtgactattgttacctttgttgaataaaaagtgatgcgttttttgaagcactttatcttgactatctgatctcattgtagtggagaaataactgctttaagtgcctttatggcgggttggtgaagtaagtgagaaaaagggggcccacatgtactacataagtgagttttggggggaaacctttttttttcctttcatttttcacttttactttctctcactagaaattttctcttagaaaagctcttccatctctctaggtggtcgaaccatgaagcttcattctccacgggatttttgtgctatttcaacgatccaagcttcccaccttcatcttcatcgaaatattgtactaggtaagctttccatccctgctttttcacttgatttgattgattttgccataaatgcatgactattatttcttattttgaacatgctttgattcttacattagattgtagtccattcgatatttttatccgcatgatagccttaagatagataatgtgtgatttctagacaaaaagatctgaatctgacttttattgtgattcttgggtgtttgagtcacgaagaacacaaagaacatgtttgagttcttaaaaaatcatgtgttttgatccatgcacatgctggctggccaatgaggctttgtttgaagcctggccggtcatgggtggcttttatggggtctggccggccatggggaccgtgtccctaggatggccggccttttcctgaaactagggttcctggttggccactaagctgggacttggggtctggccagccattaggaccttgaaccctagctggccaaggtcaaggctccaagcgggtagccagttttctccctcttttatcctcaactagggttttgtggtggccttaagggcatatacaactgtggccttattcgtagtttcccttagaaactctatgtaaggctagatgatgagtccattatatttaattgtgcaacttaggacttactgtatgccttggtaattgtacctatgacggtacttggtcgttggtcaaccttgtaccctttgttttacttggaagatacccttgttgacttaaatatatttgtagctttgtcaggttgctcaccttcccttatttcttccgtgaaggtagtgcccggtgttgaattagggaggtgacaactgtgtaggtcccttgttttctttgttgttatggttgatacgaaacagagaaatggcagggtgaccctgcacgaaccccacacgaccagaatagctatacggggtaacatcaagattgtagaagggattcccttgcctcatgctgatattagatctggaacgggtcatgagaatgggagttctggggctaaattcaattgtatggaggatgtaccagttaggaggaagagacacaagccttgcatcatcctgaccaattatcctttaggttgttatgataatgacgataaactgttgaacaagcttagtgagccttccgtactcggtttagaccatgtctaggaccattcccttaagtctgagattcttgatgcaagtgcacaaggggataggtggatttcgcctgtttcatatctctcgaaggacagttttaagagaatggagactgctgggctagtaaagggtatctgttgtaagataccttccccagatcaactagtgcataagttagctctcaaatggatggtgttgtcagaatgctatattgatcaaggtgccgtactacctcttaatttgtactttcgtgacatttctgcttatttcaggatgtgtccaacacaaatcaccccggaaggtattaggtagcttttaatgatgtttgttctttataaggagctgggctggtcccaacccactgttgggttttatgccctaaataaaattccatttcaatgtaatctctattattcaatatcaataaagaaacagaagtatttttcattcatttgtgtgttatttggttcatgttatcaattacttgtctatttgatttatatattcatccaaacccttttcacatttatattcttgttta

SEQ ID NO: 224655 - DNA, 2329 bp, Cannabis indica
atctgcaaacactgaatagatttgctgcgggaagaaatagagattgtggtggtattgaattgttgaaagagtttcaagatctacacggcagtctttctattgaaggactagacaatatgcatgttggtaggcttgaggaagtttcagatgctgcagcaccattattaaagagtaagaagtctcttagtgacctatctttgctttggaaaactaaagttgaagttgatgggttgcacaaacaaagagagctattcggtgccctcgagcctcatccaaacttgaaggaacttagcatttggcattacgaaggcaacagtttcccaaattggatgggagatcctcgctgcttgtctaatttagtaagtttgaagttgatgtgttgctgttttagcttctttccgtcgttggggcagctgccttgtctcaaatatcttcagattagttattgtagtgtggtgaaaatagattcagagttttatggttcttcttctgttgcaataccaacaaagcccttattctttacatctttggagaccttgataattgaaaattttgagaagttgaaagagtggtcatttacggaaggtggagcttttcctcgtcttaagaagttgatgattgaaacctgtccttacctccgatgcttgccgaaagaactacccacttctctttctgatcttcatatcacttattgtccattgataacaccaagagtggagagggagacaggggaggactggccaattattgctcacatcccaaatatcattgtcaatggcaagaatatataggtattactcttcgatttgtgccccttttaggctgtgactgtggtctcttgttttaaatcaacgattaattagtgttaaatggtagcatttggagtcatcacctaatttgatgcgtacatatttaatttaagcatgtgaagtttagttgatgaagctggtagaacataactatatatatcatgattataatattagttggttggcattcaagataaaaagtttaaattttctattatttgagtgaaattacatgtaaatatataatcacaacacaagctattaatttaagtcctgtttttgcaaggtaatcaaattatatatgagtagtgaaatggaagactgagttgaagaatggaagaagtcagttaccaccaaataaacacatatgactatgatgagactttacctctcttaatttcttacttttagtttgattgtgattgtgattgtgaataataatagctatactatagtctatagagtgagtgatgaaactttgtacaagatgttgacaccattgctaatgttaatgttttctactaccattagtaccagtagagataacaaacaaccattgctacctttcttatataaatcttgctctccattttctgttattcttacttctttttgaagattttgtctatgcaattgctttgacaaaattttgtatatataattgtaacaagaataactgaagttgttattgcagagtgagtatattagtttatatatataatgttataaagagtggattagaggtgcctagatttgattattggaagctacaaagtatgttgagagaacaatgaagagaggattagaggtgcccagatttgattataattaagtttttgcagtattatgctaatgactactaaagatagaagaagaagaaacagggctattgattcatcacattttttgactttgatttgtcaactgtgtttaactttgattgttagaatgttttactgaaatcattgtatatgttacctatgaaatagcaatgatagcataactttgggatttaaaaattatttattgcaattatgctaatacacttttttaataaaaaaaaaactatttttttaaatatcataatttttaaatatttaacaccaattctcctaaaataataggggtattaagttgtgtgatggcaaacaataagatactaaaatgatattaattaagagtaaaagttggaaagttgaaaagcaggacattattgtgtatttgtgataatgttgattaatttcatggtctcatgttttgagctcattgtataaagtgttttaaaagtgtattttaattgattatattaagtttaagaataaaaatattaattattcataattttattaggctaattagtaatttttctccccgaactttgacatgtactaaatcgtgccccctgaacttttttggccgttaaaaattcccctcaaactattgagattgttaaatttaacgacttttgtctaatttcattcaattttactgtttcagttattgtttatgtactaaaccat

SEQ ID NO: 224656 - DNA, 5289 bp, Cannabis indica
aaggctctctatctcgtctttcgattgatgaccttcatccattgtatgccctatgtccttgtgaaatctaaagagttttgtttcatcccgtttgtgcctcgcatgtctcatgggctcaggcttgcaaattgcaaccttctgctcatgtgcgaggaaaatattttctcgagtttcaaaaagcttggtaaaaatagtgtaaattggcacgtacttatcgtgcttcttttgttttttcttatctttcgttgatttcttagtcatcttttctcttagtgctagagcctcctggattgtcagccttcgtcgagacggtgcaagttgagacagtactaggtttatgatacaaacactttagctctttcattgaactcactgatattttttactgtgcgatcctttaagtcatcccatagctcccctccagtcgttgagaggtcagtcgtaatccccgcttgaagagtagtaagttgtatattgttgttcaagtttctagccttagcagcagtggtactaaaacgacttagtaggccttaaatgtctcgcccgcttgctgccctatgttagtaagggaagacacttcaggtcgcttgtctcttgctacctgaaattgcttcttgaaatccttagacagctattcccaagtcgtaattgaatgatgggtgaatttattgaaacaactgctcattaccccaatcaacaaggtggggaataaattacaacgtaagttattcgtgacattgattgctaacacaatggtattgaaattgttgaggtgagtgaccggatctatagtcccatcgtataacgagacgtgggggtttttaaatcattagggaaattcagcgctcataatgattggatgaagaggttcgagctcctcatctgagtcataatcaagcagtttcccatctttatatttcttgaatttgttttctaactcacttattcgcaattggatcagatcctcttgcttttgaatggaattgagttatttgtgtaaatcgggcttcctctaattcaattgttcacgaagatctacccgtctttgatcaaagttgcttgttgaccttgtaccagagtaactctcagattgatggctcctagtgttgctcatactttcttgatcattactgcggtgagtcctatcccctccttgcgtagatagatcacgatcttgagatcttgtacatcccgagattgaatttgcctcatcacacacaggtctactcctttaggaaaggttagatacacacccccgactggggtgtgtatatgcctcttccctatcagtgcgagagggatgctgatggtgtctcggtggtaacccacttgtcctaggttgggtcccaggatttctctcattaacacaacatattttatgttccctagttctaggttgtcttctattcttgattctatgagaagactctagaatattgttgttttcattctcttcggttgtgaatcctcggggtctccgaggcacttcttgacgaggtgtctgattatttgattgttcatcttctagaacatccccaatttgcccaggttgctcctcctgagtgctctgggggttttcctgagccgtctcctatctctcggttcttgagccccaaggtctacctcgtggccttctcactctaggatcacgttggttctatgtgttgctttcttgaggtttccctggctgcggatgcctccctctccaacttagtgtttcgttggttcgcctcagccagacgttgccagagcttgcaattatccaactcacactacttaaaaatcccaaattgcagtcagttttacaccgtcaggtaaagaattctcgacagtccataaaaccgtcgcctatacgagcgtcgcgaatactaggtagaaaaggcgatagttgaaaatagtcgaggaaatagtaagggccacaggttaaaatcatcacctatagttaatactataggcgacggttaaaaatcgtggcctatagtataggctacagtttcaaaccgtggcctatactataggccacgattttaaactgtcgcctatagtggtataggcacgcttttaaaatagtggcctatagtataggctacgatttaaaattatggcctatactataggccacaattttaaaccgtcgcctatagtggcataggcacggttttagaccgtcacctatagtaaaatttttaatttaattataaattttttatttttcagcgacgattttcgccaatcattttttttgcaaaaaaaaaaaacggaaagaataatttttttggctacttttttcctgcattaattaatttttactaatttatataatgtcactaattagttagggtaaaatataaacataaactgaaaatcaacagattctgaaatatatacaaactatgtactctaatttacttaatcgttaattatatgatagtattggttatagtgtaaagcataaaaaataattgaaaccgatcatcgtaatagcccttgtcgcaccctgtgttcggacatattcagttcactgaccacaaagaagattcatctcgtcatttcagtataagttgctcttaccttgcaaaataaaatagaaagaaattatatattaattagtaaaagaccttgtacactattattattataaacaaaaaatatatatgtctttagttacattactattgtaaagaaactagttcattagtaaacatcaagcatattcacctaattagcttcttcattttctcttttgacttgttcttcactattcacccttacctgcaatgtaattccacctatataaatattgcttaatatcgatgttgagaacaacaaaagttttatataatataattattaagatgaagaaaatctcttctttgccaagatggaaagctgattcctcccactgcctgctgcccgctgctacactggatatgtggagtgttgacggcagtaagaagaagaagaagatgggtcacagaaggtgaatcaactcaagagatgtgagaagtagattatcacgtgaccaaaaataaaataacctttgcccaaagccgaagatcacttcattatttataggtgattattatgaactaaacaagtaacattcaggaattttatcaaacacctaaagcgcacacaacacttaaattgaatctcgcaaggttcatattaatgttatgttttaggattatacctcttgtattagagttcaagttacggggcaccaattgcgcctccactcgttaacaaaaatgtctaggggcttgacactcagatcaatttgggaaaaaccatttctgatgtctcaatcagagatcaagaaaaaaaaattgtgaactaaatttatttgtgatcaaatttcctacgaattactacaaatacctagcgaccacgttgaatgcacaaactccaaaaaaatatactgagcagaaaataatagtgtaaaaaaaaggaggttagatggagaatggaaagttttatagtttgttgaactgaaaaacaaattgcatttggaaattttggagagaaataacaaaaattacacacaaaaataagtctatacctgcaacgtcgatcgcctgcgcctgccggcttctgtctagtagtcatctgctcaactgcaacgctgaaggggtgaactcggtgaggagagtgaggtaatgtgctatttggtaaaacctaaggggcttttgttagactttgttatttttaatgggcttttgtgagtgagtgagatcgagagagatggacagaatgagtgagtgagatcagagaaggtggaggtgcgagtgtttgagagagtttgacgggtttgagtgagatcgacggacatggagggagtgagtaagtcgagaggtgcaatcaatgtttttatccctatagtcttcggcattgaaccgtcgggcaaagaatggaccacagtttaaaattgtggccaatattttttgcgactgttttaaactgtcaagaatagtgcaatatcttttttcttcaaaaaattctcctcacttttaaaacgttgcctaatctatactagtgttaaaaattgtcgcctatagtatagtataggcgacggttttcaacacacagttaatttttttagcgacggtccccaaaaaaaagcatctttgaaaccgtcgcgaattctaccttttgtagtagtgtcaaccaatggtacgtacctataggatcataggcaccctccctgatagatatagaaccgccaacattagtgtttgtttccttattcccagcttctaggtttcgatcattatcacattggctccttcttaaatgtgttgatcgtgttgaacacgttgttcgtaaattgggtggcctccatgagcccatagactcttttcctggatgacggttagtctcttcaggatgactgctgtcgttttcctcattatcagccatggagaataaaaattatttcttctttggttaggaggaatttttctgagcttttatcacataggctaataatgaaagcaccaaacggttaatgcagatttttttaacgattatgagtctatattcgtaatatatttggcacaaaaattattagagatcttagaagaacaatggaaacaataataacactagttttttatgtgattttgcagttaactctgcatagtccacaagtctatcttattcagatatttctggatacagaattagggttttataatcagtaaactccttttctctcaaagattttttgtcccctttttttgtattgtctgcccctatttatactaatataggtaggtagttaattatatttaaattcgaatcccataacaatattccccaaaattttgggctttaattacactccatttacatacgtgtagataatattaaaaaactcacacaactgttatttaaactgtctttacggtggtcaatgctgacatggattaggacacactcccaaatgtatcttgctgaggcgtctcgcctagtacataaatgagtgacttagtttactcgtattctagcaatggcatgagaactagtgtactgagcaaacttaagaactgctctttgaccataaggctttgcagactggacaatcatgtccttcaagtcactacacttagttatcataatgtaggatatatgctaagtgttccagtaacccattcgcctcgttgatacttcttcacatacagcaaggtagatgcctcgctatgcgttgttcatagctccctcgatattacaccttctgaggcaagatggtttctcgtcaataaatgaattgatagtttgtatatcctt

SEQ ID NO: 224657 - DNA, 2834 bp, Cannabis indica
gtccgatgcttatgcacaaatttcctgacagctatttttttttgtgtttttttgcagtcttcaaaagttccacgctgtttacttccagtgtcagaacattacactggtcgtgtgacttggcaaggcggtagttggtattaccccaaagtgaaagccaagtttatgaaaatgtagttgttggaaatggtgaaggagaatcccctttcaagcattttttgagagagagccattagcgttttcgggtgcacttatccatcaattgttcatgcataaaatcaaatcagataaggatgacgaagtgcctttttacattgcagggaagagatgtcgattcgcccgggctaagtttaccctagtgactgggcttaacatgttacgtggacctactgagactgagtttgaagagaatgcgacgtcagaccgtttgatagtagaatacttcaatagggatccatccatcaacattggtcgactgcgcagcgtctttgagagttacactgagaaggatgatgcttacaagttgggtatgatgttgtttgtgatgggtgttcttattgggaaagaggagaagaccctagttctgcaatttatcatgagaatggctgacgacctccctttttcatacgagtacccgtgggggtagatttctttcaacttgttgaaagaaacttggagtaaggacttcgacgaaaaaaaagaagcatatggataagaagattgaaaagggaacgactcaaaaggagtcgaaatactcggccaatggatatgttgtagcattacagtattgggcttatgagtccatcctggagcttactgagaaatttgcgatcagaaaatcgcattgctttcctataatggtgaactgggagagtaaggaggtgccactcggcaaagatgaagtcatcagattatttgcaaaaaaatttaaattttttaattcattgtatttgttcacgtttatttatttattttattttaatccaagtctaataatcttttttttcttatttgcagttgacagtgtactccgttttatatcgcggtctaatgaagccgagtttttaagcaacgtcactggaggtgagtcccctctatttataaatatggaggaattggttgttagtagtgatggacaacttactcaggatagtttgcgcagccaggcttcgaagcttgcacacatgctagaacagcgagcaaagaaagctggaatcttcaaagaggatacaccaccacactctccaccatcaggggcccgttctgtttcatcgtctacatcaatgccccattctgcatctatgcctcagtcagcatctattcccagcacttcacaacctcaagaaccaatatcttctaccatattggcaaaattggagcgtgttgagagggaacaacttgctttgaagtaaggccagactgatattctgaaatagcggacagagattatgggttacttgaagaccctattggcactcatgggagattcgagaaagccaaatgtagaggcagagccacaacaagacctcgtctctctaggagatgagctcattcttcccaatgattacagacctgatgatgtggaagatgtactccatacacctcagaacatgtcaatcacatccattggagatacgcaagattcagaggtatatgttttagagaccgctccaacaccggtggagaagagacgaagaggaggtggtttgacgagtacaccgaaatgaacaagaagatgaagtcatcgatagctcatgtgaatgttgacccacttcggcccgttgatgagaagctactacatagttttcgaaattagttagtggaaaccattgaaacaagtatctgagggacgtcttcactggtgcacatggcgtggcttggtttcaaaggctacttactaaaaaaataactttctgttgatgtaagtttcttaactaagtatatttgtatttttttattttttttaatgttctaatgtactcgtgttgacttatttgtatgagtttgcagtacttgaatgcaactttccatatgatgagaaggcgacaacacttcttcctagagttgtacccacgtaagtgtactgtcatacaatcttggtttgctttatcgttgaagggtcagtgggacgcttggaagaaaaatacagaccatgctgactttgtctgggatgagtccatcttggaactcattcatggggatcaaaaccaattcatgccgtcttggaagggtatgtaatgcatatacatgaccatcttcttggaccgacagaaacattggatcgctatggaggcgaatcttgagttgtgaaagttgttcgtcttcgattcaagtattggaagtctaacgactgacgaattgaagacgctgatggatgttttgtgcattttattatccaaattggtggaccagtgtggtgtatgtgacacccatcacatggtgatggtccctcaaatgacagtctccgaaagtcatgccaaaacattcgactgggatctcatggacaataaagttgtacattagacaaaatcgagataatttaagtgcatttttgaaaatacgtttactgattaaattaaaatttttattattattctctatggcttattaaattttgcgtttaactacttgcagtagcaattgcagaatgtacgtcatagagcatatcgagcataagctattggatctaccattcgttggagtagatcatgaccatatggcgctctttcttcagagatggggagtagattaattctaccagaacttgtcatgaactatgaatgtttatttattatatttgttgaacattctttacttttaggcttttcgatttgaac

SEQ ID NO: 224658 - DNA, 1671 bp, Cannabis indica
tggaaattgatcaaaaatgatatcttcgaagcagtcacttcctttttacatacaagccagttgctcaaggaattaaactcaacaatcattacacttgtgcccaaaagcaaatgcccaaatgttgtcagtgactatagacccatagcttgctgcaatgtattatacaaagtagctactaaaatgatttgtagtcgcttgaagctgattcttctagatattgtagctcaaaaccaaggtggtcaaataaaaggccactatattgctcacaacattatgatttgtcaagatttaataaaacactatgggaggaagaatgcaaaggctaactgtatgataaaactcgatctgcagaaggcttatgacacattggaatgggattttttagaagaaatgatgcatgcccttaagtttcctgctttttttgttaaactaatcatgacttgtgtctcaaccccgaggttctctttacttttcaatggatccttacatggtttctttgcagctaagagaggacttagacagggggatccaatgtcgccccttctttttgtacttggaatggagtatctcagtagaatattgaaaacaattggagataaagaagactttcatttccatgaaagatgtggcaaattgagaattaaccacttgagctttgcggatgatgttcttcttttttccaggggtgattacaagagtatttacttgatgctcaaaggcctcaagttgttctcaatgacctcaggcctccaccctaatcaacagaagacagccatttactgtagtgggatggcagaaagtgaaataaagagaatcattgatgcttcaggttttcaaaggagcagtgtaccctttaaatacctcggagtcccaatttgtgctaagagaatatcttcagctgaatgttctgtgctagttgagaagatgacttcaagaattaaagtgtggagttccaggaatttgtcttttgcgggaagagttgtattgataaactcagtactcttgacaattcatacttactggagccaaatcctcatcctcccaaagaaagtcataaaggagataaaaattatttgtagaagcttcttatggacagggaagagcaatatgaatggtccaagtagcattgcttgggatattctttgcaaatcaaagaaagctggtggaattggatttcatgatatagcaaaatggaatcaggctgcagtagcaaaacatgtttgggcaattactagtaagaaagataatctatgggtgaagtgggtgcatagtgtgtacattgatcaagaaaattggtgggagtacaatgcccctgcccatagtagctggtactggtatagaattgtcaaagtaaaagaagaagtgaagctgctatcacctccaaatcagtttactgcatctgatttcaaaatagcaaatatgtacaagatgttaaatcaagaacaaagaagtttccatgttagcaagcaagtatggagcaggttaaatgttccaaagcatagttttcttctctggatagcagtgcagaatcgattgaaaacaagggagagacttcaaaagttgcagattgtggctgatgcttcctgcatactgtgtaataatgcagcagaaagcactctgcatatgttctttgactgcaggtacactcgaagctgcttacaagaattaaaa

SEQ ID NO: 224659 - DNA, 1332 bp, Cannabis indica
gctaagcctcaaattctaaactaaggataaaacataatagtaggcttgaaaggctcaaccggtccaagaaaattgccttaatcatgttccaagcaaaaggtatcaaggattttgcctcaagaaaataaatcatgcaagttctattccattcaagtaaatattccgtaaacccaagtagaacaaaaatgatattgtccaaatattgacaatttacattgataattttttttttccgtaagaaaccaaattaatccaaagtgttaatgaatcaagcacacggtttaactctcaatccattccacaaataacatcagcaactcaattaatcaattatcatcgcctcaattatcaatacactaaacacactaaacacactaaacttaactagacaagaaacataaactaagcaaaaaaaaaaaaaaaaaaaaaacactataaaattttaagtccctcccccaaacataaagtacacattgtccccaatgtgtcatgcaaaccaaagaaagaatgacttacctgaaacccccatcagaaggggtttggtggcggtggctggtcataaggctagaatcggggtggatttgccaagtaattggggtcctcaatcccgatattcatttgcgtgataagggagttcatctgttaaacttgtccttaatgtgtcatgcaaaccaaagaaaggacttacttgaacccccatcagaaggggtttggtgacggtggatggtcataagggtggaattggggtggatttgtgtcctcaatcccgatattcattcgcgtgataagggagttcatctgttgaacttgcccctcattaaaaatgctccttcgtgccatgtaactttgcatgtgcatgttttactggataagatagttgaactgatcatgcgtgtactgcctggctgggtcaagagggttggcactgtgttgtggcagctcttcatcatgaactacttctttgcactcaagaggattgattggggctccttgttgttgtggtggcacttgcttctgacgagggggaggttgtccatatggatgtggagctttcagtctagtaaccgtccccacatcaatcttgcattgtggagggatctttgaatcataagaatactcaagaactccataagcttcacataaaatcagtaatgacatcagctaactaagtcctccactgggtgctccttccaccattgtgtcaaagctcctctgaataatatcacccccattcaaattaaaacccttcataatggcatacgcatatttcagcctatcaatctaagcatcagaaaaagtgtttactagacaccaactgaccattcaaaaagt

SEQ ID NO: 224660 - DNA, 1667 bp, Cannabis indica
tcacatgggatgacatgcaaagagccttcattgctcaatttgtaagctcaataagggaagtcactgttagtgacctagctgaaactaagcagagatcaaatgaatctgtcaacgaatttattactagatggaaaagtgttcaaattcaatgtccaaaaaaaattgtctgagatatctgcaattcaattatgtagacaaaatctcattccggagatagcagtttacttatgctctacagaacctgaaactttcaatgaggtagtttccaaagcaagtaatgttgaggtgcaaatagctcgtcaaaatgatatgtcatatgaatcaatggctacctttgtaaaatatgacaaacgcaaaggagaataaaaaatactaccaaagcagtccattataaaagagactatggagtattcgttcattgatgaagatgatgtcgaataaatattagatgaattactggctgtaaaagctataaatctcccaaagcataaaaaagcaaaagagggcaataataccgacaaaaccaattattgtcggtaccatcgaagcgatactcattcaacaacaaaatattgtgccctcaaaaatatcattgaaaagatagttcaacacgaagagattcaaatagagtctcaatttcaaaaagcacattgtgacattgtctctttaacttaagacaagtcttccttttaaaggagaagaaaggttgttactcattgcaacctaaaaaaaaagtgttgcagaaagtaaaagagcaaacaaatagagcaagaaaaaagcgaaagcactaaaaaaaaaaaaaagagagcgagcaaaaagcaaatagagcaaagaaaaaaaatcaaacgctttgaaaaaaaaataataataagcaaagcaaaaagttaaagcttgataaaatagagcactgcagaaagctaaagctcgaaaaagaaattgaggaaaggaaagagctaattctcaagaaaaaaaattagggacaaagcaaaaaagaaagcccaaacaaaaagaggcaaaagcttaaagaaaaggagagtagcaacgagcttaaagttcgaagcagaaagtgagaactaaagacaaaaagtcaagacacaaagcaaagaaactaaaatgtgtttggaaaaatatctcaaagcacaaagcttaagcatggagtaaagaagcacaaatgcacaaagtgttactttgaactacgaaaggcttgatcccaatctgggtacgtaggcaatctaaataaataatagatgcaaccaccaaatcaaaatctcaaattgctctccctaagtttaaagacaaatatgcaaagtatttgtcctttcaaactaagagtggtggaataagaaatctattaaaggggagaaagttcaaagttactcgagcatcacacatgtccatatgaattaccacgagcatgctcgaggggcatctgttgaactgttttttttattattaattataaaaaaaataataacgataataaagagaatggctcgttcagcaacataaaaaaaagaaaaaaatattattaattaataatattttcccacgtttctctccactaattttgaactgcccactactcacctatccattctctgatcaatatattatacaaaagagtctataaaaaaattagacacaaaaggaggagaaggagagagaga

SEQ ID NO: 224661 - DNA, 2110 bp, Cannabis indica
tataataattaaaaaaaaattcacatgagttttttacatgtcatcatacatgtgtgggacaatgcatgcctacacatgtgggtcatgttttaaagccccaaattgatttctcaattttaccataaataagatttattatttattttgccaataaataataattgattaattctcattaatctcttattttattaggattaaaataaatattatctttactaaaataatatatttctccatttaatattatttaagaaaaatattacatttaactaattaatttagctttaataaataacactaaatagttaaatacctctttaattatacaattgataattgacaattattaaaaataataattttcacaaaattactattttttccttaagaattatttcttatagaaatcaattctttctcaaatttattcatcaaattaaatatttccatgtaaagtgatttatcactactaaaaaattggttttcccgatagttttaaacaatcaggtaaagtattcttgtcgatttctataattatcgcctattcgaccatcgctaaatagaaaaaatgggcgataatttataatcattcctgacggtttaaaattgtagcctatgatagggtatagaccacaatttataatcgtgcctaatactataggcgacggtttaaaaaccatcgcttattaactttcataggcaacaatttcaaaatgtcatggtataataactcattttttattattattttaaaattttaataatcttaaatttttattatatatttgttcatgtcataatcataattatcaaacaactcgagcataaatagaaatttattaataacacaattataattacacttcatagtgtactagtttaggcttacaaaattttatactcaatcctaattttatcatcatcaactatgaagcaaaaaaatatttacaaaatgaaatacactttttaaatcctaagatctcaatttcaaatatcgtctagcattgctctaaagaaagacttaacaatataccttcacattcaaaaaaaaaaagccattaattaataagcatgatagacttataaagaataacctagctaccttattgcaaacatatcaacactaaaaaattaaagtttttaattatttcaatatatcaaataaactttataaaagtacaatttaaaactaaacattacctaaactatattaaagttataataaactatactaaacttttttttcctaaacaattaaacttacattaaaaattttctttaccaaaactacattacatttattttttctagtaacaaattaaacattattaaaattaaaatgctataaaaaaatttaattcaaaatatactaaggatatattctataactttttagctatgcacactacaatatcactaaaaataaattaaatttcacaaaaagaaaatcaaaatatacatattttatattttaaaaacataaacattacctaactttatcaaaataaaattctaatacttagaatatttaatttaaataacaaatatacctctattcaaattaaaatattcataaatttataaacttaaaatctaaaagaaaaaaaaacttaatgcatttttaccaaaatctaacattttccctctaatatttatgtattattagtaaaatttatcctaattctattaaaattttgacaacataacaactgtaatcatacatttttaaaaatttcaaatgtgtaaaaaataagaaacaaaacgtacataacacaatacaaaacaaataaaataacattaattatacaaaaattatccacccatctgtatgcagaacaattaatcctagaacttacttcactacggataaatatataagatattcaaactctactaaataaattattataaagttttagtgattatacatttctttaataaagctattagctacttttacgctctttaatcaacatcaagaacccggtacctaaaaaataataaaaccattaatattgattgaattctaaattttacaattaccatcaacttatatatataaatatgtatgaactaaaaatacatatatatatattactgttaacgc

SEQ ID NO: 224662 - DNA, 2522 bp, Cannabis indica
cctctctctctctctctctctctctctctctctctctctctctctctctccacacgaccacacacataccaacacataccaagtgtggttgtgtaatttttccaaatctcgagttataatgtctcatgagttgagtacactgtgtaacataaaaatttgttcatcttgttaaatctataagctcattcttatcctgagtgttagagctagtttggaagatctagtgtggattcttcatcaagctcattactggaatggatgatcgatatattatacgagaagattcaaggaattcatgataggcaataagagataatttcataatctaactagttagatttagcttatgtattttttgtgttaagatctagactttaaggtttacattgttcaacaattttttttttaaaacttgaatcctattttctacttctgctacaactctgatatgaaccttaaaaaccaacaaagatgactttgaaagctcaaagtcaaaagtcaaactaaaagtcaaagtcaactctcagaaaaagtcaattttagatcaaaacatgcaaatcaagttagaaagctcatctacataaggactacatacaatcaaatggtataagtttgctttagtcttgctaaagtgatttgcatagtacattagggtttataagttaaaagtttggctcactaatttgtacaaaaagttacttttcaaaaatgacatataatttttctaatttgaattttaagattattcatattttaactatgaaaatgcaactggaatttttaaatcagataaactagttatgcgttatgctcgttttaagtcaaaaaatttgcatttggccactttgcccaaatagtttcgtgcacaatggttataaacgactactttcttccaaacactgtataactcatttgtatcacattattgagattgggttgagcatctattcatcatataatatcattctaagcattctaaactaaaggcttattatctttttgtatacacaccaaccacacagagccaaacttgttcttatcttctctagtgtgcttacaattctctctaggatttcacattatattcatcttattatagagaatttgctttgtatttcaaagtcacatatccattgtattgagaggtgagattgacaccgatagaaaaataactcggttgtaggtgaggttaacatcgattttgtaaataacatgagaagagtgagattgtcattacaacaattcgagagtgagattgacactccaacaatccaaagttgatagtcctttagaaagctattggttgaggtgaagttgacaccagtggaaaaacaacttgattagtgagattggcttttcaataatccgatgaggttgacaatcctttaaagaaagctattgtgagaggtttgggaaagaccttggtgaaaagttctccgattgtaagggttagtcaaacccgttaacttggctcgatagttgaactcaaagttaggtccatagttttgaagactaaggatgtaggtggcttagttctaccgaaccttgtaaaaatcgagagtttacaatttctatccctaaactctttgcatttcaagattattatttgttgatacttgtgtttatctatgtgattgcattaattttgaatatttacataaattgtatgtggggtttttaaatttctaaaattagtttaaattttcaattcacccatcttggaaacttatctttggctaatagcctaaacacaaggaaaggacaagtagtggaggcgcctcacctacaagtccaaatatcccgacaaaacgttgcaatcactactcctgtcccttgagaccacctaacacctaacaacggtacatgtcgtaagaccacctcctgcaactgcaacctgtatgggcaagacgttcttcctctgtcatttggggaccactaggggatcatcatgtaaatgagagccaatagagctcacctataaatgctccctttctcatatttaaaaaggattagaaaattattgtaagtgaggcactttgagagcaatgcaaaatttctatttcatcttttccattcttttttggaatttatttcatgttcttgagtctataaacacttaaatttactctcgccgattttttttgatttttcgaccatagtttggttgacgagttctcagtgtcaagagattggatttaattatatgttgttgtttagttaagttgaatcagatgatgattttctaaattcaattcttaataattcttaattaaaatagatcagggccggccatgagaatatatgggcctatggcgaattagattttggggccctcaaaattatatataaacaaatattgaaaagagtgttatgggattcaaacccctgacattgtataaaatgccatacaccttaatcaactaacctattaatatttgttgtttttaatacacttaattttacttaaataaaagtctaatatttttttttactttgggtccccgaaaggtgtgggccctagg

SEQ ID NO: 224663 - DNA, 1199 bp, Cannabis indica
atcaaactgggaatattaaaatacggaatttcacaagttttatttttaataaattatttgatacttataattttaatattattatatattagattaatttttaagttattatttattattttcataagtaatttttttttaattattatactaaaataaaattgaaatagccgcgcgaagagcggctatattgcctagttaatactaaaaattaaatagaataactgaaatattaagtaattaaataatgaccataattaaaatatttttaatttattatattttataaattaaattattaattaattaccgtagtatataaaatattttagggattttttcattttttacacttcaaaataatttttttttattatttttactagaattctatatagaaacccttattgcaactagcgaaacaacctaaatcgcaaccaaaaattgtataacaacccatataaaaactaccgaagaaacaactttagaaactcaaactgtaaatttaaataaaaaattaaaaaaaaaatatctggagtaatttcccaatattttaatacttattgttccccatttgtttttttttttgttaaactttcaccatgtacgtgttaattaaaaattattttttctccaaattaagtataataattcaatgacgatttaaaatcgttataagagttatgaaaaatagacacgaataaaaattgatttgaactcgaatgacacaataattatttgtttttgattaaaatttatttagtgtattattcaaatgagtcaaattaaattgatataactaaattatatataaattgaatatatgatacgggtacatttgtttttttaggttcagacctttaaatttgaatgcacataataagatattatgtttgaatttgaatattaaaatatttatattgtttgttttcttttttaatgtattttctaatatttttaattatctaatattaataaatttattaaattatatttatttaaaaaagtattcaaatacataattttttaaagaaatttaatatttaaagtgttctaaacatacctaaatttcatataaatacaggcaatgaaatgattatttattaaaaaaattaataatatataaattatgtataaaaaatataaataaattgttaatatttattttaatggtatattaatacaatactaatataaat

SEQ ID NO: 224664 - DNA, 1883 bp, Cannabis indica
ttttttaaaaattaattttagatcaacttaaattagatatttttcattcataattaaaataaaatagtttaagagaaaataaattttattttaatgacctttaataaagatattcaatcttcattgtgagttttacatggttattgtttctaatgggatctcaaggcgctttgttgtccccataatagatgatcaaccattagacaatttgacaaaataaaatctcgaaagataagtattttataaatttttttctagtagactcatccctaaagatgactgcttagaaattatttattaatatgaaataatagtagaagttcatgaaataatgaccttgactcttgcctaaatgggatagcgtcagttttatattttgatcgaataaaaagttactaaaatgcgttcattttagaagagttgaccactctatttaacttatgatatcttagaatcttgcctaaacgggacactatatatcaagtagttaaaaaccttgaaaatataattgagatatgtatgtttttgattttttttcatgtccttatttcatgataaatgttaacaattattagaattacttagagcttagagcttttatttctcatgagaatcactaggttaattagctaaggaagagatctcaaattctagagagagaaactagagatatgctctgaccatatagagaccttttagaatcgtaaaaatgatcttatatgagcctcctatttataggaatggaggtccattaaaataataataatatattacaaaattatagaacattttgggaatattccatcaagagtgattttgattatggatcgagatgctcaattttgactacagattatgtttacccaaatactgaccccagtgacgtggacgttaatttttgacacatggcaagaaggaaacatcctagagttgagtagtcctaagtcatagcagtcaaccaaggtgggatccttagccttgcacccaagttaacactgagaactcctaaatgggtgtttggatcccgccaagttattttctactcaccatccttcagtattcttataaagaccacataatttttatatgataaattagcagataattagggcttgattatgaaattagatttctaaatataatttatgaatttatggagatttatttgaattccaagtgtgttatgtatgctatatatgaaatttttacgttttttatattttatgctaacaacattggaacgcgacgcttggccaataaaatcacattttcttgtgatctagtattttagtaatagtagggcaacctggatagacattgggattgtcaggaatatttgggattttagaaattaccaaattatccttaggtggtaagttgccttttggcttaagcaaggacaaaatggtcgtttgccatttattatatttttttttcttgtagttatttaatttatttgagtaatctgaatttattgtattagataactatgttttctctcatttatcaaaaattaaagaaaacacacttatcacattctttcttaagtttaagttagttttccttgcatgatttcaagattagggttctgtgatattgaagggtgtttgaaattgtgctctaaaatttaaatgatgttgcttgtgttgatttagagctgtttggtggcttggtgatgtgtttggtcaaggtttgagctttagagctcaaactttggtcttcaatggtgatttgtgttggaattattttaccaggatctagatttactaacaagtatgttattaacatcctaaacatgaacttctaaaacgatatgacataaaaacatataaagtatcaggaaccttacagtggctgcatcggaatataatgtctccttccac

SEQ ID NO: 224665 - DNA, 2969 bp, Cannabis indica
aaaaataaatgtcccaagtcagtaaaaatccctaactagtaaaaatcttatcattttcaaagaagattaaaaataaataagaaatcaatatatatatatatatatattgaataaagcatgaaattttattaaataatagcctgaaattcaattggaacatacacaagcaagcaggattagaattaaaaaaataactaaataatcattcgtctaattcccacagtgtttcacaaataaataattgcaactgacaattaatcttagaaacaattatattctatttcatccactgttcagaagacacgacagtaaaaactgcaggaagtttaacctcatagcttgagcattcaactaccctgtaaggtatgtaactgcactattaacaattctttcagtcgtaaaaaacttgttatctccaaccactaacaataattaaatggcgagccattgaaaaagaaagaagaaccaacaacgaaacaaagcaaaacaaaactatgtcacattattagattacttaacaattagtttgttagtcggttatttctgttaaggcatattgttagaatttagttaattgggttgtaactgtgagctaagtctactttgttgtattgcctatataaggctctattctgtaataaacatttcattcaatacaatcacaccagaacagagtattttgctctgcatttttctctctctgatttcttgttctctcacatggtatcagacgtaactttgccatcatccatggctagaccttcaacaagatctcagaatggcattccaccacctactacagatcacccctcatcggacaatcccgatgtcacttccgcccctgcaactggtcccgttgctaatcctcctcagatcgattcaagatccagatctcacaacatcaccgacaacaacgttgatgcctctgatcatcaatctccaagaaacgaagcgataccaatccctaatcgcaggtcctctgatcgcaccaccattgacgacgcctttcttcctcagctccggtgatcatcctgggctggtcctcgtgtccaccgttctcactggagtcaactaccaatcctggaagcgtggcatcatgatggcgcttgctgcgaagaaaaaattgcgttcattgatggctcaatcccacgacctgaatctggtaacactcttctcccatcttggttgtgttgtaacaatatggtgatgtcctggttagtcaattctgtttcacctgaaatcgctcaaagtattatgtactttgatcaagccaccgatatgtggcaagatatagctgaaaggttcaatgagggcaatggaccccgtgttttccagctccaaacccagctaactcgtctccaacaaggtgacaattccgtcacctcttattttacgaaactcaaatccattgggatgagctgaaagaatttcagcctaatactacatgttcttgtggtgcaatgaagatatttcttgactattacaatcgaaaccaagtcttgcaatttctcactggcttgaacgagtcatatgcctcagttcaagcccaaatcttgttaaatgaaccactgccgaacctctctcgagtctttgccatgatagttcaagaagaacgtcaacgcactctcggatcttcggaaaacccacctcttgcctcttcggttcgcccaccacctactaatcctccaagaaacaaaaaacctcggccttcttgttctcactgtggcaaaccaggtcaccttgtggataaatgttttttcctccatggtttcccacctggttatggggacaaaaagaaggctgataaaggaaaggctccagccaatcacacctcctctacaccgattgcaaactcaataagagcatttatgggcttaaacaagcctcccgacaatggtacgccaaacttagtgctactcttataaaggatggctttcaacaatctcaatctgacaattccttattcattaaacgcacttcctccttttttatggctgtccttgtgtatgttgatgacatgattattgctagcaacaatgctactgccataaccaacttcaaacgcaacttagacattcaattcaagttaaaagaccttggcaaacttcggtttttccttggtcttgaagttggccgaactaaagacggaatattcatttcccaaagacatttcactttgcaattattaaatgacaccgggtacaccggcaccaagcctgcctctacccccatggaagtcaacttgaaacttagcaaagacaaagggacccctttacccgaccccattctctatcgaagtctaattggtaagcttatctaccttaccattactagacccgacatttcttatgccgtgaatcatcttagtcagtttttggcttgtcctcggctccctcacttacatgccacacatcgcatattgcaatatctcaaaaaaacccctggtcaagggttattttttccttctcatgcagttcccaccctcacggcatatgcagaaactagcttatctccagcaaatgttcaagtttctttctttgctgatgccgattggggtagctgccaagatactagacgttcaatctctggatattgcatctttcttggcaactctttggtttcatggaaatcaaaaaaacaacaggtagtctcccgctcctctactgaagccgaataccgggctatggccaatgcaacctcttaactcacatggctccttgctttactcaaagactttggcgtctcccatactacaccagccaacatgtattgcgacaacaccgctgccatccacatcagtgagaatccagtttatcatgaacggacaaaacatgtggagatagattgtcacttcatacgcgaaaaatttcagcaaggatccctcaaacttcttcatgtgccttctcaacagaacttagccgacatcttcatcaagcctttacttccaaatcagttttctaccttagtct

SEQ ID NO: 224666 - DNA, 1879 bp, Cannabis indica
caattcattactaaaagagaaaattttattaatactctaaaaaaatgaattgtctccaataatatgaaaaatagggaataaaatcccaaaccaataattgaaatcaaattgttcataaattaaaacaaataattcaaaaattaaaaaaagatttcgagcttcatcttcaatcatggacaatctccacccttctatccaatcatctgactcaactcgctaggataacaattcaagtttaagtagctggagctgaaataagaaaaaaaataaacatggttagtagatctacaattaaataacccaaggggataataattctctaaaagacatgagtttatagcatataaagaaataccttatttctttgctagaaacttagggcattggggtttctagtggcccttttcattgcaatagaagcatttttccttttggcttttcatcgggattagcagcctttttctttttcactattttcacagcttgaataggcttcttgatattcttccacttcttcttgttattgggttttgaagtagaggcaatgttttcctcagccttagccataaattaacactcccagaattaggagctttagctcttcctttctgtggtcctccaatataattttcaaatgtctaaaggttgttgatcaactcgtggaagtcaagtctccaacttgctcatgacataatttgaagtgaagggcagaaaggctagagtcaaactgttcaagatcaaactcacttgagttgtctaatctataacaactccatgattctcagcttcttggaaggaactagtcatctggagaaggtgatcatgcacgctctgatgaggtttcatccgtggattgatgaaattcttggtcgtttcaaagcgagcttgaattgattccatctcgaacagttcagttaactggttcatgatttctgcagccatgagagtgtttgcaaaccttgttttcaaggagtcaaccatgctagatagcataaagaatggagctttattgttagcattctgccaaagctcaaacttttctttaattgtcgtggttgcattctcacctcgctgctcaggagcctcttcaatcaacacaaacagggcatttacaccaatgagagcaatattaatgttctctatccatttgataaagttagctccattgagcttgttatcaatcaacagtgacaccatgggattggtcatagtcatgttggatactacaaataacaataaatagaaatcaaataaggtttaacacaaaatcatattcagaaattattagcacttagcaagtaggaatgacaagcgaaaatactaaaatatacaatcctaaataatttctaaggttttcaacaaactaatatcagtgtcccgtttaggcgagtgtaatatcctggaaaataaataatatttaaataggcatattttattaaatatgtaattatgttggtaatgaagtaagattatgatcttacttagggtaactattgagaatttactcaatgaaataaaaagcgtaatttattaattacggagattattttgggatatgtgagtaccgaggatatcaatttcgaaataaaacattttttattgggcccgcaattttggttagaaatgtcacgacatttatggaagaattattttgagaatattccggactaggttagaaattttagaatgtcggtttaatggaattagcaaaattacaaaaatgccctaggttattttaaagtttattttttttcattaggggtaaattagtcttttgccctttttacttttctagggctgagtatttaaaaaaaaaaaagaagaaagctattaatagaaaacttccaaggcaaggaacattaaaaaaaaaaaagaagaa

SEQ ID NO: 224667 - DNA, 1384 bp, Cannabis indica
tctttttctttttttttttccaagaaaaaaatagaatttttactaattgacaaatcaagcaaaatacattacattatgatattgcttaaagagcataatcaataaataggcaatgtttacaataattgaaaaaaaaaacctaaaaaaattaataagtcactaacaatgaaacatcaataaaatatgaagaatactaaatttccaatctgaatgaacatgtgacaaattataactattaatgacaatctaccgaagatattcttccagtaaaaattagataatgacaacccgattattcacattcaaataaaagaaaataataaagcaacaaaccctaacgataacaatcataataaataatcacactataagttatgaggctaataagaatatgagaattctcaaatctaaacatagacaagaataatcatactacaaacacaaatatattttgagtcaattgagattacctcatactacaaacacaaatatattttttttcttcttaactaggaaactaagccgcgctttgcgcggtgctgtccagtttttataatttttttatgtaaatattatatgaatatatatttttacgcattgagtaatataatttaaaatataacattaatttcaacgtgtgtattataaataaagtaatagcattgtaattgaaaatattatttttaaaatatatagaaagattgtgatttctggacaaatattaaaaatgctaacaaaaaaatattaaaaattaataaatcccgaaataataataatatacatgtatactattgaaaaaaaattattagtccacttttaaaaattattgatattgctaataaataaattataaattaatagatgtactattaaaaacaatattagtcgacttttaaattataaattttgattttaaggttcaaaataaataactaaaaaattataactaattaggcaagattaagttaaaaattactcataatgtaaaattttcataaaggaaaaaaaaagccttactatgagtcaaataaactaaattcactgaattcaaataaaatagatgaaaaatactttagaatgccacctcatattaattcttttgtgattttttttatataaatatataaatattagtggatatagaagcataaaatattttatttattgcatgtgcaactcttagtataaatttatatattaaatataattaattatgtttttaacataatattgtttaccaaaaatattttttaattagtatatcctattaaaagtaatattatataaagtgtttatattttttaaatactaataatctttctttgtaaaaaaaaatactaataattttattttacatcgtgtttatattgtaattttttttaat

SEQ ID NO: 224668 - DNA, 1509 bp, Cannabis indica
taggatgttatgtgttagagattttacaatattaatcaaaaaaattacagttggtctccatatgtaattttgactttccaatagcccgaacgaaggtccatcactaaggtaacgtgtagttagagagaatgaaaatataagaaaacataagaatatgagaatggtcatgagaataagatggaaatgggaataaaaataggcattaagagttagtcccacattgctaatgtgtggaaataaattgtgatatataagatgaatgggctactcctcccattgccaattggttttgggatggaacctcattcatgttatccccaaattctaacatggtatcagagccacttgtgatccgttgtgagcccaaattgcccccgatccaaaaagccctttgtgatccgttgtgagccaaagtgccgccggtccaaacagatacttccgctgtctcccctttgacctccatttgggacctttcggccaatgtgctagtttccaatgttgggtctttgacctgtcccaaaatccacaaatttcccgacgtgtacacccataaatttctcgatatttggccttgtgggattctttcaaatgtcatgttcagtcttgtggtctcttaaaggtcggtcgttatacccacactttccaggcccaaacgtgaggagggtgtattaagagtattatgatatataagatgaatgggctactcctcccattgccaattggttttgggatagaacctcattcatcttatccccaaattttaacggtaggaatgaaattgaatcaaatttaaagcgcataaagaaatggtaaaaaattattaaaaattttcatcttacattggaatgtgtttggtttttatggtttaatatgagagttagaaaagcggaagtagatttaattaaaaatagtttaatccaatatgaaccataagcccgaaaatctcaacataatatatatagattaaatttagactaatgaaaagagagataatacctcttgtagcctatcatggggtcatctctatatttgatcgaacatccaatccaagaacttgctgaagaattcacaccacaatctttcaaactaacttcaacacttgggaatagagtcggctattaaattctattggatgagtataattatgtaatcatagtatattgtcaactcatgagatattatgaagagatagggaaggagacaaaatttagaccacactgtagtgtgtgtggcgtgtgaattgaggagagaggagaattttcaaaaatatctttcttttatgttttatttataattttacagtctaaaacttttaataacaaaaataatcttgtaaagttttgaaattacaaaaatacactttgttcagcaaaacgtgaaatcaaccccacgacaactatataaatcaattataaaacaacaaaaaaaatctcatgacaactataatacaagtataaataaactataaaacaactatgggcacgtttgataacacttttttaatcagtt

SEQ ID NO: 224669 - DNA, 1705 bp, Cannabis indica
gcgcacaatacttgcgctcttcattgaattcattatgtcctcactgggcgatcctgtaggtcatcccacaactcgcctccagccgtagaaaggttagttgtgatccctacctaaaaagcagtaagctgaatactgtcatttaggcttctaacctttacaacggctgtgctaaagcgactcaagtaagccttaagcgactcgcctggttcctgctttatgttagttaaggatgatgcttcaggtcgcctgtctctagcagcttgaaattgtttcttaaagtccttggatagttgttcccaagacgttatagaatgatgagtaaatttatcaaaccagctgctggcagctcaagttaaagaattcgggaataagatgcaacgcaaattattcaagacattgctggctcgcattatagtattaaagttattcaagtgagcgactggatccgtagttccatcatgcgagacacgtgggttcttgaatccctgaggaaattcagaatttaaaatatcaggatgaaacggctcggtttcctcatccgaatcgtaaccaggtaattttccatgttctccatcctgatactttctgaacttatcctccaattcaatgattcgcaattggatgggatccacttgctgttgatttgcattaagttgatggcgcaaattaggtgcattttgatttagtcgctcgcaaagatcaggctgtctttgattcaagtgctcgcgaagatcaggctgtctttgcttgtaattactcacagaccttgtctcttagtaactcttagattggtagcttcgtgtattggtcatgctttcttggtcatcataatgttgaggtctacttccttctcatgtttgcctacccgatcgactatgtcctcgagaccttgagtgtcctgaactagagcttgcttcgtcttctatcggccttctccttcagaagaggttagatacacgccctctatttagatacgtgtatacatcttccctttctgatcgagaaggacgctgagggtgtctaggaggtacccacttgtcctgggttggtttccagggtttctctcgttaccatgagggattccccgatccctaggttgaggctatctcgcgtcctcattcgtgtgagaagcttttggtacatcattttgttcattccttaggttcgtaaatccttgggatccttgaggaatgtctcgctgttgttcttgattatttgtttgattgtccactaaaacatcccttgtaccgtcaagttgttcttcctgagtgttttggggatttccttagtttgtctcctatctcctagttctagtacctcgaggtctacctcatggtctttttactgcaggattaggttgattctgaggatttgttccttgtgtcgctcgggttgctacagcctctctttccaactcagcgtttcggctaagcattgttggagttgtctattctccaactccactaatggtacatacctagttggatcgtaagcatcctcacttctaggcacgtacctatcagaattattagtacattccttccttctttctgaattttgatcaccactagcatcgtttctccttgaacgtgatgttctagtggtgtggggtctttgagatcccattgactctttcccagggcgatgtatagtttcctcaagacgattttcatcattttgattgctatcagccattgaatatgga

SEQ ID NO: 224670 - DNA, 3992 bp, Cannabis indica
  modified_base (1025)..(1025): a, c, t, g, unknown or other
gtatgctgcaagaactaagaactgaagcacacgctgaaaggacttcttggataggaatagagatagttggagtcgactatccattctaggagaaaacagctagttacctggaactccttttcgaggaggactagctttcctgaagactcctttcaggtggacatgataggcatctgggaactcccttctggatgacaactaccattcaacaagacttcttccgaatggacaagctagacttctaggaaggcccttttggatgtcctctaactttccataactaaaacaacttttggagatctttacatttggaggaactataccacaactttctgaagcaactttatcttatgctgacgtggagatactgctacaagaagtttgttaagtcgtaactaacataagaacttagcacctgcaaccaccgactttaggattatattttcgacctataaatatcaccaacacttatcattttaaagaaggactaaatcaaacgagtttcgaggggtgatttcaaagagagagattgagaggtagagagagaggtgcagagaaaagaaagaaattgaatttgggtttcgcatgaagaatctctgtagatgaagaagattcgtgagtaagagtatgatagagaatactttgagagtatccaatagagaattgatctggactgtatcgtaccatattcttgctcaatcaataaaacaaatttggtggtgttccagaactagaatagagccataaattacatcgatttattggacttgaatgagtatatatcttgctcttatttttattgtcttgttgttttaatcgtttttggttttcataccctattcatctctattttagtctccaataattgtgtgtgaattgttaatcttctcataattatttgttgattaaattttagttaatttgattttgcaattataattttcccacaacgaggaataaaatgaaaacaactatcgttacttatgtacctacattgaggagaaataataaagcaataaaaaacngttgatgatgcaagatatggcagccaaaaacattccaagctggtcatatacgctttactcccagtctattttgaagttttagaaactagcatgtgacttacaaaccattctaaacatgtccaaaactatggtactccaaaacgagtactaattctcttcctactattcagtatggctgctggttttagtatgcttgagtactttgtctagtattaattctaagatcactagcagcattcccaacaaaatccagaaaggccaaatccttaatgtatcacagaccattgtatctgctagtggatgttttgaacttggcttcttctctccacagaacaccactaatctctacgtgggaatatggttattcaagaagagagtttttgattactgtgtttggattgccaatagagattaccctctccttacttcctctgctatcctcactatcaaccaagatggaaacattgtgatttcggatggaaaagtgatgtacatggtgaccaacatctgaaggggacaagatacatatgccatgctaaccgattcaggtaatcttgtactaaaagaaagcaacagctcagaagatgatcacaatctagtatggcaaagttttgattctcctacacattcccttttgaccgggatgacatttatgtgggattcttcttctttagtatcatggaaaagtgaagctgatcctagtccaggaaacttttccctaatactagattcattaaagaagcaactagtcatcaaggaaaggtcaagtgatggtgattcaaatgagaatgaagggtccatgttaggtatgattttgaataaaaacttccaacgaaatctttatcttggcatcaatccccaagatgattcatctggtcaaatttctcggttagtgttggatgaatcagggcagcttaagctacaatcatgctcaccagaaaccaaactttgtatatggatatggtccagatgctggtattcatcatgtggagcatatagtctttgcaatgagagtgctgagtcttgtagctgtttgcctgggttcaagcgtgttgataattttactttaggagacaatcctataagctgtaagaggaagattgaaataaaatgcagtaatctcaatctagctgctgataatttttttcctatttcaactactgagtttccaactggagccttgaagatcgatgttgggaattattcaagctgccaatcagcttgtttgaaaaactgttctctcattggttatgcatatgacgaagaaaatggatgcttactgtggaatagtggttcattcttcaatctgaggcaacattcgaaccgtgaacacaggaatataagaaaagtttatctcagacttgctgccggttctgagattagtaacttgaacgtgatttctggtgagtgaagagaatatagattgtgtcatctagtttcaagagtatattttaacatagcagatgaatttcttttctttgcagacacacatgaaagaaatgggagtgtgaaaaagaaaaaaaagaagataggaaccacaagtgttcatttgctgattatattgtcagttgtcgctgtagttttgctaattctttgtagacttttgactaagcagagaacgtttggatggaaagcaggttattatgctaacacaggaatgttacttattaaaagtttcatattgagaaaattataacactctagtcaacagaaatattattagtttgtgtaggtattaatttttcattgtacagggcaaaatttgttacactttgatgtggaaatgagcctaagaaatggcgactctgagcttcctgaacttaaaaagcgtaaaaaaggttgaaaaagaccatgcaaggtgatatttttcaccttttcaagtgtggttgctgctactgataatttctctgaggcaagagagattggaaagggtgggtttggactagtttacaaggtatgacttattcatattagctaaatctatttcgaactagtagatagcatccatggtcatgtttatatcatatatgccagtaaatatgtgagctgacatttttcacttataacaacaacattaagcaccattgtttcagggaactttaataaaaggagatgttgtagctgtaaaaagacaaatgaaaaaatctcaagcaggaaagaagcagttcaaaactgaagcacatctcattagcaggcttcaacacaagaatcttgttaaactactaggctgctgcattgaaagaaaagagagaatacttatttatgaatacatgcccaacaaaagcttggatttctacctctttggttggtagcttgtcaaagaaaattacatgaacaggaaagatcccgttcatcatgttcccacactagtgaactaataatctttttaatttcgttgtttattaatagattcaacaaggtgcagccttcttacatgggaggtacgagttagaatcatcctggggatatctcaaggtcttctgtatcttcatcagtattccaggatcagaatcatacatggagaccttaaggctaataacatattattggatgaagatatgaatccaagaatatcagattttggaatggcaagaatacttaaagccaatcagcctcacagaactactgaagcacctggtggaactttgtaagttataaatttcaggtacatgttcgaatcatttttccttggaattttctgaaataatagcctgattgatcatgttcagaggatacatgtcacctgaatattctcaaggcattgtgtcagacaaggcagacgtttatagctttggagtcatggtgttggaaattttgagtggaaaaaagaacacagctacttttccaaactcggagactcgtagtattattgcatatgtgagtatatttctaggcttctacctatttattgcaaaagttaccatatcctatagacaaaaccacaattaactgtttttttttttcaat

SEQ ID NO: 224671 - DNA, 1848 bp, Cannabis indica
tcaaatttttagttgtatttggctgaaatttgatttaataaaacctaaacaatttctttattttacaaaaaaagttagaaaatcacatttattctccttctctcttctctctctcgtgacccctagaaaccagcaagagccttgggttttcttcagcaagttttgggtttagatagcatctttgttgaggtttcaagctttggtaagttttctagttcctcttttgttgtttcttaagtttaaagttaagaattttgcatgaaatgagggttattgttggtgttcttgctttgattgcttgttgtgttttttaaagttaaattatggttagaattgatgattagagctggtttggtggtagtttttgaggtttgttcaaggtttgagcttaagagctcaaactttgcactctcatggtggtttttgtatttgtgcatgtagtagtgttttgttgccttggttatgttctctaggttgcataaaacaggtctggaaagtttggttcgaattggggttgatttggttgagttgtggaatttttggtcattcctgcactggaccggaattctggttcagaggggcctgtaggaatcggaattccggttggttccctgaaaaccccacagaaccagaataccagttggggaaccgctctaccggttggggcagttttaggaaccctagtttttgccattttgtgatgtttagggtattaccatgttattcatcgatagggaaacttctagtttcatgttttaagcccccaaaaaagtgatatagcgtgtcacttatcagtgttgtgattgatgtgatttaggagcctgtagttcgccgagcagttgttccactcaggttggccggcacacctgaattcggaatcaaggtaacattattataatatcatgcatataattatacatgtttagcgtacatgttagttgccgttagaataacatatcagatatatgttaggctaatctatagccatcagattagcatatcagggcaacagtgaggtgtacatagagttgcccgagatgccatcagatatatgctaggctataagatagtatgagttaactgctaccacatcagtacggttagagtactgagtataggctgggtttgcggttagtcatactttgtcatgaacgttcctaattcagttagggttatggttaggtgaatgggcgcctgattttaacccgggatattagtatgtttattatgttatgcttttcttactgagtttgtcgactcacagtgctattgctatgtgtaggtaagggcaaagctaaagttgaggagccgtgagagcgagcagatgaagattgtacatgtcagggcggttaggcctggagcgtacgatcctcaggacatcagggcttttgttatttagtcgttgggcgacaaataatttgtaaatgaatagcaaacttttgtaattgtattttgtaaacgagatcccagaattttatacgtataatgtattatgttttaattaattaagcaaaattttaattattcgagttttccaataacctcgttgaatagcaacgagctgcacagaacgttaaaaatcacgctaacacgcctatgctagttagggtgttacaatttggtatcaaagccgccaggttgtcttctgaagatcttcatgacatgtgcaatcatcatccgcagttagctcgttccacggttcagtaagcttttattgctttaatagtttattttaatagtatgatttaagaaaagcctgttaggaagtatgttagtagcctgatagtagaataggcgcatgtttttaatttctaaataagcagcattagtatgtttctctttgatcac

SEQ ID NO: 224672 - DNA, 1224 bp, Cannabis indica
tgtatatatatatatgataatgagagatatgggaatatgtgttctataaaattaaggaagaagcagagagcaaagcagaacagcagaggctgcaatttggaattttaacaaatctaaacctatcaaattggtgcacaaaccataaacccgagagagtaaatacttatggcatgtttggtttgttgtaatcaacattctaatggaatcatgattacaattccaatgtttgatctgcctttaaacttttgtaatgacattccattgtaatcattattacatcacttgtatgaaaaatgattacactcctatacctcatgaatcctcattacaattacttaaaatgactatcttactcttattttatacttttcttactaaagtagggataattttatcaatttactatctattccaatattaattccaacaacaaaccaaacataacaatcaattcctattacaattcttattctattacattactattaccattacaattaccattccattccaccaaatcaaacaccatcttaactcgtatgcatccattatgatcatgatataggaaacaaataagttgtataactaaagtaaatatatattttttatcaaataacaacactacttccttgttctttctatttacttattttcccaatatttaatcggggaataaacagaaagcagagagaaggacggagttgcttgcctgagttaggtgacccttggctattaaacggtgaacggagttagagatggagttagtcgccctggagagagcaattggatctgtatcgaagagccagacgcgtaggccatcaacggcggcgagttgagcgattccagagcccatttggccgctgcccactactccgacgaccttgatgtccgccatgttttgatccgagcgccgaagtgatcaagatccctatcccttcctaacaatattataacgagacaataaatgcgcccaacccaacacctattataacttattaagataataagacaaaaaattgtatcgtacaatttaatatcttttatcttacttcaatcaaaaaaaaaaaatatatgtcttttatcttattaataatatctttataggaaatatacaaagtgagactattttgttcggatagcatagggtagtaacaaatcattcatttgataggaaaatttaattatttttgcatataaacttgagaaattaattctttaaattta

SEQ ID NO: 224673 - DNA, 3541 bp, Cannabis indica
gaccgagattggggtgcggttctaggtcccgacccaagtattgtgtcccgagtttggttcaatgtttgggtcagagttcaggtccaggtttgggtgctgagtccaggtctgggtgaggagccggggctggttcccagttcgagtctacgtctaggttggagtcttggtcatggtccgactacggttccgggtcatgctccaggtctggttacggttccaagtccaaatccaagtcctcgttctagtcccgttcccaggtcctggtctacttccagtttcggttccaattttaggtcacagggtacgtgtttgtgtccaggtttttgtatggtgctgggtttcggtccgcgtctgggtttgggtccgaggctggtcccagatctggacaccaactacgggttcggtccaagccccggttccagatctatatcccgatctcgggtcccgacctgattccatttttggtgtcgtgtcacgagttgggtcctaggttcaagtcaaggtctagggtcgggtattgggtcccgatcctagtttcgctgccctagtccctatcctgattttaggtcaaggtcccagtttttatccggtttttggtcccaatctaggtgcaggtttgggtcctagacacgattggggtttgggtctcggtctacgtttttaattaggtttgggctcgggtttgggtctttgtcctggttctggtcctagtccttgtccggttctagttctagttgcgattccgagttcgagtttgggttagagtttgggtcgtggttcgagttcgggtcggcgttcgagtgctggtccgagtttgggttcaggtccaaatcggtctacggctgtgggttagggtccaagttcgggtccgagtcccaggtttcgatctagatctaagtcagggtttagtttcgggtctaggtcctgggttccgatcccggtctgggttcgagtataggtcttggtgcaggtctaggtttgggtctaattttcggtttgggtctgtgttcgagtcccaagttcgggtttgattttgtgttcaggtctaggttcgggttcaatccttgtatggattcgtgtccaggttcttgtcatgatttgggtccagggcaggttttttttctgggtttgggtttgggtccggggctcagtttcgggtccaagtccctcatctagctctggatccttaatacaagtctgggtcgaggttccggtctggggcccaggtcccccatctaggttcggatccttggtctcggtctaggtccaaattcagattcgggtttggatctcgagttttggtgcgagtctaggtcctagtacgagttcgggtttgagtctgggtccgggtgttggtcgaagtccaggtccctgttcgggtccaggtcggggtcccgatctggttcctagtcaaggtctaggtccaagaacaggttctgctctgggtttgggtccgggttcaggtcctgagttttggtgtaggtttgggtcttaattcgggtctgggtctggcttctaggttctgatctcggtatgggtatgggtctaggcccgtgtctaggttagggtttagggatttgggtttagtgtttatggatttagggcttagggtttaggggtaagtgtaaagagtttaggatttaaggtttaaggtttagggtttagggtttaagggttcgcttccagttccgattccaattttgggtcacagggtacgatttaaggttcaggtgtgggtctgggtttgagtcctggtctaggtctaggtccgtattcgggttcaggtctgagtcttggtcccaaatccaaacaccaccacatgtcgagtctagttcgagttctagtacgggtacgagttttggtctggttctgggttcgggtaaaggtccgattcccaaatttaaacaccgactatggggtcgggtccaagcctctggtctttggtcctaggtcccaggtccaaatccagatcctggtcaagatctagctcatgtcttgggtcgcagtttgggtctcaaatcaaggtttaggtctaggtttaggtcttgggtccgggtcccctattcaggttaaggtcttaggtccttctctgggtaagggtcccagtcccagtgcaggtcccggtccatgtttggtactggtccttgtctcgggtcttggcctggtctcggccttggtcacggttccattctcaggtcctaggtccgagtatcgggtcgaaggtcccactcccggtcccggttccaatatgggttctgttcttagtctaggttcaggtctcgattgtagtccgggtctgggtcccagtcccgagtcacgggtcctgggttccaggttctgggtcgtaggtcctggtgcaagttcgcgtctgggttcaggttttggtccgggtatcgatcccggtctaggtcctggtccgtgttttgttccacgtctagatccagttttttgtcaaggtcaattcctgttccatagtccttattctgattcttcttccgattttgggtctcgggtccgagtttgggtttggatgctttgtctagaaattattctagatttggatcttggtatgattcgaagatctagacgccgaatacgggttgggccagatcccaatctttggtcccgattacgttccacttcggatcttgggtctctgtccgtgtccgtgtccgggtcctggtctaagaccaagacttgtgtcgtgtcttgggtcccaactgtagtctaaagtccggattctagttttaattttgagtttgagtgcccaatctaggtctgggtcctgggtacaggtctgagactctaatcccggtccaggtcttgggtctaggtctgtgtccaagtttgaatctggatttgggttcgtaacctgagacccaatccaagttttgattcgggtctgcgtcacagttcaggtctgggtttgggtcttactcagattcatgttccacgactcaaaccaagactcggactcagacccaggtctgggttatgggtctgggtcttggttaggttctgggtctgagtctgggtgaaggtctttgttggagagtgcgggtatgggtcccagatcaaaacacgaactacgagttaggttcaagccccgggtccagatctagttcacagtcttgggtccaagtctagttccacttcgggtcacaggtgccggtccaaattctaggtcagggtccgggtctggggtcggattctagttctcaatcccagttctaatggtcgtgtcctgggtccaggtcccatatccaagttcgagtcctaggtcccggtccgagtgtaggacccggggccaaggtccaggtgccccatcaaggtccgagtaccgtgtttagatttgggtctatgttccgtggcccaggtcgagataccccatccaggtccgagtcctaggttccggtttgggtcctagtcccagtttcgatttcgattcagtgtctgggttcgagtttgggtctaggtctgggttgagctctgattccttgtccgactctgtgtaaagcgcgcttagtttaatttggaaatt

SEQ ID NO: 224674 - DNA, 1547 bp, Cannabis indica
atttaataaaaaccaatcaggacgaagttgctagtcgctataggcgtatcctacaagaaataactgagggtaaacgtcgttacttgtgagatgcagcctggcctgaaccccatatttttcttctattactttggctaaacccttatttttacccagagtcacaattgctttttcacctggtgacctggactttgaaattatgtcttccaagccccgtaagtcaaagactccccaagatcttaatgtcactttcgaggccgagctcattgagtcaagaataagggctataggggtctatgttggtggtgttttaagcacttgtggcatcgatcaaaagcgagggtgtcgtgttagatccgttgcacctggtgaattcagatgttatcaaccagagcgacttaccccgcgaggaatgcaaggggaccagtgatgaaactagtggcgaagctagtactagtagctcggctgggataggcgcttggagcctcgagcatatcagggctggagcaattctccccctaagagagtactttaaggagttcatcaaccatcttggaatagctccattccaattggttccaatttcctacagaatccttgcaagtctaaaggttctgtataagattctaggatgggagtgtcccactcccttggaaattgtttatctttattctgttaaggtagttccggtgaggaaacattgtgcaagaggtttttactaccttgggactcatacaaatgattgtaggataattgtaggattaccaaacaagaccgcctttgaggaagatttcttctggacaagtggcctttcccccatcaacacaaccgctttttgaataagatgtaagtaaatgtttatcttacacttggttttgaattactccatgttcataattttagcctcgctgacttatcttattttattttgttgacagcggtctcaaaaagaccaactccaactcctgagatggccgagcggcgtaggcttttgctgggtcttcctttcggtcttcaatcagccgagtttcttcttacgaagccaatctgaggtctgttggccttcttgctacaaacgagtacacttgtgattacaagtttcccaagtatacattgtgggagaaggttccaattccagctgacaaggaaagtcaagattatgtggcttgggtgcattatctccaaaatgcagcccctcgggaagctgaagaagatgcatcctgaggtaatcaatgtggatggtaccccactgttcttaggacaagatgcacttcgttagtaactttcaacgatagttgatataacttctacatttggaaccccttcctcatagattgtattacccataggtttgatagttggtatctacctttccatgttcaacgtagttgcactagttcttactatgggattgccaagtaatatgggactaacttggatagagcgagccatccagattcagaactttccattgttggaattattttaccaggatattagatctactcacacgtatgttatttaacaacctaatatgaacttctaaa

SEQ ID NO: 224675 - DNA, 1476 bp, Cannabis indica
cttgtttatcatttagttaaacacgtttaaaacagtattaataaattaaataaataaggtgcacaccacaccaacaaactagctcatattggttgaacggatgacagcggcgtgcgcatgtggtgtttaggtgagtttttatgtgactcatctctcttctatagaagtgggtaccctttggagaaaactagctcagatcggtcgaacggatgaccgcgaggtgtcaggtgagcttttgtatgattcctccctcttctacaaaagtgggtacccaaataaggtgcacaccacaccaacaaactagctcagattggttgaacgaatggcagctagctgtgaagaaatgattttccctctgtatttggttagatatcatgaggtggcataccaacctttggtggtccccaaattggttaacaaactttgtccttttttgtaccgttaggatgttccttttgttgtgtaaaagacttgattaatttgtaatgattgtacattgtattctgttgtaatcattggtctataaatacaattggccagcctcatgttcaaatgagatgagctttccattttctccattagttattttctccattagttatttttcaacgcacagccacggggcaatgtgaccatgctagggctgaaccaagccaagaaggcaataacgctccaatcacgataaaacccacctcttgttttttcaatttcttctggcaaaaagcataacagattaaaacaatatgagaccggggatggtatttcagatcagcaattaaaacttatcactttctagaaatgattagagagaactgagcgagagattgatctcatctattcgccaacgaatagcatctcatcaaaagaagacgcaaacacaaagccaagtagcacaaaaaccacacatttttagagagcataaaagtcttgaaatagtctcccacttgacagaaagcttcgtcgcggtggtcgtcgtcggcggcgccagcagtggtttctttcttgtcagactaccagaggcggaggcagagagagtgatgtcgttagagggaacgtgagagtagagtagagtagagagaaggtggtcaaaaccgatgtcggaaataaatggtaaatttgtaaacagatatttttccgtgtcatgcatgttttgaaaacaaaatgaggggtatcaccacccaaccttttggagaattttcaaaagaaaaatggtaaagggtaccagtggtgcctagcacatttctatgtgtcaatatcgctattgatcgaactaagtatcggcctccatataatttaatataatagcttttaaggagtatcgctaggcaatcgcaatgcgacatgtcgagaaggtgctaggcaccactggtgcctaatagcaatgctcttttcaaaatcataggtggcgtttatgtttttgaaattatgattcttaattaaaaaattgaaaagtgaaaacagttttatagaacatgt

SEQ ID NO: 224676 - DNA, 1075 bp, Cannabis indica
gttttaaattattttaaattattaactagtcctcatattattatctctaaactgtttgcatagaatagtttcaatgtaatgaaacatgagtctttttgctgtgttaaaaccctacagaaaagtaaagaaagtagaatctgtcgtgaggtaactaattattttttattttcctttttctttttaaatagattttggtattgacagaggaataatatgacatttgtttcttatcttctcatacatatactagtattttcacaactagaagaattttgaaaagaataatggttgtccaacatcttttcctacaaatggaatggaatcttttaaaaggtatgtatacacacataaaaataatctataaaattaatgttgtgaaaaactaatagatatcttgtaattaataataaatgttctgaaatcagccacacacaagatcagttaaggaatgtcttaatctgttttatttgtcacagttggtaaaacaactttaagtagtaacattaaattttactattaatcctatgcttcttgtgataattaagcattataatgttttagattttattttctaattggcacttaatgtgttgttaagcaggacatgttgtaggagttgcagctttagggagtgttcaagtttggactaagttttgtagattcatgagttgtttgttgaatttgaaagaagaggaggataatgaagttaaaagtattggaaaacaagtaaaagttttggaaaaatagctttgttgtactacaatcaaatgttgagcatcactagcttttgcttcaatcagatcaagaattaatgtattattattttgcatatcgcctagtcattggatatgtaagtaactacttctgtttgttagttatgtctgtttcctttatttttttctagttttaactaaaatagatcatgaacaattaatttttttagccaaaaagtagtaatgaaagacattgccaatgcatttattgaattaggcttatatattatagcttaaaaagtaattgatatgtgtataccctaccatatagctttttttttggggtttttttttttttttta

SEQ ID NO: 224677 - DNA, 2658 bp, Cannabis indica
aaaataacaatgataaaaataagaattattatgattaactatcatttattttacttcataatataattacccaattactcttcttcctattcaattgataagttgagtaaagaagttcataatcttgttaagacttataaaccaatctatgtgaaaacttcctatatttttatggtaagtttaatcacaaagatagcattaagcataacaactaataaaatcatacaaacaacctaggtactttcgtcctaaatcaatttacatttatatcaatcaaagcaatgaggcatattcaaatctcacatttcaaaattttgatttgaattcataaataaaaattaaagttaatcaatcaataattgtaaaattaaaacaaattgtgtggagttgaataaagagaagaataagaaattgaacaatcacatttatctataaaataaactcaagtagttcacataataatccttaaaagaacttaactattaaaatacattctaaaataagagaaatttaactaaagacataaaaaataaagttggagagatagaacactcttggagtcctccactagtgctttctcctctttactctccttgtacactcaaatttcctcttaatttttgaatggtgtcaaatatttgtcatcaaccttccttttataatgcaaaatccaagtttccctgaaaaaaaaaccaaggctgcggcttacaagcgatttcctcttctcttcgctaattttcacagtttctcgtttttagtttccaactataacaacagataatattatggccatagttctctcgatataactcggaattggatgattcaagatgttttagaaatataaaaaagagatctaatacttaggttgaattaagattatttatttcagtatatgctatcattagattcaataattaaggataaaatcaaaaactaagaaaattacataacactctcatctctctcttcttcctcttcgaaaccctaagaaccagcagaaaccagagcaatttcttcacaaatcaaccatttcttagctaaattaaccaagtctaggtgatgctcaagctttaaggtaagctttttcacttattcttcttgaattatagggttttaggttgagttttgttggggattttgtatgattttaggtttgtaggtttgattgagtttagagcatgttcttaggtttaattcaagtttatttgagtgtgaatttgatgttttcaaagctattaggctttgatttgagtgagttgagttcaagaactcaaaacctcactcaactgtggtgaatttgcaattttagtataattttgagttttgaatgtttggttttgttaattttatgttgttaaattgttctagaaggtttcaataggttaggaggagttttgggttggttttggtacaaaaaccaaattatctgtctctgtagtagaaatcggttaaccggttctacatggcaccgtggaatcggttgacctagtggggaaccctattttctgaaaccggttagctatttggagtgtttttccagaacttagttttatgtgttttatcgatgtttaggttatttttaagctagtatcgatatgggcttgttcggttttgagtttagggccatttataagtttaattaagttatttatcaagttaccgctaccgtgacatagggccccagatcatcgagcatcgttctattcaggtcggcctgcacacttggctctggacttgagataagaaaagtcaattgcattgcttagcatgtcaaaataagatacggtaattactattgttaagaatgagttattactccattttaaaaccgttattaggtttcttacttatcgattgcttaattaagcaatgatagtggcattaaatactcattggtaatgagggttaaggatactttataaaatataaagtttgatttgtcttatcagataaacagttgtttattataatttgattacgctttataatgtcgtttttctaagtggttatatctgtttattgttttacatttgtttttgtgttgttttagtaatttttttgttctgatttttttaagattgagattgcaaatatagctgctattacatttggtattgaggttgtgtagaacattgttagttttttttaatccctttttcctttcttttgtttgatttgttttagtgttgttttatagttgttttgccatgattatttatttgacgttgatttcactgtttttcctcaatctcacaagaattaatggttgttttccgattgtttaggtgatcctgatggttctatctgcgagtgtgaaagatgaaagtctcatttttttttagtatttacaatataaaaccaaaaaaaaaaaaattcggccgagacaatataaacgttatttctaccgtgtaacaatattttgtaaagattaaaccaaaagttagtattttttgtaagtttccctcctaatttcataatttgccattgttaaaagcccaaaaactaaaatgaaaacaaccctaaaaatactcatctcttttgcacactactattcactttacacttgtctatttcacgcagccattaacacaccacacatcaagctttccacttctccagtcacgcacacagcaagctcccatcctctctctctct

SEQ ID NO: 224678 - DNA, 3772 bp, Cannabis indica
ggccccaagaagatttaattctttggaagaattatcctgagagttctatatttagttctctgcctcaagataaataccttcataattggaggatcttgtcgagataaagcaaagacatgacgaaccttcaaagactacattcaaagattcatggctaaggccaccaagtttgaaggcctaacagaagaaggtcgatatacgaccatactcagaggaattttaccgttgagataattcttcaaagatatcaaaaggatctcaacgagaaacatgaaggagttccttgagagagttgatggtttcataatgttagaagaagctatctaggaatcccagaaaagagggcaagtcaatgttgaacagacacagggcatcatattgccctaggtgttgtctgacgtgccgaatagcgtagacaatctcagctaattctccaacaatgagaatattggaagtaagcgcaacaataatggctctaaccaacataatggtaaaaaaggaaattcaaaacctcaatgattcccttacgctatgaagtctaaaggagaaggaggagaagtgtgcacgcttcactatcctaccaaaactcccagagtaatgcatgccaaccggccttggcgacaagtgtcaccaaaacttgaagcacctcgtcgaccactcaagtggaccactgaggctcaaccaatataaggccacatgtcaaccaagcatggtcgtaaaaggccaagctctctccaatttcatgcctaaacatagaagcatatcccctaaaatctcttaaagtttgggagaaaggcatgagctagagaagaagtgagagcaagagcaagacgattcaacctagaaggtgcattattggccacctgcccgatgcaagcatgaccctcaaaacacataggggcagtggttgaatgagaaaacataggtcagactcaaagcttgtaacaatgaagtagaatatgaagctctgattgttggcttctaacaagatccaagacttgttaagtcaacgcaaaggctttaccgaaaggaaaatccccaaagatgatgcaacatccgacacactcactctactagccatttcagccttgacaacctggtacccgttcaatctttcaatgaactaagcatccctatttgaaaagaaatagacatgttggacagccaacatgggtacacctacagcaacatacctccaaacaaagaccttgccaaaaagcacgagtacggaggatagctacttggtgtacaatccttcccagcataacgcacagacgtggtatcccaataccacctctaagaagtgtgaccaagaaaaaagttgaatagttattgattggagtgaaaaaaggctctacggcaatcatgttgggggcaaagccaatcgagtgcaaaagggataaaagtggcacatcgacctgccctccaaaaggttggccaaccatggccacaataggctggtcggtcataaaaccaaaaatcttgctaaccactacctccacaggctggccagccatagcctcatccaaatggtcaagcaatgctccaatgtggctagccacctggtctataccctgactcctcctaatccgccaatagtctactctcacacttttggtctacaatgaccgaaaattaaaccacatcctgttagaaggatcccttgaagaatgggaaagaagaagagaccaagccaacttaaatcgacatgtttgttaggaaaaagttactaggtgctttaacaaacaagtcagagagaggaaattctttgtaagcaacttagtgctttgaagaacattccttgacaataaagatcatgtagcaagcatgtttggaccaaactgaaaagttccgcaccaagttaaaagataataataaaggtgcatacaagcctgggaagtacaatgagaacttagagttggctcttctaccaaaatactagaataaagagcaccttggtaagttctctcactagccaacttgtatagtggttcctctagcgattaaccgtccaggaattcacaaaagagctagtacccattgagaagtagcaaaatataaaagagctagaaaccattacttcacagaatggccttccatcacttttcagtgatggcctttgcgcagtaagctacacaggggtagccacaacgttatttcaaaagcagacactaagttgtaagcttttgtcgcacgtaagaccaaatgtgtctaaaccacttaataataaagataacttcttaaagttatttttttcgttccacatgcatacacccaatagcaccccagaaaattcccaagcaaggtctatgcaacttggtgaattacaagtgactaagagatcataagtttacatgctcagttgggaggcacccacactatacaatgcattgaacttgcacgaagaacttatgttgagaaattttaatatttagtataagctactaaacctacctttaggtcaagtgcatgcatacttcagcttgatacatacatgtcaaggcaataagaagatagccagggcaatcatatgtccatagtaaaaggctttaaggctttacaatagtagtgtttaaaaccagagtgcctataggccaaaagcaagaacatgaaagccttgaagctgaatatgaataaaaaaattgcacgacctttcatattatcaaagtatttaccaataattgttgtcaaattatttgataggctcacctaatcagaatggtggcctgcctacaatgattgtcaatcgattttttcttggccctcttgatttatatctgttgatccatccactctttaaattagtgtatctactgctcgaaggcaaagtttacagtttcataggtatcatactgatcatgatgaagaatgttggtgtgttcttacatctaccctagtgtttctcgcaaattctacaatttggtctcatcaacggtggtccttcgaggatctataactgatggatttaagtaataagagaagtcaactcagcgtaggtactagtggcgctagtttcttgaatgcctataatgaaccccgccagaggagttgtcactgcttgtcctcctaattggggacctactggaagctgagggatgactggattgggatctgtcctaattggatctcatcgattcataggagtttgaacattaggatccgtaaccattgcatcaattgtctcattaggattgccctacatttttgcaaagtcatatttgtgtatcctgcaaagattcaaaacaataaattatgatcttttgctctttatgaaagtatcaaaatatttacctcaacttttgccaatgacaatgagtcaattaaagcgattagaaacaattaataataatgattaagaaactagaacactgagatttttatagagattcggccacgtgatggtggtaatagcctaatcaccttttacttttattaacttgtgagtaaaagaacaaagaaattcttgatcttcctcgaaagctcttacaatagttttagtagcttaagtgctctatggaccgaatgattttcaatccctcaatagtgaaatggctccacttatttatagggaacaattagatcagctttgttcctaaaacaaataaaaaaaattaggaaacttaagtactttcctaaatcaagagaaaatgaaaaagggaaacttggtaaggtttccgcttttcctctgagttgatattcagttgttcagagtaacgacttgttgacgttttaaaagtttccatgcctcgtatgaagggaagttgaagaatgc

SEQ ID NO: 224679 - DNA, 1453 bp, Cannabis indica
tgaccagaggtaggagaagcaaccaacaatctgaatccctcgggactcctggatgcactcaactgtgctctcagctcgctgtgcattccccaccatgtcaacataggtggtattatcatctgttgtaatcatcatgttgtatttaatttttggattcaaaccgtccaaatatttttctttcttgctaaaattagtttgcacgattcccaaggccaacctagccagtctgtcaaactgtatcgtataccctgtgaccgacatattttctttctgtatcaactgagtaaactccttcctctttgcactacaggctgcttcattgtagtattttgcgttaaacagctcttgaaattcttcccaggtaatagtagtgacatcccgagtaagagctacaatatcccaccaaatcagggcatcctcctagaattggaaagtatcacaggtcactctgtcgtttctagtgattcccagaaaattcaaaatttgaatgataatagttagccactgttcgactttcataacatctggacctcccagaaagactggaggaggtgcctgcttgtggaaactttcatacagtggttctatttcagcaacagcaactggccccacctgcataataggggcaggagccactttcacttcaagagcaggtattgtaggagcaccttgctaccttaaacatcgaatctcttcgtctttttcattaattctggtttgcattgctgcaaacctattctcccaatcctaggcaacttgcagtgggttaatatcaccccaaccgcatgccctacctcttgggcctctgcctcgaccgcaaacatttgggagaaactaaactccctgaccaccacttgatttgaccaaattaccctagcttctcgtgttcctcctggtgtccattctaattgaacagccttcaaaccagtgagctagcctggtcagattgcgatcaagaataaattgctaattagcgcttactttagaaaataaaacatgtgcctattcaactattaggctactaacatgcttcttataaggcttttcctataacatactaataaaacaactactaaagcaataaaagcttactgaaccatgagtcgaacttgtctttgatgatgattgtacatatcgtgatgatctttgaaggataacccggtagctctgataccaaattgtaacaccctactagtttaggcgtgttattgtgattttatggtaactgtgcaatctattgctaatcaacgggtttgttggaaaaatataattaattaaaactttacttaattaacctttaaatgaaaataaataatctttgcataaactgggatctcgtatttaaaatatttacaatcatattacaaaatattagttacaaaagttttcgcctagcgactaatcaaaatacagcatgttgtcccaaagatcgtacgctctaggtctaactgcc

SEQ ID NO: 224680 - DNA, 4343 bp, Cannabis indica
aatagttgccgaaaatctcggtcaacaatgtcaaagttcaaggggcaaaaatcctaattagtctttaatataacatcattttggaagtcaaagttgcacttaataaattaataaatatgtctctgcatgtaacattattgttttagtagaaactatatagtagaaaaagaaagtataaagtaagatatgttttttttcttaatttcttttatcaatttaaaaaatctatgtatgttttatgagtttttatttaaaaagaaagctagaatggaagggttggagtggtgatattacattattacattattacgttactaacacaatttagcctaaaatatttttcaaaaaaaaacctaaaatatggtattaactaagatttgattaaaagaaaaaactaggatttgattacatcatccacgccttatcacaaatatcatttctaattgttttttttttatttattattattattattattattttcttactggaaaggcaaatacattggtataacgaatatttttttttccttgaagataatctcatctttatagtgaagattggtaaataccataactgttttacagagtatccattttgctgatatggtatatatgcatatttactatccccggaagggcaactaatacacaatacacattactgttattaaatattatcctgactcagcttttttgcaatttcatcaatgcctaatgaccccatgggaagtgaggaatcactgtcataaaaatcatcatcatcatcatcactatcatcttcataatcatcatattcgtcgttgttggtaaagatatctgcctcaccggaactatcagtctgagtaaaatcctgcgactcagctcttgagctgctggtgccatcttcacttgacacaattaaagccggataggagtgctctgtggcctgtgcaatgccctcaaattcctccactatcttcaaaagagcatcaggaccaatatcaacttgatccaacaacattgctttgttcgattcaagcgcacgcttccacagtgacagcattttagagcttgtcctaaccgttttggtgtcagaactgtcgctatcactaccggtatcagctttgcctaaccattaaacatcatgcaaaccaaaatgagtttaaggcacagcttatgaaaatgaattttacaggaatcttgttttacagcagatgatatggaattgaaggaacctcattaacttagttactctctaattgaataaacaatgtgtattttacagactccatctagtggaggctggcccaagaactatttagagaaaaaagagaagtttttcgcctaatgctcattcttaatgatgatcttatctactaaacagctatgatggaaactgttgtaggatgtaatctctcatttgatactatgtgtaatctcaatttagattccggcaatgtattgaatgtattctagcttccctctaatgcatacctgaattatcgaaatctgtcacagtttcattcactagattgagagggagagaataattgtggtacttcggtttccaatctgatcccctccacatcaatatctgttcatcatcaaaggatagcagcacacaaggaaccaactcctggcacaaaaaagggtttggaaatgattttaggaaactctactcagataaaattagcttttgacttgattttaaaaacatataggaagaaagtagtccatttgataagtaaccaaatggatgctcttttgaacattctattacatgtccaatactacaatttaaaacataaatagtttatgtagatttgtcaagttccaaatgtgaataattggctagcaatagaaatctacaaaccttaagcttggcacctaacttcttatagtcacttgtatgcatgcctctgcagtcaatcttcaccagtgggcttccttcgaaagcatgccgaacatctctcactagagagatgtagactccattcttggctgtaatgtgaaagaagaatatatcaaaatattttagtagtgtaaaaatttggatccaggttatgagtaatgacatcttctgaatgtagttataccaaacatcaacagagtcatggtttaaacatatcatacaaatcatgatggattttcaccatacaacacaagagtatgcccaaaagagttgtttttttacctaatttacaaattggcaaaagcctcttccccttcatccgcaactcatcagcttcggcttttgtcaatccttctggagcctcttggataagtttggggtaaacaggtgcagctggtttccaaatcatcacagggtactggggacgagtagcgtaattataattcctgccacgataaagataaactactccaccaaccctatgaatgattttcccaccagttttttcctgacattacaaaccaattttgtactttcttaatctcacaagtcacaactcaataaaatacataaacactagaattaccaaacggtgatttaaagtttcagagccaaaaacgcaaacctcaatatggtggcaaacattgtccatgtccacagttggaacacctttacatttaattttacaaacttcacttctcttccaatgggaatgaactagttccaacatgttatgagttagcccatctcttcctaaaccagaaaaaccaattactcaacataaggtaccttaggttggaagtaaccaaaacataagaataaaaaggggagtgagaactaaatttgatatgcacaaaaaacatagatattttttcatcttaattggaatgacctttcccatttccacccattttgaaatggaatggtcattcaacaataaagtcataccatgggaataactttccaacactttaaaatgcatgaaattttattcttttctattccattcaattccattatccccaaccaaacacaccctaagtctccatacataaagcacaaaagggaagaaatttatcaaactaataatgtgaaatcctaaaatttataaaataacctcacttagttagtttactctatgcgaccataatagtcgtacaggataatttatggtcactttggtcgtttatcgtcgctcagtgtaattcattcaagttattttggtaataaagaatttcataaagctatttttacaaaagggtcagctgcaaaaacatgagtaaacaaaccactgagcaagggcataccgagattaacctggcgattatctgatatacgaggctttacaaacattcgaatctcccatttcttcaacggttctccaagaatctcttctctgctctttctcacttttggatatttcccaaacggaaaaggccctggcatttgaagatgcttaacccctttggtgtcgggaggcagcggattaaacgattcaaagagcggagtttttcgattcttcttcttctccttggcgctcttcaatggcgccttcccagtccacggcctaggcatagtcggcggcgcaaagggcaagaacgccggttctcgaattgcgattggcttcgcctttggggtttcggagtaactgaactgaaactcgaacggggcaccaggaagctggtacgaaacaccggactctcctattacgacggaacggtcgccgtcagacgtgagaataccttctttgaccggcttgtagtagttggagcggcggtgaaccgttttgagggctgggttggaatggggtttaggggaattttgagtggggttctggggttttctctgacgagaaggaggaggagggtatttgggaattgggattggaggtgaaggaggagaagagttggatggaatttcatttgggggtggtgttgaagggagtgaggagaagaggttgtgaccaccgccttgtagtgaagctagaatcgccattaaaaccagtgtagagctttgtttaacatggaatagtttgaatgtagagagagtaataggacagaaaaggataagaagaaagatttctggtttttctgttgttgtggttgggttgggagggagaggcaaaattcttttgagcactaaatttttttttttaattaataattaatataatacatatttcgaaacgatagtgacgacgacgacgatgtgcaatataaacgacaacatcatatctgtttcaagaataaaaaaggctttttttttttttagagaaaaagcgtttatattataaaatgaaatagttagacctcatggtcgttacacaatatattgtttggtagatccgacaccgggatagacccataaacctgatgagcgaacgcccatctagccacattgtgagcggcgaagttacaagttctattcacataaacaaaattacaactaat

SEQ ID NO: 224681 - DNA, 2926 bp, Cannabis indica
ggatatctaacgtttttaaggaaatatgccgactaggagtactcaacagattaaagaatgagaatattcaacgaaaagctaaaactcaagaattttgaaattttcgcgagttagggtcaaaaaatttcataaagcatagaataagcaagatgaaagacaggcattatgcagttcaaaaagcaagcattacggacgatgaaatcgcatgaaccgtcacaaaagaaaatggcagagtttttaaacttagggtttcctacatatattctaccacaaagtcaaaggtgcattcaaaaagtaaatgtgcaaagtaaacataaaggaaatcgagaacttactcaaggatcaaatgtctagattcaggttacgccaagccaaatgagtagttttgatgaaggcacttcataaacttgaagccgagaacctctcttttcgctctgaatttacttagcaaggaaggatggtgaaaatgggtttgtgtacaaatgctcactggtatttgtaggcaaacaatgaaaggggtaatcatttcaaaagaacctcaaatgcctcgattcccccctgaaagcgaatatgggaaataaaaagtaatcaagcatagccgttaaccgtggtgggagaaaattagatttcgaaatattaattgtcagagcatttattagctgaaaccgaagggacacccagtcagcttctcatccagtcgcgaacagacgcacttgacacgtgtcacccatacaaacacaaagacagctcagatgaagtctatacgcatctttggaagtcccgtagagacttggggaacaaagcaaatgttattccaattttttcactctgacgtggcatcacatgatggtgacacatggaatcgactctcagtatctagttggaggatatagtccgaacaggatacctcatatgcatgcttaaggcaaagtaatcagcgatccgcgcagagcgaccaacacttagtgaattcagctttcgcatagagagtcaccaaggaaatacctattacttgaggatcagactacagagatatggcaagttgtccaaatcccactatcagtgtattctgtatttactatgcaatctttctgcttatatccattgttcaagaagggaagtacttcctctccaagctcatagccctataaatagtgatgcatgttcactgggcaaagggtcgaaggattttacttgagagatattgtcgaagagttcatattcagagacattgttgtaagagctataagaaaaggaacttgttgactgaggttttaggcaaccgatttaataatatatataagaaagctgtaggaagtttaatgcatggaatttttacgtggttgggacattaacgagccttagtccacgagtcttttttatttgtgagagtatttattacagagaatgtccttggtggatatcactcctatttactccctttaattcttacgagcccagaattctcgacccctctctcagtgtgtttggggggtatttatagtatttttctgggggcatccctaaaactgagtcacttgtctttctgtgcaggttcaataggggcacaaaatcctagcagatacaaaataggaaatacatgacctataccgtaggtatcttaggagttagatggagataatcttttatcccttcttgatgatgtgatccctcataaagtagccgttactggccttattaatcacaacgtaatagctacaaatgaggggttacgccgtcagacgtattacttatggcagttccaatactttttctcccatgcggcattaaatgcgagggaaccgttcaaatggagtccagtacctcccggagattccttagcatactcctagtctcctggagtacgtgaagccctctcacatgttcttcgagagctatcttcgtacttacactcctgttgccgaagacttagtcaatttctttaagagttgagcctctgagctccacgtgtcgttgctatactggtccacgtattttgtgcaaaatagagggcaacattcacccccaagccttgtttggtgtagagtaaacgaggcctgtttggtgcctccagttgtctcattgatttcctggcacgtgcttcgggcgcctgggctgcatttatgatagtcatcattaaaatttattgctttttccaggcaacgattcgcttcccatctattaatgatccagtccatttaattggtgtcagagaaatactcaagcgtttccagccaccctgattagcatttatcccaaccgttggatctgtagaatgcaaatcaatttgcgattcccaccctacgatgacgcctgatcacagctgatttacacccgttctggcctataaaagcaagcctttctccttcatttggctactttcaccactttgccattttttcacaacagcatcttagagaaataatttcacacaccatagatttcttgctgttattccttcgtcgctgccaatccaccttttaccgttgatcaacaccaacctccagtttttaacttccatgtaagtttctgggacactctatgtctttaccgcttatttgcatgctaggatagaactttgtggttaagtgttggatttctggggaataactttcactgagtctgttttgggacgtatagaatctcttttatttgtgtttcgttattttcctccattcttctttgcaatcgacccctttgttgaaagatttgtaaagggatatggggcgatttttgttcccacattctgcatttttcacttttcttctgctttcgctgcctttgggatttttgcacacgatgttcgctaaggaaaaaccttttggtttccattttggcaaacatccggagggggcctctttccagcggttaggggacccccattccctcttttaacattagggtttggtttgggggctaactgttg

SEQ ID NO: 224682 - DNA, 13832 bp, Cannabis indica
taaatttctagcttcgtcactgcctatgtaggcccgatgtatttttatagttagaaagggataaaagttgaagacgatagcctgatgtaagcccgatggtggacttgatgggcccaatagtgtgcccaagctttatgctttttttcgtaaaacccgattgaaccgatgtatggtctaatatcttgagttgacacgtccaatcaggccttgcatcgaattatcgagcccagcatcgggcctacttcgagctattgtcttcaacttttatccctttccaacaacaaaaaatacatcagacttgcatcgaaccaggccacaaactcatattttctccaaaatacatatccgaccattctaactctaaatctaatccaaactcaaaattcaaaattcacagagctttaaacctaaatctaaataaatatatcaataattttatatattttaacccttaatcatgcaaataaaattaataagtacctttgacgagattgctgatagaacctacccacacaccaagcactatgtcgtttacaccattggagctgagatgaagcaagttcgaaggagcccagcccagatctgactgatcacgacccagatccaactgaactcatcctaaattcatctgacccctgtccaaatccgagccctgcccaaatccgaccgacctcttgtgcaaataatttagtgaagaagaagaagattgggaagttacctaaaggaaataatttaggggagagatttttaaaaatatattaataattttaattatttcagttattttttaatttttggattttattttgatttaattattttaataatatttaaatatgtataattatatagatcaatatgaacgcgatacctgtatatttgtttacgtgtgagataattcatgctggcacataaccactgttgtagacgacaccatgaattttccaacattagtagaggttggcaggttttcttaccaaaatttaaaattagaaggttaattacaagtgaattgagaattcagagagtttagccgtaaattactctaaaagaattgaagagaaattttagacttcatttaaatagcgtgtagaaataagtatatattaaatagtgtacaaataatttataaaactctgtgattcattaatttgtactaattaatatgaaaaaaatatgactaaacatatgcttaagttagacaatgaattatactgatttgaagagttcccaacaccgatgaagtattcaaggaaatatcttaatgtgattcagatcacaaattccaaaaataaaaaaccctccaaaatcctttccctttctttgtatatattatggtcgtctaaaaaaatttgtacgagttcatttatttttgatcgcttaatacaagttatgtcattataatgaagcacactaaaatgtgtatacttgtagaagtgtacaggaaagcccgtgaataattaagttgctagcttatgatcatgttattagcatttatacatgaatgcatttagtccaaaaattttaaacacatatatattatagttaatataatctagctaggttaggtaattagtaataatggagatatagaagaccatgctattgtgaagttgtgatcacgttcacacaagtgaagagcatctaaaaccaagtatttaaaatgtaactgtcctaatatatatgtacatacatgatcaacataccgattagcccagaaaattaatggtacaaaacgaagagctcgtcctcatcatctacaataaaagattcggataaagataataacaaccaagttttgaaatacatccatatataatatataaaaataatgttctctaaaagttgcatgcataatattaatttcaaacctaacaaaagcaatttaaacttgctttttcgttcaactacatctggaaaaatctagcacattcacgagttcatcaatccaagcttccattgataagtgacctctaaactttcaagctccacaaataaaacatacaactactccacagtactactaacagattagatcatatagagtagagccacactataaatacacatacatatacgtagttattttccactataccattgatcatatatgcacatgactctataaccaaacactgttcaccattgatcataatatactattatttccttcactacttctttctcttgctactatggcacctcacggagaatcaataatcccaagccctaacacacctcctactccaactactttctcaacccggattacagccgggaacttctccaagccgccaaggcttccatctgagagtctgcaccgaacggtgtcagacatctcgtttgagcttagcaaagctcaagaggcagcagcaatggactttgatgatctaccgccgatatcggaggtagaggatgccaagtgcgagtgttgtggcatggttgaggagtgtacgcctgagtacatagagaagataagggaaaagttcttcgggaagtgggtttgcgggctttgttcggaggcggttaaggaagagcttcagaagaagaggaacgacaatagtaataattgttctggtagtggaaataataataaggaggttgaggaggctttgggtgtacacatgagtgcatgtgttaggttcaacaagtttgggagagcttatcctgttttgtttcaagctgaggctatgagagaaatgttcaagaagagccaaagtgatggaaggattagggctaagtctattagtcctagagatccttctaataagaaaggtgggattgctcggagttcaagttgtattccggctataacaaaggatctatacacatctacctaaaaaggggtctttaattggtcgatcagtacttattttgttaattaaccattattattttattagccccatacctatatatatttatatatatactatatgggtctctcgtacgtgtttgagtattgatataattctcccacaccgatcgagagtctcacatattttatatattatattcttggaaatataattaacctttttgttataccttgaatcaggttttttttaggttattgtccaagttattgtaccagtactatatcttacttaattttgtattcgattccctgatctctcctgagtttccaggtcatgtatgctttaaggtccattttttttggagtcttgtaaccttttttaggtggaaagatgagttttgaccttgttgaactttaaattattatcaaaatgacttggatggatggagtttgtgggtatatgtaaccagctagtttatgtatatgtttggcttattagttgtgttaatctcctttctaaaggggttttttttgctttaattagtgatctgaccacggagtctttatttcttattttttgtttagtttgaataaatgaaaatattgtatgcgattgacatacataatttgaagtttcaataaattttttatcttattgtcattaatacattaatatcatgtatggacattacttttgttaaattttatattagaagggtcgaaaagagagcatatatactcatataaaaccaataattaatgagtacactaaaacagtagataaaatacaccaacaaccatgtctattgtaatataagggcgtctctaaagacatctcaaacgctaccaacgttagtaagactcattttcattttattaaattttaaatttacatgctaagctatcagaaaaaataaataaataaataaataactatcagtgctcaacagaagcaataaatgaatctacagccatagcaacttcaattggagatgtactctcaaattcataattatgtttaatgttgcctaaaaattgtaaacataatatttaaccaaaagtatccaatcacaaggataaataaaataaataaataaaacaacacctttgttgaaaagtcaaactgtaacccacttcgtgagtgaagaaaccctaaaaaacaacttccattagagctgctataatgaatcaaggccggttagcctcctcaatcttccacaccaatacactttgaagttaaattttcattataacaattccgttagattaatttttgtttccacaaaccacaaaatttgggttaaaaaacttcttttatacattacgtgacaattttacatttatttcaaataaaaccaactgttcggaaattggaatatagaaccaagagtgaaagcgagataaagaggacggctagaaatcaagagagagaaagaaaagtcgaggtggagtgggtttgtgggataagaaagcataaaattttggtttgcttttcatattatggtgatcttttaaagaaataaaaatcaaaaatttataccctcgttaagcgtaaaagtgaaaaatgaaactcttcttttttacacttcaaaaatttttagtttcttatttcacattaacttaattaatcatgtttagaatatttaaatattatccacttgtcaaatatttacataatagaatacaaatataaatgtagaaatcgacttcggacaatcctaagttattttatcaaatatggcaacaaacagtcaaacaaaaatgcatcacacagtaaagaagatgaagcaaagaacataacttagtcgaaacatcacaagataaagagtatcataaagagtgttggaaggaactaaatatcagtctcaacatccaaactccaaactaaagcaaaatatccaaatgaacataaaagacaaattaaggtttctatcctttcttaaccctataagctaacatagaagttcagccactcggtctgatatctcacacaaaagaccagttcataaacataaaacagatacagtgtgcgttctcctcctcgttcagcactttccatgccactgctctttcatacgacactggccgtcccatgctcgaaaggcagattcccccctgaaggcaagagaaaccctacagatggaaacgcataaaataaacatgtaagttttaatgtcaataaaccatagttcaaaaaagaaagaaatgagagggcttgacctgctgcattatctgagggaactcagagcagagagtcttccgcccatggtcatcaaaaatcttttccaaacaaatatcttgcagtgcaaccaaggtggtttcaagcatgtcaagccccgcctggtttgcgaaggtaaaaactggtgatgcctgcataaacatcatgcaaaaaaccaaatttcataagcaaggaaattttttgtttcacacaataagtaaacccaagtactatgtttgcacacaatatttttctttcacaaattactggtacactacattagattcctggttgttaaatttctcacattgttccttgcaagtccccaaaaaacaaatccaatgttagagtaacagcggaatctaagtaatagcagttgtactacaaagtgtaagatcccaatacccaagtctagtttaaggtatcaagaacctgtatcagtgcatggtggtggcgggggtgggtgcaggggtgcaggcaacagaagagattataatttaaaaaattatgcacataccttcattgagcaacacataacagcatccgagtgatgccacaaggttttgagaattgtttcgcccccctctccactagatttaagtagttccacacccaagtagcccctgtttaacatagaaataaggatcttagtacaagagcttctactgcactgtgcaatgtgcaaatgtaaaacataaaatcacttacctataactgttgcagatccaacgagcaagggtctgtgcttcaggagtaccgagtggtgagcgaagaccagcctgtgaactcaaatgtgaaggcgacaatgctagtgcaaccctttgaactgatgagataatgctgcggacatactgcctagccatggaggctacatgttcttgcatgtggctttcaaatgcaaattcaaaagcaatcgtcatcactgatctcacacaaccattgttggcagaataatcactagaagctttagctccatttggcccaatttcaagagcagaagccaggtctagggtgcgatttggactggaggcttcctgcaatgttattaactgtattattacctgtccaaaatgaattaaatagttcttacagagaaaaattacaagactgaccttccccgaatccaaaggaataattcggaacccagatggcagaagaggtgcatcatcagcgaaagaagcatcaattggagcaaaaattagttcagcacaagagccaacagcattctcatccattccactgcagagctaatgaaacaagaaaacgcagtaaaattaaggaggataatcagtaacatacatgacaaacattacagtagagaaactagaagtaatagaatcagtaatatacatggcacacactacagtagagaaactagaagtaatggaatcagtaatatacatggcaaacactacagactacagtagagaaactagaagtaagcacattgccgataataccagttcaaaactccaaagaacagaagcaaacttatatttactaaacaagttaaacagaagcaaacagcatcatgccatcaagcagttaatatcaaaattgaaactatcatgccatttatcagttaatagaaaaacttacttgcagaaggaacatttctctaggcatcattgcatcttcaggagaatgactaacaccttccaacttaatgacctccaagaactacagcacaaaatcaaaagaacaacatatgttaaggtcttcgaataatgtagcaaaagaagataatataaaatgaaccaagcatttctgaacttacctcatcatgctcaatagtgtgtgccagaggcagtataacttgaccaccaaaactaccaacccgagaacctgctaaactacaggggcccactttgacagcggcagcagagtaagcatcaatgttattgtcagcccattctgacctatgctctcgcaggaacctaagaaggatagcaggagggacattctgcgaaataaaagagaacagttgaaaataaattacaagaaatgtcaaaaataaatggaatggtagccaacaatgagttcagagagaacatgaaaatacttttaccaagtaacaggcttaaaagcgagaattatatattcctaaagatgaaagcctacatatctgattacttttcacaacttgcctatctttttcctctagccttaagttgtggcagcatatataatactgaaaatccaatacattggtagaggatgcgggtgagggattgaaaatgactttctctataagatgagaggtctggtaatatataagcttaaggtaggactagagtttccaatatatacaatatactccatgtaaatattcatacaattaatataatgtatctgtagttcaatcctcagtaaaaatcttatcaagtctcaatagtttatttaccatcaacacatttaaagttttgaaatatactaaaaactaaatcaaataaagacaattgctgtatagtctacttatcatcaaatatttttccctctgttttccttaaatatatgctggaaaagcatagcaataaataaaaaaaatactgtgaggaagcctgacctgtaacagcatagatgctttagcacataaaactgcgttgctgacagcaggaaattcgttctcaaaagaaagatttaagcccattagtttgtcgggagatgagttaacaaggattgtaacatcatccatgccatcgtttcccatcattgaccacccctcatcagtaaagccattaagtgcctcattaaaacccctgccagttaagattgattagatttcaattgaagggaactataactgtatggtgtgagtcgtgtgacaaaaactataaaagaaataagccaaacctgcttagcctctggctcaggactcttagagcagcaggacgcctaccccagcctgtgacactagactgagaaacctcatgggctatctgtcttagctgccttaaagcctgaaaaagaatacagtaacataacagagtcagaaagaatatctcatacttaaacaatcttagggagagttataagaatcattctgaatccaaagaaaaaatcttactgccattgttgtcttttgagcaagaactgtagatgattcatacagcggacgcaatacttctggcacactccaaggctaattatgatttagaaaaaacaaagtttagtgttcggtattcccaatctttacttcagaaaaagattgcatagaagaaaattgtccaattatacaagtaatgtaactcagtcacctccaaatccatatgatcaacaatgtgtatgattgaaccacccccttcacaaggccgaatgaggtatccactaggcagcatctcggccctaacaaaatgttgcacaggaggcatggctggaccattttgagtatttttaagagatctttcacaaacctgtacagtatatcaaattaaccagactaagttaaactgataaaagcatttgcacatccaaagaaatactgtcaattcttatgtacttcacaagatatcatagctgaatataatttcttaccacaaggctgccatcttctaaaacagaagtatatcgcaatatccagaaatcgcgagcaggcgccaaagtagttggagcatagagctgcatcaataaataacataattaattgtctagcagtattctgataaaaaatgatagcttgacaagaagagttgaacttacctgcaaataaagcagctcaatggttccaccatttgcggttggcagcacgttaagaacatccacggcacggcaatcgcgaaaccacgatggccgatccttgaggatttcagcgacctggaatgaaaatagactgtcagaaattttccctcttaattatcttatgcgtaagtgagactagaagtaaagaagaagaatgtctgaagctacatgaacttaccctcgtaggttctagacccaccaggccgcaggctcgtgctgccactccagtgcaaccatgagaaatagcaacgattccaatggaatccggaccaggctttgtacatcaaaatatataaacgagataagtatttaatcaagttatcactgtaatatcaatgatccagcagagaaaaaaaaagactgtaaaatgaatgaaaaaagaaaactaagcacatttgatattataattgacctcttttctttattaaaaaaaaaggagtttgacactgtaaaagtttaaaggcgtgctgatgtttacgtttcccaaaaataaaataatgaattcacgcctcaaaagcttgagctttcgttaattatattttaagatttctttggtgaatattttaagattaattaatgcattaaaaattgcaaaaggtaccttcattccaggcatttggacccactccacagcagttccagtagcctttgaaagaaactctgctaaagtttcctctgcaatggacaaaagcctggaaacatacaaaccagaaatcgataagctaaatacacacaaacaagagttgtcacaagaaacgatgactgaaaaggacccaacaacaatatgcgcactaaccctgcaggactagcatctctcggcgggtgctgaggggtcaaatggtgttgaccactcgtgaccaccgattcacaacttgtatctttggttgcaagcgttgtctgcaaattaaaaattaaaatataaataaaacattctataacatcaacacccacacgtagtacaagtgagtacttgtgataaataaataaatgcataaaggcatatgtgtctctcacgctttgggtatgctggcggaaatagccattttcatacaccaattgcgacacctgcttctgcaacctatcattctcttccattaatagcttattcatagcagtaagcttcctattcacagcttgaaggcgtgacgcttctttcctttgtttctctctgcatctgtatatacaacaaacgaacccaacaaaattaatggaactaaataaactagccgctttgactgaacaaacgtaaagatggaaattttaaaaattcctatctgaaaaataaatataataaaatgcatactctggaacccagaattattaaatctttaccaaacgagatgaccacgttatggtaagggaaataagaaagaaggaaaaattcgatgtgaaaaagagaacaaactaaacatagaaattttaaggttcgatgaaagaaatatcatttcaaaacagagaactagaacaaactcttatttacgcatccataaccaaagtatgaagatccaaacaatgaattgttaccttctactactaatacacaattaaacgaacaaaaatattttttaaaaaaaaaaaagagtattaaaggttgtaccttctgttctggaaccagaccttgatttgtttaggctcaatattagagagaatagggcactcccttataagctgttggcgacgaatcgaactgggtttggggcaatcatgatagagcctttcaagggcttcaacctgctcaggtgtgtaccttacatacttaccgttatctagtcccggtttaccatccttgcaggacatagccattttcagttctcacctcaaaacaccagacctaaactaagttgtttctctccttgggaccaacttgtaactcttaaaaaagcttcagagcttgaaagaatcaaatgggtctgaatcccagtacagaagttagcagagcctccacgtccctaaatctttgagctttcgtacttaaattgttaagtaaaaataaagatagtgataagcttagaggggacagcactatccttaactcggagacaattatcctggtttcccgaaatggtatagacggcgccaaatacaaaatcttcgagatcagagctcagtaaaaccaacaactaaacctaacaacaaaaccaacaaccacgatctcgttcaaatttagaaacaaaacaaaaattcccaattcgactcggctaatccgagcgattccccataacttaaagcgatgatctctgaatcagcagcgaaaacgaaagcttcccagcaatctccatggcttctttttctttcacgttcctaaaagaagatacatatttctagggtttcgaaggcatagtagatgaaagaaagggtatgtatggttttgggagaagtcaaaaaagaaaatcacgggtgtgagattttgtttcttcccagaaaaataaaaaggattcggatacagatacggattcggattcgggcaagaaaaacaaaagcaagcgatgaatcagaagagggtaagttagccctagttcgaggcagtagagagcagtggagaagacaatagaaaagaaatgaaaaagtagtagttgttgttgtctgtgtttctgattattggttttttaatttggtgtttttggattttaggtttcattatttctgaaatctatctaatccaacgttgtagttgaatttgatgtggttgggtgtttgggtgtagatggtgttggttgctaatgctattatgttattgccttgtttttcattggttcgtcactttcggctcacactcttttcttttcttttctcttctttttccccccactcccactgtacacccaaatgttgttactgctaaacttttctccctcctcttttattatattattatataattttttaaaaaatattcgttttcttggtaatttaaatctttgcaatatctgaaatacccctatccaatgagattgcccccaccccattaaaatatgtactattcacaattcaaaatttctcatttatttaagattacaattgtattgtttttacgcggtgcacaagaataattaataataatttaatagaaggaatgatatgattttatatgccagaacttgattagttgttttccatctaagattaaaagaaaaagatggagggctatttctgtcaaacacgagtaacgtatccagtaaagggtaggtgaaagatggtaaaagagtggagttagaagggcattaaaggaagaccatgcgcgaatcagcagctttaaaaatacaaaaggcatgagagagagaagagagtttttgcgtgggggcagagaaggacaccatgatgaggttcttgcatgcgtctcggttttaatttcttaaagctgataaaatattattattattttttccccataaacaaaaatcatttaaaattaataatttattatgctacgtcatcattaccacgctgccaattgtaattgtattattatctatacaaatatacatgtatagtaattctatatacttacatagatgacatgactttgatatgacacgtgtgacacatatgagaatggtgatgggatggtgggtgcgtgatgtaatggactcatagggacaattacgggttagcaatagcgttagcggggcttatcctcaatcgcggctctccaaagctattaaatttaatttaattaatttatttaaccacttaatcagcccaaaaatctccaatctaaatctaatcaaattaatcatactattgctaatactgtactatacactgcccaagtctacctaaactcttcttcgtgatcatcttcatatattatggtcttactgtatatatgagtgtagagcactccatctttttttaaatgctttgtaataataagtctttgtatttgtactataatactattatggcaattaaaagccactaatttaatttccttaataattgatagtcattttattgaatttcattagccacataaattaattatttgattaatacgattacgaggagatgccttctagtaaagctttagatccactatgccaatcatgggctatgagctgtttttattagtactactatttataggtgtatattgatgtaacagttaaatcacttattaatatcttcattcattaatttgcctattaatataatttccttgctatttgcttgaatgtatagttatttcatttttatttttctttagtaaacatatagataacaattgttttaacttttaacagactagtaaacatgcatgcaggggtggaaagtatacacgtatatatatacaaacatgatccctaaatattaaagttaattattatcaccattcagtatatattcactagataatttgtcttttactattcaaatttatctataataataaacaacgatagtgtcagggagaacagaatattaatgcctgcatctgcaatcaatctattcatgtatactttctttttttgaaaaggaaatatattcatacttaatgctcatgagcaaaaaatctgttcatacttaatgtgtttgtcaatatatgttcgtcctattatataagatcgatactaaaaaaaataccttaaaaaataaagggtagtgcaagtgcatacactccctaaaaatttagttggatcatttcatgcaaaaattgtgctagcacaatatatatttttttttcccatatatcaatttttaatattttactttaatatatagttgtaatgtttaatataaaatttaatatttttattaaaattgtaaagaaagaaataataactaatttattattattgttttaactaatttattattattgtttattatgtaaaaaaataaaaaaaataataataaataatttatgattaatgttgtagttaatgtatttacaaaataataaaagtgtcatcaaagttaataataaaattgtgtattaaaagtttggctaattatgatttttactccctgaattttgacatgtaccaaatcatgattcctgaacttttaaggtcgtcaaaaatacccttgaactactgagattgttagatttaagga

SEQ ID NO: 224683 - DNA, 1565 bp, Cannabis indica
ttctagatctttcaccacacacagattaatgtgagctagtaggataatagtgtatatgatgttcttgatttaatctcaacacatgatcaataattatttctttagtgatagagagaaaaaggtttactagtaaaacctttttcgactttcaaaaaagttacgtcaaaaattctatatcaaaagctacatagaaccttgttatacaatctatttaaataaacccaataaatgttttatttaattgattatttaaatcaaattatttattaaatcatatttaattatttgaataaataatataaccgaattcagtttagatatttatatcttataactgattgagggaatctcttaaccacttgagagaatatatcaagtattttttaaattcaaatacttatcatagaaatttaattaattaacccaaaaagacaaaaccaatagagaaccctacatatgttgggcgcatgcactgtgtctagacacagtgcatgtggaacctccctctgtctaacttaagacaagggatgtgccttttgtcctgataatttttgtcttttccctatttaattaatttgaaaaataaattatttattacaaaaataaaaattattattttgatagttataaatagatttttctgaacttccatacataacttttatctcaccccttgatagtgttttaaggtggcaatccaaggaccatggactaataattctatgctccaataaactaaatttatttattgaatctcataaattaaataatcttgtttattaattctatgattactccattataaatatggaaatgaactcttattaattatagaattatatttactaagctttactgcagtgtccattgatataatcaattccaatgactaaccttcctagtgttgattataattagttttggttaaaataccaatttacccttctaattactttttatcctttagtacctttaattcacttgtgaaagtataatctagatccaatctaaatttatgcgtaacttttcaattctataattaacacataaagggaaccaacgtttgatccattaggaaagttaggattccattattgtagatcatgttcctagtcatccatattattaggtttccaaaatcgaagctgtaagaattatcttctataagaaactttaacgagtgaatcaaagaaactaatagcatgaagaggagttcgtgattacttaagatataggcggatctactattgatcatcattatgatatgaattaggtctttatagtaaatagtaagtttgataaagaatgctttattcatattgatccttgtcatataaaatctctattatatacaacacattcacttagatttcatgctacattagtaatctaaattgagcttacttgcactgaataatgatatcagtgaatcgtactagcaatcattgattaaagatttctaaactttaatatggttttgactgttttattcatggctaaatgatcttaattctgcatacaatacaaatcaaagcctcatgcataaaacagtcaaaaccatatta

SEQ ID NO: 224684 - DNA, 1232 bp, Cannabis indica
tttgggtagaatgactcccttatccatatgccaaaaggtggtcaacttcttcatcaagaacttggtacctcatggggtccattttgcggcgcttctatcgaacacctcgcacttctgggtcaatgttcaatcgatgacacatgacctgcggtgatattccgaccatgtcaaaatgtttccatgcgaaaaacatccaaattttgtttgagaaaagtgacaagcttttctcgctgttgaaaggttagtttagatccaatctttaaaactttactatgatcaaaaggatcgattggtacctcaatggtttcttcgacagcttgtgcagtattggtgtaatcaaggatccatgaatcctaatcaggtttttctacatgcaatatctcctcaattctgaaaatttctcgtcgaggaggtggtgcttcaagtaaatatatcacatttaccgatttcttcttttctgcgagcttcagtgctgtgttatagcactcccttgaatccgattggactcctcgcacggatcccacacacgtgagggaaaggaatttcatcataagatggtagatggaggttattatcttcatatctttcaaaatggggcgacctatcactgcgttgtatgtggaatactggttgattattgtaaaatcggccattgacttggccgtgacagggtcggtttccaaggtaatttgtagcttgatcattcctttcagtgcaattgtatctctagtgaacccatagatactcgaggttacatgttgcaaaaccttctcgtgcaaccccattcgcttaaaagcttagaaattgagaagattaactgaacttccattgtccactaaaattcagtggacattatctcctccaatatttgtgacgatcacgagtgcgtcagcgtgtggatgatgaacccacctggtgtcagtctccatgaaagttatgtcatcgcattccttcttgaaaacttcttaggtcgctcacttagattatttacattggttattggtttttcttttgcttctttggcatatcgctcttgcaactttttaaaatctccaccaatatggggtcctccaataatagttaagatattgtgaggagttcggaaccacttgcattgtttgtctcgtcattctcatccgcttggggatgagtttctccattttcttgcacttactaaattttcctcgtctgattcattctttgattttgtcctgtaggaaccaacattctag

SEQ ID NO: 224685 - DNA, 1502 bp, Cannabis indica
gcattgtagaattttctaaaaatttaatatttccatattatcttacttattttgtttctatatgtttttgttatttttaaattgtagtttaaatgtattttttgaatttaatattaaaaatacattttttaaattaattaatattaaaaaccaatataaacttaaggaaataaaaaagttaaaaatttggatttaaaatcttaattacacttaattaaacatataaataacagcaaataataaaatcaaaataaaaaaaaaacatttttttctttctatctcactctctctcctctttcttctccacttttttgttttgaaaaacatttttctccactttttatctttgacgaaacttggtggggagatgggactctattagtgaatagtgaattgaattctttattaatgatcaaaggggtatttatacagttgagaaatacaacaaactccagctagtgacaacttagttaggaataactactataactaactgtatataatagacttacaacaaactctacattaatatctctaagactccccctcaagatgaggtgtagagattagtaatactcatcttggacaataaattcttgaactaagaatagaagagaagagagtcttggtcatgacatctgtaatattgtgccaagagggtagaacaacttgattcaatttttggtgacttgttctcgaacaatatgacaatcgatgtcaacacgcttagtacgcttgtgaaacatgttagagctgttggttagatcagttagttagttactagtcttgacagttagtttgttatgttgagctgtcatgttagttacataactaactgattagttgttatgagctgtatcaactgattgtctcgtgttcattgtttcttgattgtataaatactcttccaatacacatttaataaagtgactctttcttctacctttggctctctcttttctctgctttctttctctgttcttacctttctttatgttcagctatggctagaaggtttaatatggtatcagagcaattcccgccccttgtggcaaacatggcgaccgtgggcaacaatggtgctgctgctgctggaatcaatggtgctgctactgctgctggaatcaatggaactcaaacactcaacaggcaacgcactaatcaagatcctgtgttcttcaatcacagcatctcaattcgattaaacgatcataatttccttctctggaaacagcaaatccttgctgctataaaaggaaatcgattgatgaagttcattagtgagccacctccagaagagttcttgaatgaaggagatgctgcagcaaatcgtgtcaatcctgtgtatactgattgggaagttcaagatcagctactggtttcatggttattgtcatctatgacagaaagtttgctaacaagaatggttggatgcaacacttctcatcagatctggaaagccttagaaaaacacttcaccttgaaggtttcatcgaagatct

SEQ ID NO: 224686 - DNA, 1919 bp, Cannabis indica
aaaattccacagctaacgtcatctatcaccccttgtagatctatttggatcttcaatgtatttgatgtggccaaaggaacttctttcccagtgtatattttccaagttggcatcttgaacttggttggtaagggcaacacattgatgcacgcagagaaaggtgaccctcgagccctgtcaagttccaagttggaaagtcttgggccggacaggccttatattaggctcttgagttaatccaactgtacttgcattgtaggatccactctggtcgttccttgtctggccaacccttgtggattgataggaagttatttattccaaggcaggatgtttccgtcctgattggttcttcttcggttcaaataattttgaaggtttacttctcccctgggacctattctatcaaagatagaatctttgggcattgggttagaatttttctgagtatttcgaggaggaatgttgttattacgccctctattatcattgcgctatctttggttggtgcacccattaatagggtagctagttgcaccatccccattgagattggggtcaaattccccactgtgagacctactttggccttgcctaggtcggatatcttcatgttgacttagaaatctagactagacttctaagccatacccgctcgctaaattggcgagaatatgaaaagttgcataataattaacgagagacacaataatttagagtagttcaccccttatgttgcaatagtaatggggctatgtatacttcaagttttgatttctcatgagatggtaattgcaacaactgtttaagtatcagaaactccaaactcaagagagagaagctctgaccttgtgggtagttttctaaatgtgaaaaataaactaacagagctgtcttttataggtgaaggaggcccacaaaaataggagataaattataaatagagtgttttctaccattgatgatgatctaacggtgaaaattagcatctagtagtgatggctgattttttattgtctagcggatcctgttgcgagttaattagagcttattttgtaactcccttagaggtgaattttggtgacaatagctttagaatttggactagtgtgtgaggcaagacttgatagtgggattaaatatcttaaaaattctggttgaattgcatcaattggatgaaaattgagtgacttattgccattttactgaaggaagttcaggtttcagctcccaggttgacattccagcccccatgttgacattccagcacccaggttgagatctgacatcaacctggacattgtaaaagtgtagaaatgtccaagggaagtcttttaagatgcctaagagatggtttgacacccctttgtccttttatatgtggtgaagctggtcacacattcttggagatgttcctattttgaaaaagtagaagactcgaaacttttagctttcgaatgaaccaaaattaaagttatgaatttagttgacctgacttaatggatcattccacttgtgaaaaacttgacaaacgatcaaaacgacatcagattcggataagtaaaacctagagaattaggtcaaatgttgacctgggggttagggcctttaaattgagatcccaagattctatttttgatacttccaaggcttccaaggcttctgaacttaaggacagggtccccccccctttctaaccatgccaaatttaatggttgcatcagccttggcattcgagcaattgaaggcaacatctcagatttattgtcaacctgggcactaggccttattttcagggacttgggattgtggttttatccctgagtttagttgaatctttgttatttttgatgatggtgaatatttttggagcacttttcacagatttgaatcggaaacattccaggtagacaaaatgt

SEQ ID NO: 224687 - DNA, 1996 bp, Cannabis indica
ataggaatttcctatcattttggatacaatcagtagcaagatagaaaaaaataaaaccaaacagtagcaacaatgaaaaatagctagtatattgatattagagtgacaaagagaacaagttgctgggtattcgagagacccagctctctcccaaagagctaatgctcactttaacaaattaattctctcccctcttactctcactactcactcatatatatagcatcaatcccttccattacaattactcaattactctttttatttattatcctaaggcctaacatcctcctttaggctagcttttaagaattgagttctaccttagtggttgtatcaagtggtatcaaagccatgcaacctcaagtagggccgatgttgcggaaggggcaatatacagaacaagcgacctgtggattagatccagaataggtcaccatagagtgggctaccttgaacgtcggctccaaaaggcggtgtaacaagatcccacattgatcaagtatggaaattagttagcagtatataactacttaggtactctcctcctttaggcttgcttttgagagtaagttatacccaaatggttccatttgttttttcaaaagtgaagatcatctatgtccaaaattttagatgttcagcagcataatgtgaatttgattccatttattttcagttgattgactactttctctactgagcatgtagtaatgttttacaatatttactctatgtttggtagagaagatagttgctatcatttaagttgtttggtagtgtaaagttattgagaaaaaattaaaaaaccataatattattcttctaaacataaagatttatccctttttgtatttaaaatattttatttggtctttctcttggatattctcaaaatgggagggagaatgtctctttcttcctcctcttcatccactcatctttttctcctaccaaacatagtactaagtaagcataaggaagtaaaattgtatagagaatttgatttagtgatgaagattaatattgtgtcctaatttcccatttaataatgtacaggaagaatgtgcaaagaatgagagacttagaagcatagcttcataagttttctgtagatagaaacatatctgacaaaagccatgacaaaagccatgttgatgagctcataaatggactcattcctattgatatatcatgaagatgtgaagttttctttttttgtttttcttttgcacaaactacaaaaacaattattctctcttttcatgtacaaaaacttgtgttgtgttcattttttgttttatatatttactcatagaaaagaaaactacttattaatttatttcttttggctgttgagagagagaaagcattcttcattaaatgctcaaatagcatctacctcgaaatgatctgcaaaagtgttttggtaccagtggccgagctagccacctattttagtgggggcaaaaaaaattagagtactaatattgaaaaatataatttttagtggcataaatataaaaatattttattggggcaaatgaaaaaatctataaagatataaataaaaaaacattaattttttggagacaaaatgtgaaatattcaaaaatatgtatataaaaataaaattaataaaaagttaaggaagggcaaatgacctcacatgtctttccttggctccgcctctgacctgtaccccactcactacacttttactcaaagtcaaaactcaaagtattaagtttgtaagagacataaatttattatttagtgattttttttaatagcataagtatctaatgctaataaaagtataatttttttctagttatattaattagactaagattctatgtttttgagtttagatgaaataggtagtatgaatattgtctaaattttcttttaataaagtcaaaattgagtgtattaagaaattgaatgaaaattatacttttaatcttttgtaaatattaaatacttatattaa

SEQ ID NO: 224688 - DNA, 2237 bp, Cannabis indica
tgcccaacgttcaaatgaaaaaactttcagcaaggtactatggacctttccctatcattcagcgagttggtcttgttgcttacaagctccagcttccagaccaggctcaccttcatctcgtcttccacatctctcagcttcgtcgagccatagggtcatcaccattcgcacatactatcccccctcaattaacaactgatttggagcttaaagtgcaacccgaacctattttggacgtccgcttccctactgctgctgctactactccctctgaatcctcattaaatggcagcacctaccagcctttgaagctacatggggagccgattgccaccatccaagatcaattcccttcatttcactttgaggacaaggtgaaggtatttttttttggggggggggggtattgataaagccccagtaacttagtctatactaggaggccacgtgttgaacataagtcaaaagtgtaatcggttaaaagggcttgttaagtatgtaagggtcttttagtatttttatcctttacctttcttatttgttttagtggctgttgtactaaggagggaaggggttgtaatttgttgtttgggccaaatcctataaataggaggctgagaatctaacttaggacatctgggaatttagatgagtttttgactcaattgggagagaccaccctctcgaatggttgaattggagagactagcctctcgaaagttaggtggaatattggccactaatatcaataaagtaatcattctttttgagggattaattctctggtgtgtgaaattatagatagaaacattctagtctcaagaaagttctatcatatcaaggcaaattttaagaatagcattcttttatctttaatggtataacatccctatattttgccacctaaactttccaccttatcaagcattctccaaaatattaccattagagatgctctaatagatactccaaatgagattgcttactagacaaaattgtatttattatttttaatagaaaacacttttttttttaaatagttgacgatttatcgtaattcactccttgtatcgtgacagtaattgagctacgcctactacgggttttatttctcacgggatggattacataaaaatgtctactctggatactctaatttcttaaagggaaactagagagagatgccttgtattttatggacacttttttgaacttaaaaatgagttagtggagttatgaggtcttattaaaataattactaaaatattccaaaaaatacgaaaaaaagagatttaggctatttttaatcattggtgatgatctaacggtgaaattgacttcagacgtcagtcgtcaattttcagagtttgagttgtgtatgcgagacctgcttcatgtaagttgtagcttaaattcataactctcttgagggtgaaggttggagtcgataacttcagaattgcgattggaatgtgagacatgccttgatagatcatagaaatagctttcaaatctaagtttaattgtgtcaatctaatccgtattaagtgagttatgcgggtcagttagtgaagatttttgtacagtctgtttagtccacaccatcatcctacgtgtgggtagaattttattggaggtgtgcctggcaatgatcacgacaaaattggcaacaggtctgcctatagcagcagggtttgggcggccctcgggcagagtgtcgaccatgtttggttggactatatacgtctagttagtaggaaggtaacacctccaccctttcttgagttcccagataaaacgaacgtatccttcaccttgaatttggtcgaaatagaaatgatgttgtacctcgagctctagggagggtgtatgttcgttatttacctcctaatcgccaaagttagaatttgaaagattgttactggacaaagatgggctagcatggagacaagggtgatcctcgtataaaatttgaagtagatcctggttaatatgatgtttgcgttcccaaaactcagcagggttcatctataaaaggtaggagataagaaagttagagttggtcggagcaacgaatgaaaaataggttgaatatactgaccaagttcaattgaggaatcaaaagcaaaagtttcacccagaaatagaatcttcaaccccagaagttcaaaactttgaattggagtatgattttcactaaaacgctaatggaagagtgaaaatggatattgtaaggt

SEQ ID NO: 224689 - DNA, 1431 bp, Cannabis indica
ttatgagattgagattgagatgacaagagataaatttagttcacttgcagcttgcctttaggaataggaaaactgacagaagaaaaaaaaaaaaaaatcattgagcgggaaagagagaagaaaaacagaattgagagagtatatatgtacacataaattattttttttcattaatattaatataataatcatataacttttatatacattatatatacatacataaatttttaaattaaatagtatatatataaatttatttatgttttatgtaaattcggtcagcttcagttttttcggtcggtttgcgaaataaaaaatcaactgtttaagggcgattttaaccgttaacagttttttcaattttcggtttgaacggtttcgattttagcagtgttcggtaggtcgatttaaacagtctgaacggttttttgaattttatgctcaaccctaatttttccatacattattatttaaaaaaaaaataattattaaattaatttaaaagaaattaataataaataaaataaaataaatcatgtatatatttacaagggtagctattcgatcattcatagtacgtttgaagtacctcataattatctaaagttgtcatagactatcaaatttagattagatcgaaggtaaatcgagatcgttcagatatttttcagtgcaaaaattttctactatttataatgcattttttatttaaaaaattattattcaatttttgagatattattattattattattgcatgtgttatttttattgttcactattatagtttttgtaatacaaccatcaatatatattaataaataaaaatttaagattttctaccataataattacaaactttacaatttttatagtataagaattgttccaaattagtaaatattaaagaaatttattttattgtttagaaaaaagtaaaaaattttaaattattaaattaatttaaaagtttaaattaaaaaaaatcatgtattttgaaagaattgaactcatgttattgtacatgatataaggtaattttaccatttataccataattatattattaattttattaattattgtaggattaaataacttaaatattttatatttttctagctacaattattgtattaagtagaaagtaaaattaattaaaaataaatatataaattctaaattaaaaagtaattaattgaaaattataaatagtcatatgtaagtaagaaaactataggtttaaagttaggtgtgaagttttattagttagagttaattaataatatttaaaattaattataaaaaaatttattatttatgtttaagttttcaagaattaatttgagccatttaattaaattaatgactataaattactatatttatcaatgggtaaaaacactagaggaaattacactttatacc

SEQ ID NO: 224690 - DNA, 1712 bp, Cannabis indica
ttgatctactcatcatgctttttacatatccatgagagtgcgatttatccttttcgcaacgctattttgctcaggtgaacttgacatagtgtattgagaaactacactattttcttgaaaacattcagcaaaaggccccatgtgttgtttagattctttataacaaccattatattctcatccgcgatcggaatgaaaaaatgttatgactcttcccaattgtttctcaagaacatattgaaagattttaagtttatcaaaaacgtcgaactttctttgatcaagtaggtgaagccgtaacgagaaaaataatcaacaaaagttataaaatacttgtttttgcacaacatggtagaataagatccattgatgtcagtgtggataatctctaataaagactgactatagttagcagtctgctttcttagtttagtcaattttttacaagtacaatcagcacaagtaaacaaaatcatcaagaggaggaagaattttagctagaagtaatcgatcaactctttctttagaaatatgacaaatctatcgtgccataataataagaatgtttccttaaaaataagacgggatgttaagggagccgatgacaatttaaaagaccatcagaataaaaaaaaatcactaatctagagtcaaacataatgtcaacattatgattggcaaaaggaaaaaaatagcattatttaaccaaaagcaaaagcgaaattaaattcctcttaaaagtaggaacaaagaagatattgttcaaaacaatctgaacacttaactataattcaagaataaatgtgccaacataaataatatcgactctaacatcattgccactttaagctttgactctctctcacttggcttcctgagattcctactctctggttgtaattgcttctattcatatgttcccaatccttttgttggccttgagttgagaaacatagtgagaagattcatgcttttccttttacagcttgctttcctcagctacacactgagaaattaggtgaccgacactccatgttttattataagtgttgtagactgtcttgataaagttaaaagagtcagaaagtgtatgaagagcgcgatgaataatgtaagagttaggaagaggaatattatgatcttccaacttgcattgaacattcactattttcaaaataaaacctcgcactcctttgatttatcatactgaatggttgtcatttcattcataagatgtccagttgcggcgttttcactagtgtcaaatagcttttctactgttttgaaaaactcattagtatttggggtgtttggcgaaccactaaataaatatttaggaattgaacttttcatagcaatgagactatgatgatttgaattttttcattgtgcatgaagagttttttaggcaacaatactgatatctattatgcctaaaataatttttacatctcatttccttgtcttaaagttggaagcattcataattcggatgaaaacgttattgttgttctcagaaaggagaccaaaaaaatttaaaaattataacttgatcaagttatatgagcaatgcaattaaaaaatattgtagagtcaactagtcattataaactcccctttagggtgagaatataacgcacacatgatctactttcatgaagttaacaataaaaaaatacaaatcaattaagaatttattacctttgggcaaa

SEQ ID NO: 224691 - DNA, 2302 bp, Cannabis indica
aaaacaagatgcaccttgttgatattttgtaacgtccctgcttcaagcctctattaggcccttacacccatagaatggcggctcttatacacgagtacgtcactctaattgcttcctgaattgatgactaaccctacagaccaacacgagtgtttttagcgtgctttgtcctcactcacacgcttcttggaaaaactttccaagaggtcaccccatggagttctttcgtgatgggctaccaaaaaacaagatgcaccttgttgatttaagtagtaccaatcaatcaatttaagtcttcttcaactctgtagtcctatacctacatagtctcagaatcattctacttgaccttccccaagcggtatgggattacacaacttacccggtatttccctctacgaatcacgggactaatgactgtcacaaagtcagtatctacatgatatatttacataaatttttaaataaaagataaaaatttaataatcttgactagtccggaactgccacgtggcttttaattgacacttaacatttagatatttatctaaaaatataatttaagtattattattgtaataattaaatttaaatatttatttgtaattaaaattaaacttaattatttaatgccgtaaattactaatattaatagttataatatatgaattacaatttacaccattcacttcctttgaattgctttaaagagttcccacgtactttactttttttttttctttttttaatatatactcattttataaataaattactctacttattttcttcttgtttttatactcattttataaattttttattcttccatttattttttaattaaaaaaaatattagacaattaacccgacaaaaaatatatagctttattgctcacctttgaataataataactagaaaatatgataaatcacgagtgataataaatatttcttaatgatctttccattttattaatttctcgtaataagctacattattattccatacaaataattattaattatgtatcaataaaaataaaattagttcaaaattcggatcaaattaagtactagaactactagtcatttgcaaccatcaattttaattttttaattagtgtcaaattaagaaattttcttaatgttaataagccatgtaattttagtttggttttttaaaggaaaaaaaatgaagttaattttgcatgcaatatatacttataacattaaattaaattaaattcattatacatatataattgttctgcaaaagttctaaagcaaaaattagaacaaagaaattataatgattagtacatacacattatcattaattaatattatgactgtaaatagtatgtgattattgtcttattttattttgaaaatcattattattattatggatccgacccgctatcaaatcccacatgcactcagaaatatatacatagggcgaccgattttaaattttagtgagcctaaagaaaatttagcttcttattttaaaaaaatatagtattttcaaaatcaataaaaaaattgtgtaaattttaaaatattttttagaactttaatttaagatcggaccttatatataggatcaaagattaaatttcaattatacaaaagaaattaattcaaaaaaattaattattgatgggattattaattataccaatatttaccaatttgtgttccttttccaattttctttttaacttaataacaatttagtttttttgttaatatattttaagaaaaaagggagagaaaattagttgataagtgttataaacccctagacttgtataaaattatataaatatatttatagatcttacatgtggtagtctgcttgatcatgatatagatttagatgaaattagttattaattaataaattatatatatttatatgattttaagttgcaataatcgatgatcactccaagaaaataaatcttcaccttattacacaaatgatctctaataatattaatatttatcatatatattctggtcaaaatatcattctagtcaaatctctgactattttaaagcactatatatacttcttattcatcaacaatattatatatattaaacaaaaattaattataatatagtatagtatatgatatcctttgaaatatatgttagctgtatacatgggttatgattttagattagaaaaaacattgaaatgtttaaaaggattaaataattattatatattttaaatagttaaaataattaaattaagtattattaatatatatatatttatatacat

SEQ ID NO: 224692 - DNA, 1439 bp, Cannabis indica
  modified_base (1410)..(1410): a, c, t, g, unknown or other
actgggatacaccagatggcctctatatttttaagccatctcaatttcatgtgcaagcctctgccccagccactgttccatgtgctttcactactactgtgtctgctaataaagagtctgatccttcctcttgtactcactgtcacagatctaccttatctgagtatgatttatggcacaatagacttggccatccatcagaaaagatagttaaatctgtccttcactcttgtaatattaccatcaataataaaagacctttttcagtttgctcatcatgttgtttaggcaaaattcataagctgccattcccttaatcatctcttactgtctatagtgaaccattacagcttgtggttgctgatttatggggacctgccaaaactacatctataaatggatacaaatattatatccatttcattgatgcttactctaaattcacttggatttacatgctcaaaaacaaatttgaggctttaaaaaccttcttgcaattcaaaaccgaagctgaattacaacttggtaaaaggataaaatgccttcaaacagattggggaggggaatttaggtcctttactgatcatctcaaacaatttggcatcactcatagacacccatgtcccataactcatgagcaaaatggcttagttgagaggaagcatagacatgttgttgagaatggtctcacccttcttgctcatgcctctatgcctctcaaatattgggatgaggcttttcgtacctctgtctatctgtctaacagattacctacacctactcttcaacacaagtctcccttagaaatattatacaatatttcccctgattacactaccctaaaaacatttggttgcaaatgttttcccaacattagaccatataacaaacacaaattacaatttcggtcttctccatgcacattcctagggtatagtcttaatcataagggatacaagtgtttagactcatatggcagagtatacatttcccgtgatgtcatctttgatgaaacatcatttcccttcacaacaattcccaagttgtctactgattcatactcatatgctgaatttgctacatctgcactcattcctatcacaagcacgtttagcaattctagcatgcataatgtttctgattccactaataattttgtgccacttgtggcaagtactaatgctcccactcaggaacaagttgcatctgtctcgaacccagctgagtcacttcaggacacaagtttgatcccttctgctccttctcatgctcatcacagcagtgcttcaccaccagttccccatcacattccacatattgcagcaccacctgctatactcctgaatctgttactgtcactgcaccagaaacagcttcgactgttgcaccagaacctgcatctatctaacnccagtcacagctactgctgcaactcaacc

SEQ ID NO: 224693 - DNA, 2135 bp, Cannabis indica
cattgttcctttgacaaaacaaattaaaccctaacggaatggatgtactctttgcttcttccatgttgaacttctgaataattttcttgatgtacccagactgctttaagcaaatagtctcttccttccgattccgtgaaactttgatactaagtatcttttaaattggtccaagctcgttcatctcaaattatcttttgagcttggttttgataattttgatcacagcgaaagttggctcatgatgaacatatcatccacatagagcaataagaacacggctatagattgctccagattcttgaaatacaagcagcgatcgtatgcagatcgtttgaactcaatttgttgcatataagtatcaaaatgtttattccattgcattggggattgtttcaaaccatataaagatctattaagcttgcacactagttcaactcctttctcttctacctaaaacccaggtggttgcttcatgtagatctcttcatccaagaatccagtcagaaagacagtcttaacatcaagctgttcaacttcaaactccatttgagcagctaaagacaacatcagtgttattgttttgtactttaccataggtgagaagatcgtagtgtagtctatatcttccacctgagtaaagcatttagccactaacctagctttgaacctcactagttcattctcattgatccctctttcacctttagaatccatttacactccacaatcttcttattctccggcttcggcacaactacctaattcttgtttttctggagtgaatccatttcttcatccatggcttaaagctatttagacttgtttccacctaaaattacctcttcatagcttttaggctcttcaattttagtctgttgaactgccgccagtgcaaatgcaatcaagtttgcttccacaaaccttgtcggagggtgaatctctctccgtgttctatcacaagccaactgataaccttctaaatctgtctgtctgtatgaatccttttgacaccttctatttggtcttcgttatcttgttctttcggctccacaacaacttttgtctacgcattgtcttctgattccacactaacttccatctgtgaaccttctccgaaagcttcgttccgtactccatttccacacttacagtgtctttgtttcttatttttcctgcatcacacggagaaacactacctttcctggaggacaagtaaggatattccaactcattaaaaataatatttctagaaatcacaacatttggtttacccttcctggaaatgtagattctataccccttggtacttaaggcataatctaggaaagttccattcacgaatttaggttccatcttgtcaatagattagtgtacatatgttgtacacctaaatattcttaaatacgttaggttgggggttctgttgtaccatatttcataaggggttttcaagcctatcactttattcgggcttctatttataaaataggttacggttgctaaagcttccctccaaaaaggtttttctagcccagaattgaatagtaaacatctaactttgttcaataaggttcagttcatcctctcagcaatgtcattttgctctggagtcttcactacggttctatacctagtgattccaaaaaatatatgggtcgtattgtgttgtgccataaaaaaaatataggccatgccgtattgtgcaataatttatatggtaggcccgtcacggcctgctaatccaataattttgtattgtgctttattcaagcagacttgtttttcttaaatagaacaacctgttttcttatactggttcaaattcgtgctccatatttttgtcttttttttttttacaattaatgaactaaatactaaaatatatgtattttataaattttaagctaactataatttttgtccccaaactttaacacatattaaattatgcttcctgaacttttaaggtcattaaaatttatcctaaattattgagattgttgtatttaagaactcttgtctaattttagtaagaaaaatctaatatagacgaaagtttagagaacataaattagtacataataattacagaattaataaaacgacatgaaatttgacaaaaattctaaaat

SEQ ID NO: 224694 - DNA, 4646 bp, Cannabis indica
cgagagttcccctattgattaaagaaatctcaatcagcagaatgaagacatagaaaagaaactagtaacatgttacgtgtgatacaagcgatcagaattcaagtgagatcccttttcagttaaattttaagccccaaaagcttgttcaatatcttacaatgatatgaaacatgaaactgagtttcatttgtacatattcttcataatttgagatgaccaattacttcatatgagctcattttggttaaattcttgctactcgcatcaggaagaataatatttaggctaattaagatttttgccccccaaattttgacatgtattaaattgtgctctcagaaattttcaagtcgttaaaattctccccgaactattaaaattgttgggtttaaggatttccatccaattttactagcatacgcctgacgtgaatgaaagttcaagggacacgatttggtacatggacaatcaccacatcagtaaaattgaacggaattggacataagtccttgattctaacaatctcaatagttcgaggagaatttttaacaatctaaaaagttcgggagcacgattcgatacatgtcaaaattcgatgggcaaaaatcctaattagcctaatataaatattcattgttcaatcaaatccaccatattatattagctttcagaatcaaatcaaatcaaataagagcagattaatgaaattttgctacaaatactgatatggaaattatacaccatattcaattaattttacaaatgaaacaaagtcagaaaagttattcaaggatgctttcctacctttccttttgcttttctacccatacttccatccaaggcgaaacttgatctttcgcatagataagatcatgaggaagattatcaagcacctgcaaacaaaaaaatcataatcttgattatgggatattagcatgatacaccattactcctaaaagaaagaattttctccaagattagattcttgcattgctcgaatataaaacaaaacaagtagtggcaatcattagattgatttaaaagataagaacattgttgttgctccacttctcctattaaattttgaaatgttaagacaaaataagcccgcatatcaaattagagaagaaaactaatcatagttataaacttctaaaagctaaaccgctttcaataatcttacgaaaagtgcaacagagaggactatgtgtggaaagtaattcaattttgctattcatgggcatttgttataatgaaatgaagctgataaaaatgccccatacataccccatccactcttgtcagccgcatcgcgacactctactcgaaactttgacaagtgacttcgaacttctccaacagtttctctttgtttttccgcaagagagggactaatttctactgagctacgacattcaagatataattgcttttatatcagtgccagaatatgtattaaaaaaagattaagacattttttaaagaaggaaacttgtttcgtttttgtgttatgttaaatatggaatggttatgttaatttaaaatatccaacgaaaatagaatgttgaaagttgttatcgaaatgtatactacacacgaacaattattaagtaccgacaaacaatctggttttgtcttcacaacgacagaaaacagacaccgcacaaaatcactgaatggttgaaagttaaaaaatgcagtacaagtagtatcgagataatttgttaacataatctcgtaaggtctttcactgctaccagctcaggcatatcaaaattgaacaaaaatatggtacatgaagagaaagttaagaaacatacatgtatgtcatattgttgtaaattctaggtggtgcattcaacattatgtaatccattattcccttagcacaagttccagatccaccgccaatttcatatatctgagttcacattgaaaaactgcagggtcaaattaaacactatgcatttactgtttatttagtatgactgaaagataatattaacaaattatttataatcagaataactttgaaatgatacaacatatataaaaataaataaataataattagtgcaaggaaggttttagcgaaaattgcagtgacgaaaagctaaaaaaaagaggaagcttactttaagtggaaccgaaaggttagcagtgcgcaatatggattcagcaattccatgagcataccaaggctacaagaaatatgaactcacatcaccaaaagtagagatatctaataaaggaatgtgaaatttttaagcaacatcttgctattgcaaatggagattgactagatgcccacattacctacttgaatatgtaatgcatttacacacagaagcatggtagagtagagaaacaatattattatctatgacccaggaattgctcttcagcccaaaaattagaactacaattacagtttcaaaattcgccaaaaggtaccattctgaaatcgataaatgtatttcgacctaataaagtaaccatcttaatacagacaactcaaattaactatatccataaaattcttgaaatgttttgttttccattcgacccgagcatttggaatccaacaatatcaacaaaataaaaaagttaatatttaacactttaatgataaccagtgtcataagatgattaatttttattgactgtgcagcatagcttatgaactatcaagagtgttaagatcccactctaactaagtatgggattagttgatgggtttataaccatttggcaccctcatagcctagtcttctgggaatgagttctacccaagtattcggttgtaacagagaggcagtagatcgttactagacagagacaatccataatccatcagaattatatcacaatgtttaacgagacattcagctgaagttttcatgaaactacttgaaattttgttaatgtatttaacttaaacaaaaccggctgctttcagttaattgattccgttacaatttttatttttaagataataaaaacttcaaaaccatatccaaattgaattaaacatactgcgacctcttaatactggaagatggaagaaagagttcttaccttgaagagttcaacaggagtaaaccatgatatatcactgtccttgtaaattttgtctaggtgtttcatgtaagcttgcctccctaaaatacaaatttgtatatcatttgtcagccgcgggtaaaatacacaaaatatttagtataatacatacacataaccataaagtaagtaaggctggccgtaataaaattcaacattaatctaaacgcatgattaattctctagttttcattgttagcccattttcgctacaacgttgtttctctaaatatcagctttcagtcggtacaaattttggcaagcatatttagactttagaaagaaaaaccctttagaacttaagaccccaatggtttgaaatcctttacactttatttgccataaacaacaatgggttcagctgaactagaggcacctacatttacactcatataaaaatgttgataatggcatcacactagacaaccagtcgactacaaattcaaaaattaagaaaccaactcacaccatttcgattctaaaagaagtacaaaacatgttttctgaatttagcacgaaaacttacactattttcagacaaagatttcggttttaaactgctcaaaaacaaatacttccaacaaacagaaatgagaattctaccagtaaggtaccttcaagctgattaaacttaatacttctctcgagtacaccaacagaccgcgatctttgagagaagtatccatgtttgggatcatacaatgcagaatggatgaaatcacgaacctaccaaaaaacaaaaagaaccatcatatctggaaattacataaacaaataggaacaacaaattgaacagagtaaaagggcttacgagaattggttcatcgccaacaatgtgggtcgagaaaagagctcgaaatggataaacccaatgatcaacaggcttcactgcataaaaaatcatcaattgacatttcatcaaacacatagagtgcaccaaaaaaaacaaaacaatttagagagagagaaagaaaggagagggtttacctctgggcatatgatagagaaaagcaaaccctttggaagcaagattgtgagaggccatcattattggtgggaagtgaatcagaagagggagttgagtaagggtttatgatggtgatgatgaagaaactataaaagagaaagctttattatcaaatctgaaatctccttggcttaaaccccaacaatcaaaaactgaataaactataaaaacgacatctaactttttaatcactaaaacgaactgtcgtttaattaatgagctggtttattattagggcaaatatcattttgaactctgtgttttgcaaaatttacagattagactctctgttttgttaattgacaaaataaatcatgtattttctaaaatggtacaaataggatcctaaaatgatttttagtcaaaataaaatttaataataatctgacttagaggtgtcagcacaaaactggttaaataaaatgatattttattgtttagaattgtatttttttttatttgttttaagtttatctgtcttaaaaaatgtataaaaaaa

SEQ ID NO: 224695 - DNA, 1510 bp, Cannabis indica
aagttcttcggtcagacgatgaattattcagattcaaaaaggttcctgcgctatttgtatatgtctacatcgtaaatttataagtgatttctaattactacgtcaaataaaaaaaatttttttttttttgaaattttggaactccattattattatttatttatttttattttaatttaattttcttctttttattgtgtctgttgcctgttaaagcaagcaaaagatcagacaccatttataagaatcttgtttgtgattttaaaagcaagattttaacccatgtgaattgtggccctaataaaaaaaagtgtcatgtctaaccaagcctattgcttttagattttgtcttctaaatataattatttcttgagtttggcataaacttaaatgaaaggtctccattagccacttaaagcacaaaatttgataatttaaatcaaacctaattttaaataaatagaaaaaaaaaaaaaaatcaaatgcctcaaatgatggagaggtctaaggagatttgattctatcaacttggtaaagtaagatttaatttggttagtataatagtagaattaggtggtgaaactttttcttatctcactttttaacaatgtgtgtacttaccatattgaaatatatcttcttctaggccaaaatatttgattaaaattctaagagaaatataatagtcatatgcttataacaccaaaaataatattatagttattattttaagtgttatttgtataaaattaaaaacattatgggctgggccttcgaggagacttcaagcccatactactaacgggaaagttcaggcccattccaacacaagtgtaattaattaagaccctttatatataatataatataatataatataatagtatattttatgttatttattaaataaaaaatagttaagatttgatattaaattatcctaataataattttatgatattttttttggtgtttgacacgccgtttagcatttctctttatttatatatacacaaatttatattacatcttttataacttaatatatatggcatatatttcaaatgtgaaacatatacacaatcgaattctcttgtgatttattaaatactttgttgaattcatcaatttatattaataaaaatacaaaattgtattttgaaaattaatatagttaggagtgttctggttaaaattgagaactaagtgatcgtttagtacgttattttatgcacaaggttagaggttatctcccacaacatactatcgtgcaaggcatggtttttgtgtactgagctaaataattcaacagccagggacaaggggattcaaataagagaagtcccgaagtgacacgtgtccaaggcccaacctgtctaattagtacgatctgacacccttaaatgctatatgagaagtataccacctaccaatctaacgatcgaattttgtccccactgagatctatctaaggcagtgcatgcatgaggattgacatatatataccccc

SEQ ID NO: 224696 - DNA, 1539 bp, Cannabis indica
aaagcttaaggtaaggaataatttcgctttaagtttaagacaattggtttcgtacagggattttgtgaattagaatagttatgaaggttctgaccttgtaaaattattattgggtagtcatgggactagtttcgatgtttacttgttgaatttgaggtgattttgagttagaaattgagtttggaactttttaaagcttaggtccgagctttaatggcattttccattgaagggcttgattttactttatgttacgtaaggattgttgtatatatggtatacatgtgtcctgtgaaatttggaatgatttggataggttttaggagtatttcgatgagtgtaaaatttgatattttggtgcccaaaaatggcctgccgtttctggaaatgtcagtgagatctgaaatcgtatttttatcttgacttttcacttgggtatcgttttagacgttctacataccttttcgaagcttgcgacgagctctaccatatggtgtatgttttggagccaaaatataagttttattttagtgtgattgaagtatggggtttggtaggaaaccctaagctgtccattgtaactgttaagtagtgttttgggataaacacttattagtttatcattgttatgacatagggcctgggatcattaattgtactccaagtaggttggccaacatacctaaaccagaacttgaggtaataaaagtataacatactgcatagtacgtcgtatgtaatacaattagtattgttatgaattaattaatatttagatatagttaatatttttatataatgaaaaggtgtatttgttgggtattgataatgtgatgatattatgcatgtgatatatgggctcagttgattaggttatgcgctataccttgcgacgtaacgggcataggtatgggcgtcaatgacatatgagtactgagcgtaggtacgagctcacctgattaggtgatgcgatactcttggcgacatgtagatacgggcgtcagtgacatatgagtaccgagcgtaggtacgggctcacctggttaggtgatgtgatactcctggcgacgtgtagatacgagcgtcgaagatatgaaaattgccaggttatggcatagaatgaaaccgttgtagggtttcctcctagcgacgtgtagatacagcgtcattgacatgaaaattgccaggttatggcatagaatgaaaccgttgtagggtttcctcctggcgacgtgtagatacggtgtcagtgttattaaaatttccaggtgatggcatagaatgaaacttttgtagggtttccttcaagcgacgtgtagatacgggcgtcactgacatatgataagtaccaggcgtaggtacaagctcctctgattagatgatgcaatatattgatgtcaagttgtggcacgagctcacgtaatccctggaacacctttttactgccgttataatgtccattttcaatcttttattttagtcaagtttttaatattctcacaatttttaataattaattaatatattagtattaatcta

SEQ ID NO: 224697 - DNA, 1825 bp, Cannabis indica
  modified_base (1784)..(1784): a, c, t, g, unknown or other
tcatattagttttaatttaattattgatgttcatgaattaaattagcatatactttggcttaaaagaaactactcttctcatatcttataggtaactctatttcaatgtgtatttttaaataataataataataataataataataataataataataataataataataataataataataataaataagatgtatttaattttgaataattttcaaaactttcatttttatttgcttatataaagatgaccccaacctctcttcaaaatatcaattatctctccgaatatttattatatatcacttaagtcccaaaaaaggttaatatgtttctttactcggaaagtaatttgaccgtacacaaaaaaatgatgaataataaaataaaattactacttttttttgtttaaatttaaaaatgtcaaaaagatataaattatgattaaaaaaaatgataaaaacgtatatcaattttaaattataaaatttgtatcactaatcctaatataattataaaatgatcatctataaataaagcttatttattttacatttcatttattccatttcaactaagaaaaaaattattatatattataatgtcaaataagtcttctatagatactactaagttagacatacttgctcaagtagtatccaagaattgaacaaaataagacatcataaacaaccaaatgatatgcttgagaattatgttaatactaattcagaggaaagaaccggcataattaaagggccagatccgccacctcctctttctcaagcattcttagagaagataagaattatgcaaggtattgatgacgcaacaataaatgataataatgaagagaaaccttttttgattttaccaaaaaggtttatttgcagcagatattagtttgcatctcaaccgtctttccatgccgttaaaacaaattaaatctgttgatttcttaagcctcaaagaaaaagccatgataagtaagaaaaacatcgaggtacgagttattggacctaatttggaggaagaaaccttgttactcacacggtggaagtgcgccgctgttaattcttacaatttcataaaaaaatggagtaattttgctcaaaagaatgaattgaaggtagggcaaattgttcaaatttggttttttagagacataaatagaaatccatgttttgctattgttaatcttggatttatataattatgtattttattagaaaaggttagtgttaatataattactatttattttgaaggaaagtttagtgtttactatattaaattaaattgtattattctttggatttgaatttaatttttttatagttgtataattaatagttatttaaaatattttataaaattttaagaaattcaaaataatttacaatataaaaataaaagagttacgcatgcaacagaatatttaaattctattttcggcttgttaaatttgtctaaatgtgtcaaaattatgaaacgtatacaactataaaaaaacttaaactaaaaaattctttcgaatatcgaaataaatagaaatagatcgcacatcaagaagatattgtaaaaattttaaataatattttactaggggtataatttattgtttcaattaatgaaataatttttataaaatatgcaatttttttttttttttttatttttttaatttcacatttttgttataatttttgattaatattacatgaatttaggtataaaatggagaagaaaccctaattttacccaaactacttgatcttatctgngcaagagaagttagcatacgagagctccccaactaaaaccc

SEQ ID NO: 224698 - DNA, 2153 bp, Cannabis indica
gatccccatctacgacttgttgtcttctccttcattcctctcctctccggcctctacctctctcggatccactctctctcatccgattcgccttctatcccttctcttgcaggattcgaggccgtacttcttgctctctacgctgccgagaccaaggtccgggctgggaagcccgtcttagtttcggtcccggacttatctcagccgtcgctttatcacacgcctcggcagaagcccaattcgaaccctggtagtggtcacaccaggaactcgattggtgttctggctccaccactggagccccaggtagcggtcaagtcaacgaagagggctggcattgttggtgtcgcccttgattgttattacaagcagatctcgcagatgccggcttggtctaaactcgatttctgccgattctccgcggcttgggccggccgcgactgctcttgtcaggagcagtttgacgatgaacctgaaattactgggttttctgagactagggtttcggagaatgggtttcgaattgacgatgtaacggaagagatcagtcaattgaggatcgagaacggtaacggtaacggtaacggtcatagttatagtaatggcaatggcgttggtagcagtagcaacagcagtaatggtgatttgggttctaaagggtcgagaattccgcttccatgggaacttttccagccggcgttgaggattttgggacattgtttgttggcgccattgaattcccaagatgttaaagatgaagctgcatttgcagttcggcgattgtacgcaagggcatctcatgatttgcttcctcaggctatcttggcaacccgaagcctcattcagctcgataagagggctcgagctgatgccaaggtggctgcagccgccaccaattcatcttctaacgctaacactcctagcaaggctaggaaacccgaagttcttttggtctcaaagtgattgattggttggttggtttattcagaacagagaagatgtttgctttttcaggtaatataggttgttgtatattcattctcaagaagtttttctaaacagtttgtgaaagctaattctgtatgtgccatttgtacttgtagattttttatttcttttcattgttcttcattttaatgattatttatttgtaggtgtacttatacaaacttttctgttgctatagtgtgtttgagtgagcttgttcctcatgttttgataattcttatttcacacaattcttttcttttgtggagagtgtccgaatgaatttaattttatactttttcttttctttttataatatgaattcggttcgtctgtgtaatttgttttagccatgtcttattatttggtgtatgtaattctgctatcttagttgaaattaaactctgtttggtagttgatgtttggtggtgatagcaaaagcaagtactagttacctggatacattaattagaatgatttttttaaaacttaacagggattcaagtatataatgtgtacctctcattgtggggaagttcttattatataataagaaattaatgggtgatacatggatacttgaagtatacacacaagataaagcctcacaattagtgtatcttctttaggtctgtaatatttaagaatataatttgttcagtttttggagttttagctgtttaactctcatggtaagatattggttgagtgatttggtgttcttattctatagttaggaaaaatgggtgttttattgcttcttgaactgtttactaagaagaaagcattctagtttttgcttcttaagtcagagatgtgtaagctttatagattatcatggcctctgctcaaggatcacacacacaaattgagaaattatttgagttttagtccaagtttaactgatgcttagaggcttagtaatctgttgttacttgactacaagttaggttgcattgaaagtgcataagccattgcaatagcttccagtttccctctaacatgcacttttggttctttagagtttcctactgaatcctgatgtacattacatttcgccgataatactagtgcagcctctcttgaatgcagctgatggctcgatgttcgccgataattggtttgatggaaggaactgctaccttacttggtgggctttctctttt

SEQ ID NO: 224699 - DNA, 2921 bp, Cannabis indica
aggttataaaataggcaacttagatttttatagaagcttattaacggagcagtctagtttctatagaagcttgttaaataagcagactattaaatggtaagggtgtgattaattaaagagactattaaaaacaaaatgattgggtataaattagaagtgatgagataggatggttgtttgtaagagaggagtgatgagatggggtagttgtgtgaaagacagaagaataggattaggaagtaatgatgaaatgagagatttagagagagactcttccgcgcttctgatatgtgttgtgtctcattcgtaaataaatatttcacttaaaaggttcttattaaagataattactcttcctattatacccttttatctatcaacaaacaaaacaaatgatgttaatagcaaacgtccccaaaagttaagtggcaaaaggagtttcatccgtcaacacactagaggcaaaatagcttaggtaacttcgtactaacatcattcctacaacaagaaagacatgagaaaataatgttgataacatcactgggttcactattacactatgttacatagaaatggagggatgaagagtgaagggataacgatggaactttgaaaattcaatctttccaattttggaagaattgtagaaaaagacaataaaatttgttaaatacaattattatccttctaaaaagtaataaatatttatattcacagtgatagttttgtaatttattaataatttagtcctctagtcatatttcatacaaatacttctggaagcatcattctagttctttctcagtgagcatcttgcattgctcctcatctcaccaagttttcttcaaatagaacatgttattctttttttattgccacatttattatcagattttatttggagcttcacccaagaagggatttgtggttcaaccatgttataaagagtttcttagagtacatcaacaacaagacaagaccacatatttttatttttcaataaatccaaagagagtgaattcttaaagggtctcaaggatgtgaattgaagaacccatatttatgtaggaaagcatggcctattagaagcagaaagcaaaatgccttgaaaccagctgaagcactaatgagaagctaactagaaagaagcattatttagaagctagagaagggcagcttatatatatttatataagatgacaagaacaactacgctgatcggtcactcagtatcaataacgattttaagttattaaaccaaaaaagaaagaaggaaaaaacacatgcagctactaaatgacaaatctcttagctacataatacttcacatcattaccaaattgagttttataagcatttttgaaaatcttcggtatatagataactagaaaacagtaaagttgaaagggaaaggaaaatttgaaaaaacagactttaaaaacagagagcgtaacaaccaaccaatacaaatattcctctttgtagtaaatgaaatgaaaactgagaaacaactccaaactcccagttcaatgtaacaatcattaagagataagtttaatgcattatgcaccaactaattattgcgaaaattggtataactacaaagtgcataatattgcatgctttccagatcgaatgaaaattaagaaaaagtcaagagattaggcaattcattcatcagtcggcctttgccccaaaactggaatatcttcatatcgtttctgcatcaacagacacaatataactcaaaacaaaattaccaatccaaaagtcataaatactaacaaaaaatcatattcagtcaaaaatctcccggttaaaactgctttctagacagtcattcccctccaaagatattcccagcatgcctaatgtttaaagcaataccaaaatgatctataacagcttggaatgaacacttatattgagcaagtagtgcaaacatttaataccatgatttccaataacccacaggttattcaatcatgatttcacaagttcacaaacattaaataccatgatttcacaaagaagaatgagacaatgattgtgattgatatagagaaatagcatgctttgtatcaaaaataagttgcacaaaatggtttagaaatggcataccccaacattgttgtactcccaaagcttatgaactccataatccacagcctgcatactcaaaaaacatatatcataaataaacccccctcataataaatacatattatagtaaccaaacaacaaaactaatttacttcaaaaaataatcaaacaacaacgaccaagtcaattcgacccatcaataatcaacaaatttaagtcatgaataatctaattagtctgttagctataagaagatacagaacactaaaaaaaggatctttaagccaaaaattgcgcatattgcttatttctttattcgaatcaaagctacaaattctcagagaatcgagattaattaaccctctaacaaatcacgcataatacctttaatcaaaatataaaataaacaaatattcaatgaatttgacccgctgccattagaaaaacaacaatcaaaattttattccattatattgtcagagtcttggatttctaacaacaagatcgatgcacagagagtcaaagcagatgggtatgttggatactcactctttctccgaggaaagcaccggcgataacgaaagtcacgtagacagagttccggcgcatgatgactttgtaaagaccttcgaaaaggccaccgccggttcttcgtagcagctgaatccatggctatctgttaatcttccctaaccactgccttgttccgttcggatctgtaacctaggttttcagaaattgcgttctttcccaaatttttatttacggaagtttacaaatctatacagggaagggaacaagaaaattatttggtaaac

SEQ ID NO: 224700 - DNA, 1504 bp, Cannabis indica
gcaagctaagtcctaagtaatggacgttcaacgaagcgtaagagggcaaggtgaaatggttgagaccgaagatggtcgggatggtagcgatcccgaaaacccccgtggacgcggcagaggtcgcggtcgtgctcaaagagatggccaagaaaatttatcgcaagctccattagatttggagcagaggatcgcggagatggaagctataatccagcgacatgaggcgaaaatttagatgttgaaacagcaaaggtctcatgtggtaccttcaccccttatggcaatcattttcgttccggaattactagtagagcagagtatcgctagaagtcaaatagaacctttgtatggggaaagtggtagtggctctttggttgggcagaaaagggagcccacattgacattggtgggctcaagacgaaataagagacttcagaagatccgggggtgagatggtcttagaagacgctatacctatcccgagtgtccacactacaaaaagcatcaccccggagtatgtaaccggaaagcttgctttcagtgtggatcagtggggcatctcaagaaagattgtccccaattgaagaaagaggaatttaagcctaaagccaaccctgcgcctgctcgtgtatttgctaacactcaggctgatgttgctgccagtctttcagtggttacaggttagcttcttatcaacggtctagtatttactattttatttgactcaggtgctactcgatcttatgtgtcaacaagagttcttgatcaacttgatagacctagtgatatttttgagatgggatttggaaccctgttgtctaatggggaactaattgtttcaagaaagtgggtgagatcagtgttaattagaattgaagatagagaattgagccctgatcttgtggagttaccattggccgagttcgacactatactcggaatggactttttgttcaaatattctgctagtatggattgtaacagaaaattgtaacttttcaatcggaggatgagaaaccatttgtctttgttggtttggttcaaggttttcatgttccaagaatctcagcattaaaggctagggatttgttactcagtggatgtgttggattcctggcagttgtagtggattccagtaaaccggtgttacttggacctaaagaggttagagtggttaaggaaattcttggatgtgtttccagaggaattacctgggttaccacctcagcgggagatagattttattattgatctaatccctggagtagaacctgcttcaaaagcgccctaccgaatggcacctgccgaattaaaagaactgaagatacaactccaagggatgttggatctagggttcactcggcctagtgtgtcaccttggggagctccggttttatttgtagagaagagggatgggactcttcagaagtgtattatgtatcgactatcgggagctgaataagttaaccattaagaataaatatcctctgcctagaattgacga

SEQ ID NO: 224701 - DNA, 1633 bp, Cannabis indica
gcctctgacctaggttctctcgttcctccatggcaaggaagaaaaaaccaggtcgtcggtcgggaacgaaggtggcaattgatgcaggttcaccagagcagcgtcgggatttggagagggagagcgttgctggttctttcgataaccaggacccgctgctagttcgtttacatccagacaagaaaacggttcaggaacaagaggattctctgcaatcagaaagtaaaagttgtgttgatgaggttgataatcttcaatcagcatcgcagaaccattggcaacagttctcaggaggtaaggtgctaaactctgatgcagaattatcttttactgaaccagtgattaaggagggtaggaaaatagcccacatagatttggaagaggtgaaattggaagaggaaagctagaaatcaacagttatttgtatggtgttgggagcaaatatcccagctgtggtctttgaaggttttattcgtagaatttggggccacttaggcattgttcaagttgctagaatgactaaggggctcataatggttaagttcaatgatgaagcaactagagatgaggttcttgagaatggaatgattcaatttgataggaagcctgttattgttagaccttggtccgcggatttgaatgtgattaggttggtgaaatcggttccgctttggattaggttacctaactttggtctctaatattgtgggaaaaaaacattgagtgctattgctagcactttggggaagccgataatggtagataagcaccccaaggatcgaacacgagttcaatttgctcgcgttcttgttgaaatggacatatccaataacccagatcgcacttcctggtttgttaatgaatatgggcagttggttgagcaagaaatagaatataagtggcttccggttaaatgtaaacattgtggtcgatttggtcatataatggctgaatgtaggaaggttgagaagccgaaagaggaagctaaagtgaaagaaactaagcaagtaacagagggggctgctactggggttgtgactgtagcagatcaagttactaatgttgctgcgacagttgacaatgttatggcagaggcagttcaaggtgttagtactacagctgaaactgaaagtaaagtctctaatgatcaggataatattgttacaggaaaaaaaattatcggggattggattgctccaaaaaaccgagtgtccaagggttcgaggtcaacaagaaaaggcaatgagaaaggtgagaaagttgtaaggaattcctttgcgcttttaatagggggacagactgaagaagcacggggagatagttactttagcttgagttattgatggatttttgtaatataagctgctggaattgttaggggtttgaataaaaaggagaaacaagagaaagttgcagaagttcggaggtctaataaagtaggcattgggctttagtcgagacaaagatcaaaggggagaagttacatactatgatggctaacaattttgcttgttgggaattctattctagtaataaaatggaaggtcggattctcttgctttggagaaagaagtttgttaatgttgaggtgatagaggattccaggcaacatgttcattgtcatgtcaaaatg

SEQ ID NO: 224702 - DNA, 6339 bp, Cannabis indica
gagagagagagataggtgacctcagattatgcagagagataacaaaaatggtggagctgcattttccgataatgtgcattgggagttgttactatatttaaattacattttgaattccaaaatgcacttcttaaaagtgattgaatgtcctttcttattcctaataattttttaatcaattttatattgtaaattatagttattaaagaaatttttataaaattttaaaaaatttaatacctcaaatagaatttaatccctaattattttatttaatatatttgtgaaatagatttacattatttttatattataaattattttaatttttttttaaattttataaaatatcttaaataactataatatatatgaatctgaaaaaaataaattaaaaaattagataaatagtggcataagcactaaagttttatgtttataagcgacataaacacatatttatttttagcgacataagtacccaatgtttaatttcgtcagtacaaactctattattttcttaaacatgccacatataaggtccattttctagatcattgagtttaaacagaaacatgtagtaataaattcaaaacagagtctgtactcacaaaactgaagaaaaattgcaatagctatttaccttttataattttatttttttaattaaaaagaaatataaatgaatattggaaaaaaattaataattggctaattaagatttttgcctccttaaaatttgacatgtaccaaatcatgccccctaaatttttaaggttattaaaaatgcccctgaaaggctgaactattgagacagttggatttaaggacttttgtctaatttcattaaattttactatttcagttgattttttatgtactaaaccatgctctccagactttgatatctaccaaatcatgtcccttaaagtccttaaatccaaccatctaaatagtttagagacatttttaaccacctttcagagagcatgattgtgtacatatcaaaattcaaggcaaaaatcctaattaaccttattattaataataataataataataataataataataataataataataataatgtaatagtgtaatagtgtcactcattcagtcattcattcatggcggagcttcggcgttgtctttagatatagaccgaagtcggctacgttaccttcttcctcttcttcttcttcattttcccattttaccgtttcaaaatctgatctttctctattctcaaattaaatcatgctattctcaaggggatttcgtcggattccgaccaccaccttcaatgggttttcgcgttggttcatctcgcaccgacccgagtactcacagaccacttctcattgttccagagactcgacccggaaggttattaatactgctaatgaatagattctttattttaatcatatggggtttaatcaaggttttttgttttttttttttcgattagtagatttttgagcattgggtttgctttcctttttgattttcttatgaataacacaaatgcttacctttttcatgaatcatgattgttttgacaatctttatgttatctttgtcttttactctgtaggtagtagtagcatctctagccaaacagctagtgagtggtgtaaccatgaaaatgacatatacatatgatcaacattgtaggtacaaaggttcattcaaagcttttccttttttcgtttactctttgctcttttcctcttttaacttgaaaatatttaattatttgagcactatggaatcataagaaaattaggaaatgttaaacatgaattgggaatgttatagtagtcaagggaagtgaaatagtaacatgcttttgctaaaagaagctctagagatttgataactaaatatggttttgaggggttaagtattttaagtacttgagcttgcttactgcattgttcctatgatataattagtagtgatgcagagtaaagtaggagagagagagagagagagaaatagaagaataataattggaaaaaacaaatcttcaaactcctataaagtcagctaattcaatgttgatccttcctctggttgtaccgaagctctttgaatttgaatgcctcacttgagcctactagaacacatattagtaacactcaaataactaaaacagctcttggtatgatgtttttcattttgataaatgttagatatactttcattcttacgctgaaaggatttttgtcttttgcagcatggtatattatatgcaaaggatgtgttacaatactacatttggaaccagaagtagaccgaattatggagaacatgataatgctaatggcgggtatgaaagatttagggaaatgggtcgtgagagttctgaggattttggtgcatttggatgttccagaggcgattctgaaaacaatcagaactttaattttgacgagtctgatggtagcgatgatgaagtagaagaaggagaggagagtgatggtaatgaggattatatggagttgaagttgactggtaataataataataatgcacatgaagaaaatgtttgtagagttgaagatgatgaggatgatgaatccaaacaccctttggtgagagaagtttgtaggttaattgatcttaggtcgacttggaactcaaagcttgaaggagaattaagacacttgttaaggagcctcaagcctaggcaggtttgtactgttctgcgttcttttgaagatgaacgaatttctttgaaattgttttattgggctgatcggcaatggcggtatcaacatgacccaatagtatattatgcaatgcttgaaattcttagcaagactaagttgtgtcagggtgctaagagggtcctgaagctaatggctcgccggagagtacagcgtacacctgaagcttttggtcttgtgatggtttcatatagtagggcaggcaagttgaggaattcactgagaatgttgactttgatgcagaaagcagggatagagcctaatctgtcagtatgtaacactgcagtccatgttctagttatgggaaataggttagaaaaggcattgaagtttatggaacgtatggaaattgtcggaattaggccaaatgttttcacctacaattgtttgataaaaggatattgtaatgtgcatcggattgatgatgccttaaagctgatagctaaaatgccacttaaggattgcagcccagataaaattagttactattctgtgatgggttttctttgcaaagaaaaaaggatcaaagaagttagagggctgattgagaaaatgaacgatgcgggattggttgcagaccaggttacttataacaaccttatccatatgctctcaaaacatggccatggaaatgaggcccttgaatttttaagggaagctgaaacaaagggattccatgttgataaggttgggtatactgcaatagttcattcattctgcaaggaacgtaacactgacatggcgaaagaaattgtgaatgagatgttctcaaaagattgcattcccgatgttgtaacatacacctctgttcttaatgggttttgtagggaaggaaagctggatcaagctaaaacaatgcttcaacagatgtacaagcatggttgtaaaccaaatactgtatcctatacatccttattaaacgggctttgtcaaagtggcaagacattagaggcaagagagatgctgaatatgagtgaggaagattggtggactccaaatgctataacttatagtgttgtgatgcatggttttcgtaaggaagggaaattggttgaggcctgtgatcttgttgaagagatgattagaaagggattttttccaaactcagttgaaataaatttaatgattcaatctctatgccgagagggaaaaacaaatgaagctaagaagttcatggaggggtgtctgcaaaaagggtgtgctgttaatgttgtaaattttactactcttattcatggatattgtcaaaaggatgacttggaagctgctctatcgttgcttgacgacatgtatcttagcaacaaacaccctgatgcagtcacctatacagcgctagtcaatgcattggggagaaaaggtagaatagaagagatgtctacgcttatggcaaagatgctcggaaagggtgtagatcctactcctgtaacatacagaacagttattcattggtattgtcagattggcagggttgatgatttgttgaaattattagaaaaaatgcttgtaaggcagaaaagcaggactgtgtataatcaagtcattgagaagttatgtagttttggaaaccttgaagaggctgaaaaactcttgactaaggttttgagaacagcttcaaaaattgatgctaatacatgccacattcttatggatagctttttgagcagagggtttcctatgtcagcttatagagtggccaataggatgttcaatcggaatatgatacccgatttaaaattttgtgagaagttgagtaaaagactgatgtcagaaggaaatttaaaagaggcagacaaccttatgttatggttcgtagagcgtggatgcagatcacctcagaatcaagagtctgtgtaaagttgacatggattattttgagcataagaaacctcttacttgccttcattttttggacattctttggagatagtaaatgtaagacattatctctctcatcaagtttatttgtacattatttcattagctttatggcttctgcattatttggagagttctgctttatgtcctttgttagtacaagttccaacatgaataagtcttcttcttctttttcagtccgaggagcatggcctggggtaaggaagcttgaagattacaataaagcagtagtttttagatcttgagctttttcaaaccaagaaatagtctctattggtttggtgagttaacctttgcacacaagtccccttgaatgaagtactggggtccgggatgagataaaggcattaccatatgatggaacactggccaaaccgaaatctacgggcaatgagttgtgtatgttgtgagaatgagttatgaaactgactggtgagttaggataggagcactttgaataagaaaatgggaccagtcaactattgtcttatcaaacaggcatctattgtaacatgtaaatgtgccaaatctagctaaggacataatcttgtccaactagctaggtgaatggaaaaacctcttccttgcctagtgggccataagagagatgatgataaggttgaatggcaagatgaggtttcatatgggatataattgtgttgaatattggaacagtttattcagtgaattcagtttttgagagtattgaatttaaagctagtttgtaattgtgctgagattttcagctcaagaatgaagatgacatgcttcaattagagaccccttttaaccaaagatgacatgcaattatgtacatctcatttagtttgatattacaatgaatcttgttttacaggtggcaaaatctgtaatgctggccatctaatttggttgctacctactgttgtatttcaatttattttctaaatacattttagttttcatctaagaaaaaataattgcatgtttttcttattgacactcaaatgagtctttttgatttctttctgatgtgactttttcttgatcccaggttagctgcacctgatctcatgctgtaatgcaaaggagccttaagatttgattacatctttcttatatctatctttatattatatatgtcccttaagttacaaaagcaaaatgccaaaaaatcacaaagaaatggtactatacaatgtgtaagtgtgtcattttgactaatgtattttgattatgaagtgattaaagatggtacaatgttttactgtatcctttttgagagttaaattcaatgaaacagcatagagacaaaaaatataagaatgatttttgattatgattgtcccatttcagacattttgctagttttgagtgcattttgattgatacattggattttacctagtaataatatgatttagatcaatgtgaatgcttcttttgttacaaattacaatgatagtcttgggattggttggatagtgcgagatcatggaggaattgtcattgaagctgattcaaagttgttgtctaatcgtgtacaactgactatggaggaagaaactgcggaagtcaagaaactctagaatattagaactacttaacttaagaagataactctagaattatttagagaataataaaaatttataaagaacttagaatattagaaaattttagaaaaataataatgagaaaagtactaatactaaataaaataaaa

SEQ ID NO: 224703 - DNA, 3025 bp, Cannabis indica
ttgttccacaatactttctctttctatccaagctctgaacaggttgttcctcatacgataagattgtctgaagctcgatgtcctcataactcagaatatgggtcgaaccagacacatattttctaagctttgaaatatggaacacattgtgaactctagacaaagcagggggtaaagctagccgataggctacttaacctaccctctccaggatctcaaagggaccaataaagctaaggcttaattttcttttctttctaaatctccaaatccccttcattggtgacacttgaaggaagaaaaagtctccatcctggaactcaatatccctaggcttcaaatcagcgtagcttttctgcctactttttgaggtaagcatacgagattgaatcttctcaataacctcactggttcttgggactgctttaggtcaaagataccttcgttcactgacttcatcccagtgaataggtggccgacacttttttccatacaacattcgtatggttccatttcaatagtactctgataactattgttatacgaaaactcaatcaaaggaaggtacttgttctaagaaccttagaaatccaatacacatgcctgtagcatatcctccagtatctgaatagtcctctcaaactgaccatcagtttgaggatgaaaagctatactaaaatttaatttagtacctattcctcactgtaaactttcccagaacttggacgtaaactttggatctcaatctgagacgatcaactttagagcaccatgaagtcgaattatctccttgacatattaatcagtgtactaatccattgaatacaatcagtaatggtaaaaaagtgagctaaatttatataccagtccactatcacacaaatagaatcgtaaaaccatgtttcctttggtagaccatccacaaaatttgttgttatatcctctcatttccactcaggaatcttcagaggttgaagtaatctcgctagtctctgatgctctgccttaacttgctgacaagttagacattttcacatgtattcaattgtatcacctttcatacttggccaccagtacaatgctttcacatcttgatacattttggttattctcaagtgtaacgagtatggcgtggtatgaaattcatccagaatctctttcttgataccttcatctactggaacacaaaccttatctttatacctcaaaatccacttgatgaaattgagaaatcctttgttgatgaaacttctctttttactcttttaacactggatcactttgttgggttgtcttaattctttctagtaagtcaaattgtaacataatgttagctaatttcatgatcacaaattcaattcttactctagtcatatctttagccaattctggtgagatctccttcaattcataaacttgccccgcacctttccgacttagagtatccgctaccatatttgctttctctaaatggtaaagattttttttttatgaattaggtaattgtattatctcacaaaactgttacaacctaatagcacccaaattttcaggccttgatatgaatctatacaagctgtatatacaaacaaataatcaagagagcaagaaaaaaaaccagcaattataatgttgagtaccaatcattgtcttctctagaaactttttttggccaaaataaatcaatcctttgcttcactccagccttcagttctttgcaaaatttattgttgttaggagttgtttcctcccagtagcttaagttcttcaacttccaaatatgatacaccaagctggtgagtgcagcaacaaaaaccagtttccaaaacttactggttttttcttttcccagccaatgtaccagcacagtaagtgtattaccttgagctctccattgcagccagctcttgatgttttgtaactaaagatgagagattggacactaaaagaaaagatgagagtgtgtttcaggttgtaggttacaaagcaaacaaacctaatctgcagcaatccccattttaaccaatctgtcttttgtcttaagcctctgttggatggctaaccagctcacaaaactgtgttttagggtattgagtctcccccaaatttggttactccaatgcattttagttgggactggatggtactgtttgtacccttgagatactgtgtattttccttgtattttacagccattcaaaacagctttgaattgctcctttagcctcactatgcaggtgaaataccagctagcttgtgttggaaccgcatagctccatcagtccttattgtgtaaatacacactatttatccatctcaaacacaagctatcctccttattagccaaagcccacaaagacttccccatagcagctttattccaagctaaaacctctttaaagccaatgccccatgccgattttgaatggcaaagagactcccaggacacaggtcctagcccttggtacatggcacgacctttccaaagatagttcctgcatatagcctctattccatggatctctttctttggtagaataatgatctaactccaatatgagtgtatgatcaaaaagcacaaaaattaacaagtatttctctccctgcaaatgataagtttttggagctccatacctttattcttgatgtcattttatccactaggatggcacattccttccctgaaattcttttagagcagatggggattcctagataggtgaaaggcaagtgttgaactaaaaagccatatgcttttacaatctggtttagctttgttctggacatgttactgttgtagataactgatttggagggattttgttgtaggcctgaagttattgagaatagcttgcggccatgtagcatgtatagaatacttttgagatctccattgcagaagagaagcacatcacctgtaaaagcaagatgattcaatataattccagcacatttgtgatggaatttaaagtcttgttctctcccactttcccaataatcttgagagatattccatgcctagaac

SEQ ID NO: 224704 - DNA, 3439 bp, Cannabis indica
aattgttgtggttttcaaggtaggattggacagaaaatagtttatatttgaaagaaggatatccaatacatttgtgagtttgagatgctagtttatgtaaacaaccatttggtaagataacatgttttggatgagcattattattgagagaaaaaaattgctttggatcaaagcaaatatggtgagtggcaccactatcaataatccaaaaacaagaagagaaagaatgattaccagtgaggttggtagctacaacaatagaagtagtatcagattttgagttttattgttgaagctgctgactcaagaatgagattaattgctggtaatgagcagtgagatctggtggtggattggacaaagtctgaacaggttcagtgtaagaattgtgtgcagatgtggaaccttgagtggtgcttgtttggttggcctggggagtggatttcgagttctctggtttgttcttgtcaccataaccagggggaatccatgaacaaagtagcatttgtcaacaaagtggccaggcttatgacagtgagagcaagaaggccttgaattcttgcttcttggctgatttgagggctgaacaacaacaaccataggaagcagggtagaaccaagagttctttgtcattatgcattattattgttcttttagcatttctcaaacaaaaatgggagtagtgagctacgatgtctatcccctcatggtgatgagattcaacaattcctacccttgaggtgatgttgaagatctgctatctatgatagattattcagacatattctatgtagtaatgtgtatgaaatatggtaacatgtagtaattttttctttttagtgtcatacatcttcaaaaattaaccaccaacaacaataaaggggactaacaacaccacttcatgtgtgtgtttatcttacattattgatatgtgagtaatctgtggtgttaatgttacacttagattgtgtttgttacgagttttgttttgtatgagaatatgagcaagaaaattatttgtggggaaatatgaaaatcaagtgtataatggtattatacatagttaaaatcaaacaatactagtgaaaaaatagaaaacgctatccgtacgcccaaattttttgattgttagggtttatagtgaccctccttgagcggtctagggttttttccccttgtatctctttatacttctctatgtgccttgctatttcctgcttgttgctctgtttctctctgcttctgaagtcctttttcttttctctccctatggttgacaaaggaaaaatagtgatgaggaatgaagataacgaagttgatgtttgtaaaatcgagaacaagtccgattttgttggaatcgtctgctgagtttaggaaaggagtatcattcaatcgtcttcgggttcggtggtttccccatttattttccaggaaggtcatctttcttcggcctcctctggtctgtgctcactcacaaatggaggttgagaaaagaatggcaactgacaaggtagctcaaatacgttcatactccgttttacgtgccataaggaagcagagtttgtggttaaacagagtctgtggattgtttgtgatggtttttatttgctaaacatatgtgatggtaccttcttaaatggagaactagaagaggatatatatatatatgtatatatatatatggaataacctaaagagtacattaaaaaaggagaagaaaacctagtttgcaaattggaaaaatttctttatgggctcaagcagtcaccaaggcagtggaataaaaggtttgatacctccatgacaaaataaggatacataagaagctattatgagcattgcttgtaccataaaggaatagaagcttatacatcaatctatttacttctttatgtagatgatatgctaatcataagcaaagaaaatgtcaaagtagaaaacctaaagaatttactgaaggcgaaatttgaaatgaaagaatttagagaggctacaaaaatacttgggatgaacatcaaaagagatagacagaaagggaaacgagttttaaacaaagaagactacatccacaagcttattaagagattctttatggaagaagccaagataactaagcaacctatcacctatcacctatcaactcaactgtctaaggcacaatgtccaacagaacctgagcacatagaagaactaaaagaaataccatattctaatgttgttagatctgctatgtatttgatagtgtgcactagacttgatctagtacacaccatgagtatcttaagcaaaaacatggcaaaccctggaaaagagcactggtaagcaatgaaatggactgtgaggtacatagcaggcacaactaaagtgggattagtgtacataagacttaacactaaactactgattgaagggcacaatgatggtgactatgctgatgatagagacaatagaagatcaacaacaacctactattttataataggaggttgctgtataagttgtaaggtacaactccaaccagttgttgcattgtcaacaactgaatcagagtacattatagttactgaagcaataaaggaagcactatggcttcaaggtctcctagaagaagttactaaggtcaaacaagttcctattgtgtattcagacagtcaaagctgtatacacttatgtaagaacccaattttccacgaaaggactaaatatatagaaattaaataccattttatcaagataaaatgacacaagagttggtttctatacagaaaatactgatagaggaaaaccctaatgatatgggaactaaaattgttacccttcacatattgaagttgtgcatgagtttgttaggtgtagacactggaggatagacctaaaggagacaagagctaggaccctcaaagaagtgcaagctgatacagatcaacttatacgaggaattaggtagaaattgttggaataattcaccatataaactgacctatcaaagttagcaattaagaacaattagttaatacaaatcagagcctaactaacctaaccatttacaatccaagattcaagacttagttagttactcctaactatcctactcaacttcacattcactataaatagaagagaattaaaaccagaagacttacaacttcaatattactcctcaaatcgaaaaatgaagatctaggaggtgcacacctagaaagagttactctcgtgttcaagaaaatagtagaagagagttagagagagaaaagtaagaggattgattcgatcctgagagaaagaaaagtgagaaagataatgtttttcttacatgtgatgaagaagatgagctaccagatgattaatgtgtcttggagctttgaaacttggagtaattgctgatcttgatagtggattgtgactgagcttctttgaggcaactcaccaaggacgtag

SEQ ID NO: 224705 - DNA, 2538 bp, Cannabis indica
taaagcaagagaattaccttcggcatagttgccgcaaatcccaccatgtacttctcggagtatgtagtcacattcattcccgtcgatgcatttaagcaatgactgactaaaacttctgcgatagagcttgtttttcgtaaatgacatatcggggggctcgatatcgaagttttgggcttcggtcttgtcgccagggagtactcttgtttttaagtagttaatgattgggatcatccaggtgacctttttgatcgcatcgacctccatcatttaataaagatgaatagtcggatgggttaaaatatcaacatgaattatgttgagtaattctgcttctctcgtcgaggccagccgggccaaggcatctgcatgagaattgtaagcacgatgtattttattaacaattatctttttaaattttagtaataactcacaagtgtaggaaagatatttggccaaacgccctcctctagccaaatattctccgttgacttggcaaactacgatttgcaagtcgctgaatgctttgaggtattcgactttcatttcgagagcgacctttaaccctacaattaaggcttcatattcagcttcgttattcaatgtgggaaattgaaacctcagggcagcgtgtactttgaatttgttggggcttatgagaattattccacctcctgatccctcactattggatgccccatcaacatacaaagtcaaagcctcgcccggtggtacattggggtcgactcgttcttctgtaattattacaacctcgtcatttggcaactcgagaatgaaataagcaagggcttgtcccttgattaccgatcttggcttatacctaatgtcgaattgactcaattctattaaccacttgagtaaccttcctgatgcttctggttttgctaaaacttgtcgcaagggatagtttgtcaaaacgtccatgttgtgtgcttgaaaataagctcgcaacttccttgaagcaatcacatgtgcaaatgctagttgttccatttgtggataacaggttttaacatctaaaaggcgcttgctcacgtagtatattggatgttgtctttcttagtcttcgcgaatcactattgaactaattgcgtattcagacactctaggtaaattgacaaaacttctccaggcattgggttggacaatattgagggttgccccaaaagcatttttagggcctgaaaagcctcttcacactgatcaatccactgaaacattttagttccttttaaaatctgaaaaaattctttacacttatcagaggaacgtgatataaagtgatttagtgcagtgactttacttgtgaggttgttgactttcgttggtttggtgggagatcgcatctccaccaaagcttttatttttgtgggattttcctcaattcctcgttggttcacaataaagccgaggaattttcctgagcctactccaaagacgcactttagggggttaagtcgaattctataatgccgtaggattctggacatggcctcaaggtgggcgacatggtcttttgcatgtattgtcaacatacacttccatcgtctctcctatcagatctgcgaacatcatgttaaccggcctttgatacattgctcctgcgtttattaaactaaaggcaattaccttataatagtacaaatctcgatctgtaatgaaagaagtatgctcctggtctggttcatacatcggaatttggttgtatcacgagtacgcatccataaaataaggagctcatgacctacagtagcatcaataagttggtcaatgctcggtaaagggaagttgtctttaggacatgctttatttaaatctgtgaaagcgatgcatgagcaccatgatccatttggctttggcacaagaacgaggtttgctaaccagtttgggtagaatgactcccttataaagccacatgccaaaaggcactcaacttcttccttaagcgcttggtacctcatagggtccattttgcagcgcttctgtcggacacctcgcacttatgggtcaatgttcaatcgatgacacatgacctgcggtgatattccgaccatgtctgaatgtttccccatgaaaacattcagattctgcttgagaaaagtgacaagcttttatcgctgttgaaaggttagtttagaacaaatttttaaaactttattacgatcgaaaggatcgattgatacctcaattgtttcttttgcagcttgtgcagtgttagtgtaatcgaggattcttggatccaaattaggtttttcaacatgcggtctctcctcaattctaaaaatttcctgccgaggaggaggtgcttcgagtaaatatataacatttaccgatttcttcttttctgcgatctttagtactatgttatagaattctcttgaattcgattggactcctagcacagataccacacttgtgggggtagggaattgtcggaattaattttaccaggatcttagatctactcacaagtatgttgatttaacaacctaattatgaacatctaaaacgataaac

SEQ ID NO: 224706 - DNA, 1221 bp, Cannabis indica
tcccagttatcttgaaaaaagaagcttgaatacccgtcaggtcctggagctttaatccatggaatctcaaagataacctttttgacatcttccttagtatactctttcattagtctctctgcttgttgctgtgtaaccaagggcccttgttgcatgatactctgcattacctgtcgcctttgctccattttactacctaatagttggtagtaaaaggaaagaaaagcttcagtaattttattctgatcttctacccttattccttgttggtcttcaattgaaagtatactattttgtctcctccgttcccttatgcttgcatgaaaaatcgttgagttttcatccccttccttaatccaatttactttggacttctgctgaagaaaagaggacagccccttgagtaacaaactgtatttcttccttgctgccatttcttgttcaagcagcccgtgttgaagtgggtcagcctgaatcttcatttgaatctccactaagtcctccttttcttggttggttgcctcttgaatgttggaaaattctcttctattcaactctttcaattcagcctttaacattcttaacttgtatacaagttggaacattttagtgccagcaaccgaagccttccaaattcgggtcacaatctctaagaaccgtggatgtgaggaccacattctaaagtatttgaaaggcgacttgcctcttcgaatttcaggatgaattgagacaatgactggggtatgatcaaacaacccttccaccataaaaacagcttcagcattggaaaaatcatccatccacttcctattagcaagcactctatctatcttggaccatatcctttcattcccttgtcttttgttgctccatgtaaagtaactgcctcaaaatttaatgtcctccaactggcagcaatgaacacaatcaataaattcagtagcttcattatatttcacctttttccctatcctttcttccttgctcaatatctcattgaaatcacctagtatcacccatgcctcatttgttgctattcgtttcaaatcagtccataaaacctttctcccttccatatcattaaaagcataaacatatgtaataaagaatcgatacttaccatctaaagttgtgacaaatagatggataagttgactagtacacatgagaacacttacaatgaaactagaagggttccaagccaccaatattcttcctcca

SEQ ID NO: 224707 - DNA, 1843 bp, Cannabis indica
tatagtgattcagccagatcacagtctgcttagtctgctgttgcaaaggatttctgtcctggtttatttatgttggatcactcctttatatacaaagcaagtgtcattttagttacatagaacttaatcagttatagaaccgttttacattaaattataataaacataaaagaataaatgaagaatagtttaaatctgtttcactaaatacaacaacatgtgacttccatagtgcgagttacatgttcatattgtcgcacaagctcgcaggtttagggtgcattttatcattctaagggaggctaacggacctcgtattaaggtatctgcgttctagtcgagttgtgtacatggacaccttatcaacgttgataacataggacatgcgaatccttatcgagtcatcgagtacattgggtcatttggaccaattcattatgtaaagaatgatctttactaagtcacaagagaaggctacttagtcatcacatatatctcagtatatgcacgaccagtattgtcctgcttattttatattatgcgatgcgtaataatgcgactaaactctgccacgttcacatcttctcgtgagtttgattcaggcgatgtttattctcgagaagtcctttcttaacagcttagcaatcctaaaagaatgcgagtccacgtgtcacttttatttgagcttggtctcgaatttttaggtaaaaaattcgtattataacactattactttaagctaaattcagatgttaaagaacaaaataatattttgcaataaggtcactattaatttatgtgtatttgtatgagtgctcaaaatataaaaaaactgaaaaatttaagtttgatattaaaatttgttatggctatacatacattaaacatagggttaaacaacatctaattatgctactaaacacaatattagaattaggattatcaacccaagagtagacacaatctcactctccaattccaaccccccaaccgagaagccacccccatacccattctcaagtcaaagctattcaatgtaattgatttaagcttgagaagtaaatgggctggcttttgttctaaaccatttcaacctaatttcctatctaatcgttcccagagttatgtttcggttcagtctacaccgatcgttgaaacctcatccccaaattcgcttacccattttcgattctgtgcatgcatcttcttcaccattgttcggtgtgctcaaaggggttctgaaattccctgtgcgttcgagtttttcgggtcaagaaggtgatggtggagactgtcagaggagatatcaagttgtggttgctgccactactaatatgggcattggaaagaacgggaagctgccatggaagttgccttcggacctcaaatttttcaaggagcttaccacaacaacactagacccaactaaggagaatgccgtaataatgggtaggaaaacttgggaaagtattccccttcagttccgccctcttcctgctcgacttaatgtcattttgactcgttctggaagtgttgatgatgattccatttcaaaaaaagttgtcgtgtttgaaagcatttcatcagctttgaaaatgttagctcagtctccttattctcagtccattgagagagtttttatcattgggggtggccaagtattgaggtaaccaaagatttgatgattctgttttattatattttgaattttgtaaaagattgtttttttttttttaatattcagtgaagctctgaattctcctgaatgtgatgccatccatattactaaaattgagacaagtattgattgtgatactttcattccttccattgatttgtcatt

SEQ ID NO: 224708 - DNA, 2800 bp, Cannabis indica
atttcgaaaaaaaaaattaaaatataattagtaataaaacaaataataatactcataatactaaatatatgtcgcaactcagtagtaatttttttgaaaaacaactcagtagtaatttgattagtttaacaactaaaatatttaaagttcaaatcttaacaacttcgctttttcattggaccctaattattatttttgtctgagatccaaattaacatagagtcaattctgcatcggtaggccctttttaggggttccattgtaaaatttttataaatataagagaaatctaccatgcacccaattagaaatgatacgttagtgcactcctatttatttcggtatctgaaataattatttagttaaatgttttctcatgattatatatattgtaattatttaagacatcataaaatttaaaaattttgaaaaaaaatttaatatgccaaaaataaagttcaaacagtatgttccatgcgtgactattatattttatatgcatgtgaaatagattttttgaatattactatctatattataaattattttaaatttcttttaattttgtaaaatatcttaaataactataacatacacaaatatgaaaaaattaaattaattttttttttaaatgccgaaataaataaaatgtacaccaatatatctctttttaaaagattacattgtagacacaactcaaaattagatttcccgtgagagagagaagagagtaagatatggtaatatgatcaatatattttatcgatttatgatataagatacacaattatgacatggttgtgatattatttaaagagttgtgtgaacccaattcatttaaatacacgtgtgtacacaataataataataataataataataataataattattaatatttgaaaaattctaagatgaactcatataaaaagtgtatactttgatttatttccgacatttaaaaaaaaattaaatctaatttttttatgattatatatattgtagttatttaaaatattttacaaaattttaaaaattcaaaaaagttaacacgttaaaaataatgtttaaattaatagtctgttacacatgtgactcttttattttatacaataaaataaattatttgaacactacttactatattgtaaattattctaaattttttaaaaattttgtaaaatatacgtcttaaataattattataattgtgatgctgttgtctttgaggatgacaataatcttggtttgggttggattgctcgaaatcataatagtttattcattgatgccttggcggttaaaatttatagtcaacccgacccgtttatggctgaagctataacgttgaaggaggcgctcagttgggtgaatgagaggtgggtagaggggagtgtgcctgctggtgtggttatggagtgggacttgctgctgctggtgcaagccgtgcaacagaagaagcaattgttgtctccggtgggacttttaatcacagactgtgttgctcttatgcagtcatatcatttgtaacctatttcaattaattttgttaaacggttcgagaaccgaacgactaactttttagcttgttcttctggttctattcctgactatgtttcccgcaggggctatgttcctgttggtttgaaagctattttgatagctgatttgatttattaaaactggttcaaaaaaaaattattataatttaaaaagataaaaaaaattaaagaattaatttctttctaataagtcaaaataaataggaagtgtgtcagttcacccctttagatagagaacattttattgacgaagaagcaaaacttcaaaaatctataagatcaagtatttggtattattttcaatttgtaacttgttttttttttaaaaaaaaaatttttaattgaagaatttcatactaatatatgaaaatttaatataattaataatatgatgtattattccactcatcatctattatttttgagatgtaatcttgacttctgactattaaaaaacattatttacttacacatagttattagtaggtaaattatataaggtattttaaatattgtatttgacaaaaattatcgattacactttctattttattaaataatataaattaaactctatattttttaaaatagtaccctgaactagttaataattatttatcattttaactattcgcgttagaaattatcttcaaattagtttatattgaaaaaaaaaaagttatcgatattaagctcatgatactattttgtactattttggaaatacccattttaaaaatacaaaatctaatttattattttacaaaacaaaaaattgagtcaataatatttacaaaacacaaaattcaaaattatattaccctaaattattggctcatatataattcttacttaccatacattaattattgcatgttattagagtgtgaaaatatacatatttaatacagcatttacatctcctttgcgtgagtatattaatttgaattaattatttaacttgaaagggattgcattaaatatttgaacaaaatctacatgatctcactctgcatattcatggttctttaaaactattgtactacaaaatgtttgtatgtttaaactatagctactataatttgattatacatagtggtttgattacataaattgataatgacttacatacaatagcggacccagaatttaagagaggacgtattttttttaagtgagaagagggagtgcgtactattttttttttctacatgatatataacatattaaaaattaat

SEQ ID NO: 224709 - DNA, 1074 bp, Cannabis indica
tttttttaaaatataccaaagaaaattttactacggtaattatttattgtggatattgtcacttaaaaaaatatacatatatcatataagagcattattttagttttaatcatttagcaatgtaaatatatatatcgataaaaatatatatgcatatattatatatataagaaaatcatcatcgatcaaaaaaaactttgctatagtttatttttcataaatattattcaccattaaaaaaatcgttgcttatttctttatttttggctctagatactgtaataaaatcccaaaagttaacttgtcatttgaatttcaaaatatttttggttagcctatctatgtgtcaataattgtttacattattcgtcctaaaaatctttatccattcgagcgtcaattattatatctttccaactcctagagtgacaacccttcctctttttaaatatttcaatacctatgagaatttagagttgagaatttttactttaaagatttttcgatattatctggaattacatctgttgtaattttttatatagtagaaaattcttatgtagtattttttagagtttacaccaatattttattttgtttcgattaggtagagtttgttttgatttcttcatcttggtaatattttgttatccgcttgaattgctagggattagcaataagctagttggggtcgtgttaagtagtgaaaaaagcatatttaatagggcaaaaatataaaataaaattaattctatataatattttcatgaaattactgtaatatatttttatttgaaattattatagtgttgagttaatattgtaagaaaaaataacattttatgacacaaatagagaaaaagaaataaaaagttaagaaaatgtattattttcattacaaattaattagattttttaataaatattttcaatgacacaaagtgataaatttgatgtttgaaatattttttttgatttaattttgtttgtgtttaaatgaaaaaaataatatttgtgaaaagaaaagaaaaagaaaaatggtaaaaatgaggctcaagtacttgaaagttggta

SEQ ID NO: 224710 - DNA, 2865 bp, Cannabis indica
ggcccctccggatgcttgccaaaaaaggaaactccaaggactttccttaacaagcatcaggtgcgaaaatcccaaaggcagcgacagtaaaggaaaggaaaaataaaaaaaaaaaaaagaagaaggagaaaacgccgagggtggaaacaaggatcgccctatgccttaaaagcattatctcgacgaaagagactcaactataaaaaagcaataaaggaaaatagcaaggacacgaataagagagattctacacattacacagaaaattcagtcaaagttatttcccagaaattcagcactcaacctagacattctaatcatgctatacaaacaaacagtagacgagcatagagtatactgaaaacttacatgaaggttgagagttgggggtcggtgttcatcgacgatgcaacgaggactgacaacggcaaaggaagagtagcaagaaatctatgttgccctgaattttctctctataaaggctttgaggaaattcggcaaactagcgaaagtaaccaaatgaaatgagaaggctggcttttataggccagaacgggtgtgaagcagttgtgattaggcatcatcgtacggtgagaatagcaatcgattcgcattctgtagatctaacggttgggataagcgttcatcaaggcggttggaaacgcttgagtatttgactgacacccattaaatgcgtcggatcattaatggatgggaaacaaatcattgcctgcaaaaagcaaaaaactgtaataatgattgtcataaattgttgcccttaattttgccaaaaatacgtggaccaatgcgaccacgacacatggatttgagaaatatggttctgagataatttgactaagtctttgtggatcaagagtatcagcaggaagatacctcccggagaagatatgaggggtccacgtactcccggaggacagggctatagcaaagcacctccgggaagcaccagaccccatatgaacagtcacctcgcatttaatgccgcatgggagaaggcgtattgaaactgccataagcattaagtctgacggcgtaacccctcttctgcagctattacgctatgattaataagcctagtgacggctactttatgagggatcacatcagtcaagaagggataaaggattatatccacctaaccctaaggtacctaggggataggccatgtatttcccatgttacatctgctgggaatgtgtgcccctacttaaaatacacagaaagtctagaagtacaattctagggatcacccaagaaaaacactataaataccccccaaacacattaagacgggggtcgagaattctgggtttcataagaatcaaagagagaaaaactaccaagaacattctctgtaataaatacctcataaataaaaaagactcgtgaactaaggctcataaatgccccaaccacgtaaaaatctcatgcattaaacttcctacagctttcttatatattattaaaatcggttgtcgaaaacctcagtcaacaggtacattttctattcgtttcatcattcacgaaaaacttttaatctaatttttttgggaagaaataatttagaatcacttgtaaatttttaaaatttttgaatagtttataattccaaaaataatattcaaatttgttgttgcacgactttattattttgtttttataaacgcataataaataattatttgaattttattcctcagtactaaaattattcagaatttttttaaaaatttagtagttgtaatatattatattataatatatcataaaaatgactacaaaacttcttttgatattgaaatagataaagtgtgtaccaaaataatttttgtttacttatttacacttagtgagtgattgatactacactcaattctactcctataaatattatttacctctcttagtctcttagaaactttctttctatttttctttctcaatgtaatttggcttaacatgcttaaatgtaaagcatggtcttttaatataccatctaattagaaatagggtacctatacttttaatatattttcatttctaaaaataccctttacattttagaaaagcctctctctctaactctctaactctctcactctaattaagtctctccatctacaccctgaagccccaacatccacaagatcaaccaccatgcaacctctataatccccacccatttcgagagttctcaacccatcactcattttctgtgttttattctgggtttcacgatgttactaaacatcgctacacatcgctaaaccattgaatcacactgaattattcacgataattagtgatgtcctttgaattttttagtctcatattgtaaatacattgctaatcataactaaatatgcaaaacatctaatcatcgctaaactttatccataaccctaaatttggtctatcattgcaaatacatcgctaaatattacaaaatatatatatatataaaaaacgagcaatgggtgggaatttggggagtttcagggtggttgtgtgttgtacccgaaagttagtattttaatatttaaactcacaagtgcacaaatattttcagaatgtaatgttcatgtaagtatgaggtcgtacttgtggcagttaactaacataaaaaattattcaaacaaagaaaggatattctaacctagttccaaatatttgatgggactttgttttataaaaataaaagacaagtaatattaaaatgaaaaatgaatgaatataaaaattggttttcaagtaagattcataaaataaaattattaagatattagaatccacaaaatacaagttcaatggtatttacaagtatattaatgttgggttttatgc

SEQ ID NO: 224711 - DNA, 1209 bp, Cannabis indica
tgcaacataaaatgttatttctgatttttattaataagtaaatcttattgtattgaaatgagttttatttagggcacaaaatccaacagctttcgggattccttgagttctaggagcttgtaactcctccttgggtcccttgggattaacctttgacacgtcctgactgtaagggtcgtagacgcttctctatggtgagctgtaaattcgttaagggcaaatggatcattggggcttgctgatgtggcgatcatgtggtatattaaatgcccttgttggttcatcacgcgtgtgctggggcgcatctcccaaaaaaaggtggaaccgacgacagggtgatttgaaaagatcctcctttattgctcgctggacatgaggcaaatcatggcaaataaatgctttcaaccctttcaactccccagttgttggatataatgatactttgagaaggagatttggaccattgagttggaaaatgcttaatttcctcttgcagtataaattggttaagacgattttttttcactttttccacacttcgtattttcatatccttcattttcttagtttcatactagactccaaatttcttttgcaagcttttcctctcccactatccttcactagtggatatcagaagatggtgagcgtttaacccaacatttgttaaatcttttgcgagtatattttcagatattgaaccccttcaaattgacctaatataccccctgccagatgaaagttttgacttccagaccagttgcaactgtctaatggattggactcgaaggctttaggcaaatttctgcgacagcaccccgtctcttcttcaccaaatttttattatttcttgtttaggataaaaatttctcattcaagctagggttatgactgttttcatattgattagtgaagtaggctatgtgattttttcttaaactttgggatggccctgtctaagaaacgcttcaccatgaaatggaggttagaattgtttggatagtttttctgagtatttgagtttcataggtttatgcatgtatatagatttttggggtttgtcgattggaatgcaactttggcaaatttttattttgggttctcagtttgtcacttcaagtagtttggtttcccttcgtgtttgtgttggtagctgttgactggatttttagccaaccgacgcggagtcgtaataaatgagatttagac

SEQ ID NO: 224712 - DNA, 1708 bp, Cannabis indica
aatttttttgttgtaactaaaaaccacatttaatcacaaaaaatatttgttgtgactcaaaggttatcactaaaaatgacaattttttgtagtgcatacttaattttttatgacacaatgaatatatatatatatataattatagaattaaaagagagaatctaattacagaattctaattattcatcaacctatgtttaataaaaataatttatataatgttagcccataaatattttgtggtatatttctaaaaaaatcgtgtttttgcatatactaaaatgtttctttaataacagtaaagaaaaaaataattgtaagttcctgcaattgcagattgaaagcatgttactgcagaacacaaatttgcagcaacaaaatagaaaaatttgggtatctctaggattgaccaaccagtccaccggttgactggttcatctgttctagcaaccggtctgctggttctgatatgtaacctaaaaactcaaaaaaaaaaaaaaattaagctatcttcttctacaacatgttctaatctcaaccaaattagcttaaactttctagaacaactcaataacttaataatcattgatatatgtaacaacaaaactcaaaacagaatatttagaaaatgaaaatagaaaaagaataaaagcctcagactaagaatgcttgattaatcattcttagcagagaacattttattatatagtgtatgaacaaacaaaatacaattaagaattctattataatagaatttgttacattctgacacaaaagaaaacttttaaccaacaaactaactaatcttttattggttatcatcccccctcaaatgaaaaggggtacaagtcactttgagtttgcttttgagataatgaaaatgttcctttggtagaggttttgtaaggatgtcagccacctggtcaatgctgggaacatgtctaactgagattttatttctcaggatttgttctcttacaaagtgtaagtctatctcaatgtgtttgtagtgtgcgtggaaaattgggttagcagctagagcagctgcaccttgattatctacccaaataattggagtgtcttggagttgaaagtgaagctcataaaggagtgagagaatccacttgatttctgcagctgcattggccagggctctaaattcagattcggtagaggatcgagcaacaacttgttgctttttagctgaccaagaaatgaggtttgggccaaggaaaactgtatatccacctgttgatcgtctaccatcaaggcaacttgcccaatcagcattggaagagacttgaagagataacctaggaactggtttgagcaataacccttcatgtaaagtgcctttcaagtaccttaggagtcgcttgcaggcatcccaatgcacacttgtgggagcatgaataaaatgagaaagtttatttataatgtaggcaatatctgaccttgtaagtgtgagatattgtaatgcacataaggtacttctatatagagttttatcttccaatggtgtcccttcatgcagtgaaagcttgtaaatagtgctggcagtattggaacaaggtttagctccctcaagatggacttttacaagcaaatctgttatgtatttgctttgagacaagtaaaggccttctgtggttctgtgaacttcaactccaagaaaatagtgaatggtacccaggtcttttaacacaaa

SEQ ID NO: 224713 - DNA, 1670 bp, Cannabis indica
cgtaacctcgaacagcgtcggtagcgaattttaccaaaactaacgctaaaagcccttaaaaactgcttctaaagcccaattttggagtagtgaggggcatccttagtctccccaggttattcttactgagcgttttgagggtccccctttgttgtatcctggctcatggttcaagttgctgcgaggtctgcctcatggcctcgaaccttaggattaagttggttttgagcgtcattttcctaagctgccctggctgcggctgcctcttgctccaactcagtgtttcttcagtttgcctcctccaattgtcacttgagttggcagttttccaactcaactaacggaacatacctattggggacataaaaaaccccacttctaggagtgttgcgctgtagtttctaggttttggccgccttcaggttggttactccttgaacgtgtcgatcgtgttgttcgtgagttgggaggccttcgtgagcccgccggctcttttccaggacggtgagtagtttctccaagttgaatattgtcattttccccattgttagccatggagaaaagtttttcttttggtcaggatggattattctgagctttttttttttcatgtaagctctcaatgaaagaaccaaactattaacgcagatttttgttaacgataataagcctatttcgtgataggataaacacagaaattagttaaaatctaaaaaggaataataaagcaaaaacaacaccaagtttttgtgtggttttgcagttaactctgcatagtccacgagtcaatcatattcaaattattctgaaacaaactagggtttttttctctcaagaatttttcgtcccctattctgtacattctgcccctatttatagtaacatagggtggcaattaattacattatgatatgaatcccacaataatattttcctaaaatcgtgggccttaattacactccacgtacattaaatgcagttatgatttgaaaatcatacaactgtgatttaaccgattttaatggatcaatgttgatgtggatttagatacgctgcaatgtttatctcgctggggcatctcgctggaaacttgaatagcaaaaataaccctggcagcgagttgaagcttttcccatgtctttccgaggttgataatgtaaatcccgccagctctgcgattgaagacataacgctccatctgacaatcgcagttcttggtgacaacgtgaactccgaaaaccaacttcatttgaatgtcagcttctttctgagagagttgacgcgacgtagctgtggatctcattgaaagatatctagaggtgattagtgaaggtaccaataatatgtcttcctatagtgatatagatgtctcgccaatcgctattcatgtccttcatactgttatacttagttactataatatatattatacgctaagtgtcctaacatcaaacacgtctcattaacacctttttacacatagcaaggttgatgccttgctgtgcagtattaagacttctgatgcgaaatggtttctcgtcaatacgtgaaataatagtttgcatttccttgtctcgctgaagactgtgcagtctgcgagttataaatatactctattaattatgcatttaatgagttattactttaaatatcttttaatataattgtca

SEQ ID NO: 224714 - DNA, 1978 bp, Cannabis indica
gagttctctttggaccaaactaaatgatcaaaagtttgagtaatgttaagtggaatagctttgatcaaagcacggtctctttcctcaaaaaggtcacttagaatttcatcatcccaagttagctcccctgttttcataagggaattgacagtagcattaatcaaggacgggtgggaagaattaaccttgggattttcttcatgtggaagccatggctctccaaggatctaaattcggctaccatcacccacacaccatctaatcccatgttgcaaaagcgactgagattccaagatacttctccacacaaaactcgggtttgaacccaattgagcattaagaaaattaccattaggaaaatatcttgctttgaacaaacgagaggctaaggactgaggacgagtaagcatacgccacccttgtttgccaagaagagatagattgaagtctcggagattacgaaaccccatgcctcctcctcttttatgaaagcaaagtttgtcccaagccatccagtgtatgcctttattatcatcttgtgaggttttccaccaaaacttgcacattgctctttcaatatcattgctaatctcaagaggaagtaaaaatacattcatagcgtaactagggagcgcttgaacgactgattttataagcacctcttttcctcctttagacagaaactttccttcctatttctgtaatcttttcttcaccttatcccgtaagaaacccatcactgaagttttattcctactcattgtactaggtaatcccaaataaaaactaccttcgtcggccacagccatatggaggtaattacaaatctgcgtttggataggatgaccagtattgaggctgaagaagatagaggattttgcaaagtttacttgttgacccgaggcacactcaaacttatgaagtaactcttgaattcgttgagcttcctaaagtgttgctttacaataaaggtagttgtcgtctgcgaagagcatatgagatattcttggtgcaccattagcaactttacaaccatgtatccacccatttctttcatacttataaagtaaagatgataaaccctctgcacagataatgaacagataagaagatagaggatccccttgccttatgcctctagaagggcatatcggaccaacctcataggcatcatggattactttgtatttggctgtcaaaacacaagtcatgattagacgaatccaattttccacaaagcccatctttcttaacattgcttcgaggaaagaccattcaatcctatcatacgccttactcatgtcaagtttaagcgccatgaaacccgtcttcccttttcttttccgtttcaaatagtgaaggacttcaaaagacaccagcacattatcagatattagacgcccctgcacaaaagcactttgagaatcagcaataatctcactcatgaacgacttcatctggttggtcatgactttagtgattactttgtataagacattccacagagctatcggacgtagatctttcatatgttgtgggtttttcttcttttggattaggacaatattggcttccccacatccatcttcaaggacgccatgctcaaaaaaatgctgaaccgttcgagtaacatcccatttaacaatttgccaacatttttgataaaaagcaggggtcatgccatcagggcctggacttttgtctggatgcatttgaaaaacagccttccttacctcctcttccgaaactggcttggataactcttcattcgcatgacttgggacaatagtcgagacactatcaattacctcctgtcaatgtgtgttagcagtggcaaaaagagagttgtaataagaattaatcacattagctagcccattattccaatcaacccaagtaccatgatcatccttaagttgcaagatagtattgtgttgtttacggctactagctgttttatgaaaatacttactatttt

SEQ ID NO: 224715 - DNA, 3580 bp, Cannabis indica
tcgagctaaagcaatggtcaaaacaactcgaatagttattggtttcacaaccgggctaaatgtctcagtgaaatcaaacccaggctgttgatgaaagcctttggcaactaatctcgctttgtgtctattcacagaaccatcagcattgagcttctctttataaacccatttacagcctatagctgtccttcctggaggtaatctaacaagagtccaagtcttgtttcgaattagagcaagcatctcatcagacatggcattgttccaatgcaaactttgtaatgcttcagcaagagtttgaggttctctagagaccatgtacaccttaggcttagtgattccagacttacttcaagtttgcattggatgagaattcaatggacagctgctgttaccactggaagaagaagcaacagtaataggaacaccatctgttgcagcagaaaatgcaggaacagcagtgacaggaattgcatctggtgcagggacagtagcaggaacatcaacagtaggatgagcaccagatgctgcaatctcaacaggaataggttgagtagaaaaggctgctgaagtatcaaaatcctgaacaataccaacatcaacaagatcattaaattgactggtgttaggtgttgaacatgtaggagaatggtggttatcaataggaacatgttggtcagaagcatgagaatgcatagaactttgtggagaaatttgagtagaagagtgtatgggattgacagctgacctgttagaacttgaagcagtaggaatgattccagtagttaaaaaatcattagagtaatgaacaggtgtagcatgagtaatagaatgtttttcaaaaggaaaggaattttcatcaaaaatgacatctttagatatgtacattctaccactcgagtccaaacacttataccctttatgattgagactataacccaagaaagtacatggggcagacctaaactccaatttgtgtttattatagggccttatgttaggaaaacaagcacatccaaaagttctaagagcttcataatctggtttttgcttaaatagaacttctagaggtgtttgattcctaagaacaggagtaggcaacctattgtgaatatagacagcagctctaaaagcttcatcccaatacttaagtggcatagaagcttgagctaacaaagtcaacccattttcaacaatatgtctatgttttctttcagccaaaccattttgttcatgggtagtaggacaaggatgtctatgtaaaactccaagtttattaagaaaaggtgtaaagcttctatattccccaccccaatctgtttgaagagcctttaatttagtgccaagttgcaactcactttcagctttaaaactttgaaacactttaaaggcatcagatttattttttagcaagtataaccaagtgaatcgagagtatacatccataaaatgaatgtaatacttataaccactagaggagagagtgtgggagggcccccataaatcagaaacaactaattgaagtggctcagtgtactcggtttcagatatttttgggaagggaagtttgtgaattttgcctaaacaacaggcattgcaaactttattactctcagtattttttaaggacatgttacatttattcagcacagattgaacaaccctagaagaagggtgtccaagtctgttatgccacactgaaaaaacagaaaagttattgagagtacaattcgaacaagagtttgcttcagcttttacaccagaaggattgacagtgagactatggttggactgatctgggatgtaggggagtgaaactgaagttgagaggcatcaaatgaatacaggccattccgatgtgtccccttcagtaaaattgagtggctctccttgtccttaaccaaaaaaaaaaatcatcaggaaactcaaaatagactttgttatcttttgcaaacttagagacacttaataaattcttagtaatgtcaggtacatgcaaaagattattgagcaaaaagaatttagaggagtaaggtgtggaaaataaagattgaccaacatgttgtattgacaaacctgcaccattacctacaaacagtttctcggctccatcatattcagcaccatgtgtaagatgttgttgttcaggtgtacagtggttcgtggcacctgaatcagggtaccagttgctgtcttgagcagccatggtgctagcaacatgagcttgtgcagtgttgttggagttgagttggcttggtgatcctccagtaaaagttttatcaaacctgtagaagcagtcttgagcagtatgcccaatcttgaagcacaattgacactgcaatttatttgtagagtttgaaactctgccaccacctctgccataattggaggatgcaccacgatcataggctccaggatatggtccactgagtccacctccacgactatagccacctctgtaacctcctctattagctaagaactgagatggatagttgaacctggagggagtttgctgtctataattgccaaaattacgattgaaactagtgagattggcctctggatgatcaacttcgagagaggcaacttgtgcactgatttccacatctcgatctatcttctcaattctagattcagaggctagaagaagagattctatctcagcaacagagtatgtttccaatctggtgttagtggatatgacaaaagtgtcatattcacttggaagccctttgaatatagcagcaacatgatctttagcagtatagacttcaccaacagaggcaagcaaatcaatatgatgtttcaccttcaagagataatcagataatgacagggatcctttcttcaagttctgaagtttagtgcgaaactcaagcactttagcagaaacttgcagagtgaagaatttctcaagtgtggaccatatctgctgtgaagtttcgcatccaaccatgcgagtaagcaggctttcagacattgaggacaggagccaggacatgagaagctggtcttgaacctcccaatcaagataagctgaattgtaattctcagagatctgatctgcttcagagagaaattttgcaggaggatcagatttaatgtatctttgtaatctgttaccacgtatggcagcaagaacctgttttgtgatcatttagacgaattgaaagattgtgcgtaaaataaacaggagaaaactcatcctgatcttgagttcttgaacgactgagagttggtggtcgattcacaggttgagtcgagcctcctccattatcgacatcgacagtgttattcctcgaaccattgagaccagctcctccagaaaccacattcgccattaatggcggaaatagctctgataccatgttaaatctcttagacatagtagaactgaagaaaagaaacaaggagaaagaaagagagaaaggcagagaaagaaaaggatgaagattaaaagagtaatcttatcttattatgaacaatagttcagaatatatacaagtgaacacaaacagaatacaacaaccaaaatcagttacaaccgaaaagagaatgactgagctgatgtacagct

SEQ ID NO: 224716 - DNA, 2903 bp, Cannabis indica
taacctaaaaataatactaaaaacaacctagcacacaacagtactgaaactattgcagcaagttcattcaacctcgtagtttgagcactaactattatgcaaggtacacacttcactattaacaactcattcagtcccagagaacttgttactctcaaccactaataacgatttgatggcgaaccatcaaaaaacaaagaagaaccaacaacgaaataaagcaaaataaaatcatgtaacacaaacaaagctaaaatactcaaaattatgtcacagatacaagactaaaacactcaaaaccattacacagagacaagactagtcacaatagtaaaaatcacatcgcaatagcgaaatactatcccgactaagccgcacctatgcttgtcggcctggccagggaaaaaagataacctcttgtagcttgttcgataaattcagtacgcaagtatatgcaatcaaatagtaataaaataataaataaagatcgttcccacaaaaatagatttaccaactaccaaaaattaattcctatatctatttgattaacaattaattgatttcaagaaaagaaaaacaaaaaagtaaataataaaaattcataatctaaaagagataacaaaattgacaaatatttcaatagatgaaaatcagagcttttaatttcatcatctattcactctgacatttcacaataactaaatcttaatctatatacattttttttacgtttccgtaataaatttaaacatgtaaaagatattaagcataaaaaatcataattactacacaaattttatagctattctcatcaaatatgaaagtttatgtctaaacaattatattaaatttaattatcacttttaagattttgaatcaaaaacttaaatcatgtacatggtgatcaagtatttacaaacattaaacataaattgcataaaccataataatgaagaagaaaatcaagaaattacactaaatcacaatcaaagttttaagaaactcaatttaaacccttgaaaaagtatttaattcatgatcatggtagaaacatcccttgaataataagaattagacatcaaacataaaaaaatagagaagagaaaaaaaaataactagttttaagtcttcaatcttgatcaatccttcacctctatccccctttagtatttttttttatgttctaatgttaatttctcacttttcttgtgattatttggctgaaaacttaagtctaaaaatcttaattaactatgaaattcctaactataaggcccaaaccatacagatttgtacttgtgtggaaaaagtttgtatttagggattgattgttgttttattgtttaggtattttcttacttagaactctcctagtaaaataagcataatttttataaaaaaattccaaatgtattaattcaagatgcgttagaaagttgataaagaaattaaaaacttatactttttaaaaaatctgatcaaaacatgaccaaatttaggcttccaaagtttgcaaaaataccaaaataacaaattaatactaaaactaaacaaaatgaataaaaaaactaaacatatgaaaataaacttaaaagcctctaaactactgcaaattcaaatgatttatgatgaaaattaattctattttataaagttattatagttataaatttagaaaagaaaaaatctaattttttttaaacttagcttatgaatatataaaaaagattaggttatgaggtggaggatagatttttgtttttgtttttttgtttttttttttttggaggaaagataaaacttatttgaaaatatgagtaataaaaggttctgtacggttctgttattttatttttatgtgtgaggctaaaaagacgccccgtgatgggtaaacatgttatgaattaaataatcaacggtgatgagtggttaaccaatggcaataaagcacgcggatactcccacgtggagtttggtgctgacacgagggctcctttattctaaggatctctagaaagtctgagggacgtgctaatgagctggctacgcaacctctgtctcccatgggccccaccatttctgatgccacctacgtggcacacgtcatttactagggaccacactcaccgacatctgccaaagcgggtgggtctctgtgtacgtgtctgcatactttgttttttcctttttctttttttatttcagaaatgctaacttagctaaaccgcaaacccaactcaggacccagcttcttacttttcaaatttacttttaactgtaaactttggtaactttcaatacatatgcccttccttttgagctaaataacaaacaattgccatacccactgccccacaagttcaaactattatggtagttttgctatttatcatcaaacaaaggacatattatatcactggagtaatattttttttagtaaagtgtatacgtggcagataccagaggtaggttacgttttcagggccaagaagtgcctggttggcaattgtcataatacctgctgagttttctctcgcgtggctgattctctctcgttcgattaatgaaatcgtagccgttagttttgatagttacatcataagtcggtcccactgagtggatttaattttgatttgttgggtaagatgtggatggtgacctgtgctcctacacgcgggccgttgatggggtgacttggaaaagttcaaagagtcagcactgcctaatggacggtccagattcgatatagcgtgctatttgagtcaaaacagggtacgtcagacaaggagtgcactccgcgttggatagatcgggagaacaaatttgcaattgagaaattactccattaccctccttctgacgcactcattacacgcgcccttattaatttttttttctttttt

SEQ ID NO: 224717 - DNA, 796 bp, Cannabis indica
aatttggcggtccatggttgatcctgggagacgtgaattttattccgagtaactctaagcatgtaaggtctaaagggaaggatcaattcctcccatttaacactgagttaatcaataaccatgtgttgattgacttgcccattaaaggtaataacctaacctgggataaccatagagatggcgcgaatcacattaagtcgcccattgataaagctctagtcaatagggattaattacggcttttttcgaaagtggtggtccagtcccaccacacttgtaattctggccataggcccttgtgtattagtactgtgggctctgtttctagagctagacgacctttttactttgaggcgtggcggaccagggaccctaggagtactttggttgtggaacatgcttgggctttaatgtttcatagttgggccccagtcagagttcttaagaaggttggtgcttcccgcttggctctgagtaagtgcaatagagagcaatttggtaagttggatactaggatctctcaactggaagaacagctcatgaatgttcaaaaattatcgactgggtctaggtgctggtaccaataagtggagacaagaaaggcccttaatgaggctcttgggaggaaaacggtattttggcaacaacgatctcgtgtgtcgtggatcaaggatggtgataagtgctctaaattctttttcttaacggccaccatccacaaccgtcaaattgcagttaagagtatattgaataaggacgaggtttggattaccgataggaaggacattgggaaaga

SEQ ID NO: 224718 - DNA, 1568 bp, Cannabis indica
aataacatgttagaagagctgtagaaagtttaattcagaaggtttttacgtggttgggacattaatgagtcttagtccacgagtcttttgtattaatgagagtatttattacagagaatgtttttggtggatttctctcatcttttctctcttggattccttaaaaccaaattgttcgaccccttttcaatttgtttgtggggtatttacagtgttgttctgtgaggatccctaggaatggatcacttgtctttttgtgttagcttcataggggcacatatccccagcatatacaaaataggaaatacatgccctatactgtaggtatcttaggaattaggtggatataatcttttatcccctcttgactgatgtgattcctcatgatgcagttgtcactagactcatcgattatagtgtaatctccgtgaaagggggcttacgccatctatcatgtcgtttatggatttttcaatacgtcttcccccatgcggcattaaatacgaaatgattgttcaagtaatctctatacctcctgaaactgccttagcagaactctagcctctcagagagtaaagatgtgtcttatgctctcctccgggaggcaccttccctgaggtgttccttttgtgtctaagacttagttgattttcatgagtgatgattcatccagatccaagtgtcacttttatccgtgtccacgtatttagggaaaaatcaaaggcaatatttacccccaagcctcagttagtgaaagttaagtgaggcttgtttgatgcctccgattggcatgttggtataacggcacgggccttaggcacgtgggctacatttatgatggccatcattaatatttatttccttttgcaagcaacaatttgcttaccgtccattaaaaaatctaacgcatttaatctgagtgtctgagaggtactcaaatgttttcaactgccctggcacccattaatctcacccgttggattcgtagattgcgaatcaattacgattcccaccgtgcgatggtgtctgatcacagctgccttgcaccccttctggtctataaaagccagcattttctcgacattgggttactgtcgctatctcaccatttcgacccaagaacctttgagagaatttcagaaaccatagatttcttgttgctatttcttcgtcgctgctagtctgcattctaccgtcgatcatcacgacttcccagttctcgacctttatgtaagttttctgggtacattttacttttgttgtccacttgcatgttagggcagagtttttcaaaaaatttggttgcatttgatttctacggtgagatgattttggagaagaccgccgtattgcgtatcttttcatctgtgctctactttttcatttggacaaacaaccttttttgctttgagattgttaagagtatgaaacggttttcatactcaagtcctctctttttccttttctttctctcctactttcgctgcctttgggatatttacacccgatgtttgcctcggagaatcctcagattttttatttctggcagacatccggagggggcctct

SEQ ID NO: 224719 - DNA, 1688 bp, Cannabis indica
ctcgtgttttcacaagtaaaaaatttggttaactactcttcaacagcagatggcagaacattgggatggaaggttcaaagtaaacattaaagaacatcactctgatcttttcatgctttgcttcggctgtgaaggagatcgaatgcgagcattggagaaggagtcgtggcacttccaaaaacaccacattgtcctacttgatccaacattgcagcaaaatgtgactcccaaaatcaaaatacattctccattttgggtacaagcctatagactacctttcttgagtaagtctagatctttggcctcaattttgggtgaatttctggctgtccacgatgattctctaaatgaaggttggggcccttttttatgctttcgggttaaagtcgacattacgaagccccttttttcgtggtcggatgattactcttcctaaaatcaaggaagagttttgggttgagttttgatatgagtatttaccgaactattgtatggaatgtgtttgaattggtcatctttatcaaaagtgtcctgtttttcttgagaaattggataatggattggaacctgaactaccctacggtcaagaacttaagggatcaagattgcctacttcttcatatgatcgctaccacactgattttcacaaaggtaatgtttggcctttactcactcgcttggccagaacttcactaactgcaactctccctaaacttcactatattccccaaccatagcctaatcccttactggtgggagaatcttcaaattctactgaagttacacaatttggcaaccaaccacagaatatttcaaatgtaaatgttgtttccactagcactaacacttacccccaaaccactagacctctgactacaccattgtctactccacctttacttaacaacattttcttcagtaagtcactagattgtacccttactgttaccagcaaaacaacccaaaccattgactctcactcaaaaaataaaggaaaaaaatgtcctttcttctagtaacagcccaaatgttcctgttatgattgatgtttatataccagatatagtgagagacaccaatgcaaattcaagcaattattcatccaatgttcttgctacatatccccctctaacaaccccaatccatggccaaacacttccactacaaccattgtctgcatctactgtcacctctacagccatctcaactatatctcctactagtttgcacactacaaagacaatttcaagaggctaggagaatgctcaacccaaccgcgtagtcaagagacaatttgacaccgtctatgagataaactcttaaaagatgtagagccaaccaattcgaaatggctttttccttgtcagaagaagctgatcaaaatcactctatttctactgtggtgtagattcaactgacgatcaagacaactccgcggtgattgctcagtaatctcgcgactcgccatgaaaatcattagttagaatgcacagagtttggggaacccgagtgcattctgtcgtctgcgtttgcttgttaaagagcaaactcctcatgttttgtttcttatggaggtaaaagttactgttaattctcttacttgctttaagcagtctttaaatttcaataatggcttagaggttcctgggactgctttgaagggtggaatcatgttgttatggaaggat

SEQ ID NO: 224720 - DNA, 3565 bp, Cannabis indica
ataccgagatcaaaaccaaagacccagacccggaccctgatccagacccaaacctagacccaaactcaggacctgaactcggacccaaacctaaataaaaaactggtctgggacctagaccttgattgggaccgagatcagaaccctaacctagactcgaacagggacttggacttagactgggacctgtaccaagactcaaacattaactagtattgggacctagactcggacccaaactcgagatccaaacccaaacctgaacttcgacctagaccgggacctaagattcgtatctatcggacacagatcttgacccagaccgagataagaacacgaactcggaatcgaactaggacttgaaccccgactaggtcctagacttagactgggacctaggactcggacctggatggggaacctatacccaggacatgggcatcagaactgggaccgagacccaggacccaaccacggacccagaccctgacctaggacccagatcgggacttgggacccaaagtggaactagactgggacccgataccgtgatccagatttagacacatcgcttggacgtaacccgtagtcagtgtttggatgttgaacccatacccggacactaacccaaaaccctaacccagacctagacccgtaaccctgacctgggtccgagtccgagtctgggtttgagttcaggaatttgaatttgacaatgagctacacctaaaccctgaccaggacccaaatcaaaactcaaattgggacttgggacaggaacttgatcccaaacatggacatggacccatacgctgacccaggactaggatcgggattggagactcagacctggtcctaggacccagacctagattcgggacccaaactcaaaattagaactagaattgtgatccaggaatgggactgggatccaagacacgaccccgatctcggtccctaacacagacccggataaggatacggactggaacttaagatttgaatcggaacgagactgggacaaaagattgggatccgaatcttgacccaagactcggggcttggatttaacccgtagtcggtgtctagatcttggaatcgtaccaagacctaaacctggaaccatttcctgaccaggacctaatcccacactcggaccctagacccgaaatcggtacagaactggaatcagacctggaacatgaattggacctggacccaataccagatctagacacaaaaccgaagaacccagacctgtaccaaaacccggacacccagacccagacccaaaccaagacccgaacccagacacggactgaaactcagaccctaaccaagatctagacccagacctggaccaagaccaagatccagacctagacccgaacccagacccagactcgtaccagaactcgaattcgaaccagggactcggacccagactcagactaggaccgagacctgaaccttgattgggactagcacccggactgggaccgagaccgtgacccaggatcgggaccgggaccctggactcgatactcggaccatggacctaagaaccgaatcgtgacctagacaaggacatggccaagacccaagagaaggaccagtaccgaacacgaaccgagacctacactcggactgggaccgtaacccagaccaggtcctaggaccctaacctgaatcggggaccaggaccaatgactcaggacccaagaccgaaacctatacccaaacctagacctgagaacagaaccaggacccaagacatgagcttgaactggaccacgatctagatttggacccgggacccgtgacccaagactcgaggcttgggcccgacccatagtcggtgtttaaatttgggatttagacatggacccagacccaaaccaggaccaaaaaccgaacccgtataagaacatgaacttgactcgacatgtggttggtgtttggatttgggaccaagacttggacttgaattcaaacacatacctggacccagacccagacccgaaccttaaatcgtaccatgtgacccaaaattggaaccgaaacttgaagcgaacccttgaaccctaaatcctaaactctttactagttacccctaatccctaagccctaaaatcctaaaacctaaatctctaaacactaaaccctaacctgcacacgggcccaaacccatacccatactgagatcggaaccgaggacccagacctggacccggatctagaccaaaacctaaacccaaactcaagacttgatcccagaccgaaacccaaagcagaacctggtccgagacctagaccttgattgggacccggatcggttacccgactcggacctgaaccgggacctggacttagacggggacccagacctagactcaaacctgaatacgtactgggacctagactcgagttctcggatccagacctgaacatggagctagatcgggacctaggatccaagcctatatggtggacctgggccctaaaactgatcctaaaactgggccccaaaaccggaccgagaccaaaaacttgaccacaaacttgagacatgggacccaaccttggaatggaactcaggacctaaataccgagacacagcctcgaacccagacccaaacccaaacaaaggacttggcccaagacccaggaccagaattggaacaagaccgagatctaaatctggacctcgggcttcgacctgacccgtagtctgtgtttgaatctaggacccagagcacgacctggatccagactgggatctagacacgatcccgaacccagaattggaattggaccaggtatgggactagaaccaaaacttgggacagtagcagaacccaaacctaaacccaaactcagaccaaaacccataccgagacttggaccaggtccaggacctttgacttgggacctaaaccaagaccgggacctggacccagacccagacccagacccagacccagaccctgacccaaacccaaaaactagggtcgcacctaggacctaacaaccagactcagaccaacactgacagtgggacccaaactcgcacccgaaccaaaactaggatctagactcatacctggacttgagacttgaacccgaactgaaacacgtagtttgcccctgactgggacctaagacttaaacatagataggggacccagactcgggaattgggcacacaaaccgggaccaaaacttgggcctcaaaacttcgatcgagatctgggacctaacccaagacccaaacctcgaccttggacccacctcagggcctacgatctgggactcgatgcttggacccgaccgtagtcagtttttggatctgggacatagaccaaaacccgaacgcaaactggaactcaaaccaggacccggacacataccctgacctagacccacacttgtgaaccaaaactaaaacttgaactggaaccagattgggatctttgaacgggaccaagacttgaacccagaaccggacccaacctcaaaccctaaccaagaccgaaacccatacctgaacctcgccctagaccca

SEQ ID NO: 224721 - DNA, 1494 bp, Cannabis indica
agacccaaacatggaaccagagtcggtacacaaaattggggttgggacctagaaccgcaccccagtctcggtcccaaacccaaactcggacttgggacccaggacctgaaccggaactagaccgggaccagatcagggactcaaaacaagacccgaacccggaccaggaacgaaacgcggacccagtcccaaacctgggagatggaactggaacctgaacaagaactggaaaaccaagacccttgaacaaaactaggattgtgaccaggacccggaccaaaacgtagaaccgaactcagacctagccccaaacccaaagcaagaccaaaactcgagcccaaacacgatcgtgtacctagactgggagcaagagccggacctggacctagacctgggacccgatccaagagccaaactcggacctagatagggatccggatacgaacttagactcgaacccagacccagacccaagtcgggatcgaaactcgggacctagatccatactaagaccctgacccagacccagacctggacttgcacctacgaccaaaacttggacctggacccgaacccagacccaaacctagacccagactcggacctagactcaaactaagactcagaccccaattaggcccggacacaaactcaaactcagacactaaatcgaaatcaaaactgggactaggacccaaacccgaacatggacccagatcgggacctaggacccggaccatgacctgcgcctcggaacccagacccagatccgaacacaggactcagacgcaaacttggagcaagactcaaacccagatcctgacctagaccgagattggaaaccgaaccaggactcaaaccctaacctaggacatggaccgggacacaggcatcagaattgggaccgagatccaagacctgaccctagacccagaccctaacctaggacatggacgggacctaggacctgggacccgaagtggaactaaactggtaccggagattgtgatcagaatctggactcggggcttggacctgacccgtagtcattgtttggatttaggacacatacctagactcggacccagaccctgacccaagtctgagtctaggtttgagttcgggaaatggaatcagactaggaccttagaaccagacccagatcgggacgcggacccaaatcaaaactcgaatcgggactcaagacgcgaacctaaacccaaacactgacatggaccaagacccaaagctaggacttgaactaagattggagactcagacctggacctaggaccagacctagattggggacccaaactcaaaatttgaaccaggacccctaacttgggacctggaccagatgtcagacccgtacaagaacccaaacccaaacccagacccaaactcaaaccaagacccaaacccaaacactgacagaaacctggacccgaacccagacccagacccggactcataccagaactctgacttgaa

SEQ ID NO: 224722 - DNA, 1794 bp, Cannabis indica
tttttaaatcaaaagagggaaaatattatttattaaaagaatgaaagatgatcgattttgttaaaaataatacttaaaaagcgcgctaatgtaataagtccaacgagagaaattcatgatgagttattttaatcctcagtttctaattctataccaaaacaacatttgttttttacccttcaattatttatcttgcctaaatccaaacaagaaaagcatgctccaaatctcatcctctattgtattatttatatattgtttgttatgattaaataaaaattatcctctgatcatgcccattttctttcccttcattctattacctctctgactaaaagattaagaatctattaaatgtgtatcataaataattaataattcattctaaattcaatcaactaaggagccatggtcattgtttgatagaaacaacaaatacattagtttaataaggatcagtagcgatataataagaatttgagtaataggaaaaataagtcagtagttgaagttttgtttagtttcgtatcatttttttaagatcattaaactcacctttgtatttgtattgtttttcaaactttcagagttttatacttcaaaacttcacatgtcaattttcctacaaaaaaaattcttcacaagaaggagggtagttttttttttttcttgaaaatattcttactgtttcttatcacattttatgatggttctaagtgattgagatttttcttactacagaaatatgctttgtaaaaatagaagtaaatggttttacataatggaaattttttcttatccttattttttttttcttttaatatgatctattgaactagttaaatatttatgaagaatagagaatgtttcgtatagaaatagaaagaggtgcttcactgtgaatagatgaaatttattaaaactagtttttggtgttatctcggtacaaataatgtaagaatgctagtagaaatgaaaagaggatttagtcttatgtttaaattaactttttattgggtatattctgttaaaagcaaaatattgtgtgaaatgcacaacaaatgaaagttagatagatatttgtatattccattatttttctgtattagttctcaaaatttattatgtttagtgatcaaacataattacaaatgtgattttagtgttgttatctctttcaacatataatcttgcattaaaaatataattatatatatatatatatattcaatatatattttactgtcgaatcatatctacataaattatttatattttttttttataaattatcattttctaattgttgttgtttgttgtaatgaaagattgattatgaagttaatcatttttgtcgttgacaaaattatgcttcaacaaaaaattaatacattaaatgaaaaaataattattattgttaaaaactaatggtataatgtattgtaataataacccctgaatgacttcacacatatatttttgcttaggatattatgatatttaatactagtataatttaaaaatattaaatgcaatattaaaacataattaaaaaaactaaatttcaattgtaaatagtaaaataaaattactaggacagataattataaaatcaaaaaaaatatttctttaaataaatataagccttattttatttattatatttagggaaacttttggaaaggatgcttatagttatagaggttagttttttttccacttgattcaatctttcgttttttattgtaaagttttatgcagttacttctatttttcttcgatcgtataagaggt

SEQ ID NO: 224723 - DNA, 1710 bp, Cannabis indica
ttaaggatcttgggagtgacaaaagctttgtcaaatttgtaacggcaaatgatagtcgtgtgacctaattttagacagacttgacacaaagattgagaaccatttgaaaaaaaagatcgaggaaagggcttggcaccaggttttgatccagagtgagatgtggatcctcttgcaaagggtggcttgtaaggtccatgatagctgctctttgaggaacaaattgagagattggctgacatcttggaagataaattagaaacaatgtgatgtctcttaagaagacattcatgagccatcaacaaggcttaaattttttccaaagacttggattcagtactcgacgttataccagaaacgactgagtcatattcagatcctaatccattgagcaattgaagctcaagatcctcattactaaccacatatccagcaatggctaagctatcacaaatagacttaaccttatcaacaagtctagagatagaaagattacccttctggacgttgcacaactgacttttgagttgtagaagccgagccttcgactagcttgaaaaacgttgttcaagtgttttccatagtgagtaggatgtggtatgtgaagcaagaaatgctagaacaacttctgtcattgaagatcacaaccaggagagaaatagctaatcgttgcgtttccactgtttgaaaacagagttcgaccttccattagtcaagaactttagaggtttgacattgctgaacaaaagatcattaagatcgtgaccaatagtagttggaacgacttgaaacttccaagataggaagttgacacgatcaagtttaatcgctaaggagtagcttagggaattagaaaacggattccatggttgatttgaaaaaaccagagatcatcggagttggtgtagagtgtgccatagcaggagcattgttaacatcagtgtcagattggggatcatttgaggaattagccatggacgctagttaattaactctgataccatgaaaaagtttttccacaaagaaagaacagagaaagaaagggagaaagagagaatctatgagaaactttacaaaaggttcacaaaagaataagtgagaaaaatcttagttaaaacttaggtgttattcttatttatagctcaagattacagtttaattaatacattaacacattgatcaaacaactctaataaaaataacaaaacagtaattaattttttaatcaaactagagttaaagtcttcactattaaatattttacattatgaatttctaaagtaattcataaaatatactaatgtttaccacatacatcatcatataaaaaaatttaaattttaactattcgaatatgaggcgaaaattttccaatataattttttgaaatcttcacaatgaactttctcatttcaaaattaataaaaaaaaaaagaatttcaagtaaaaaaaaagaataactttgcaaaataataaaataaaataaatcaatttaatgtcaattagataatgctagcagtcacaattggaccacgtgtggcactcgccaccctactaaatttggctgtgtcggacacgtgtcgcgaagacgttaaacaactagagattcattcacatatattttcttttgaaactagataatattttccttttagtttctttaaatggagaaagaaaacaaaaaatgatgccaatggtaactctggaatggat

SEQ ID NO: 224724 - DNA, 1449 bp, Cannabis indica
aatttccttttagatggagctttagttgattgtgataatttgtagaattacttttttttattatgcattaactaaatataaatgtaaaataatttaattgataaatgccctattttataatcaaaatattaaatataatttacataacttattaaaattagagtctctaacacaatataacttataaaaatagaaaatgaaagtgagtttagagtgtaattaggtatgcccactatactcgattgggctaaattcatttgaagttcaaaattattttctcaactttgcttaagaaatcttagcccgttgtgaagcttgtcaatttttttttttaatctttagtaatgaaataagtatcttttaactttatattttataaaagttatttattagattttttgatttattaaatgataaattagattttatattttctaaaatagtaccttaattttttattaaaataaaatttaataataacctgatcaattagtattattataagattagttacattctctacatctcttcatgttaaaaattatcttcaagttgattatattaaaaaaaattattaaaaattaacattagaataatattttgtaccattttaaaatatacatagtctaatttattatttaacaaaagaaaaagtttaatcaataatttttataaaatatacaatctaaatagtattaattcttttttatttcgtttgggagtatttttttcattttttcttcgtggtctatgtaataaatatgtactatgtccaagccacaaatcttaaagatctaccttaagaatatttaaacaataatgtattattttactatataaatagtgaatcaatgacaccactctaatttgttattgggatttcccatttgcaggagaatcttcaatgtttatctaataataaatctctaagtaaatttcaattataaaattaaatttgttgttttgtttttggtttgtgaaataagagattgagatttgatttgaattttttttaatacaaaacggtaaacgacaaaacaattgtttaaggtaccccactccactcgttaattcttattttatttcttaaaaggaaaatctctctaactaaaccaattaagaattttacacgaataaccctaactagtttttgctttaatattaaatttaaaaattatagaaatagtccttttcaaattaaatccaatgtaaatgatttgatgaatcctgttttaaattctctagtttgatcacagttttaaaaatctcaatagcggttcaaattaaacgtataattattttatatagacttaatatatatatatttttagatgaaatattaatatttaggaacaacttttaagtaaaatattgatattaactttatattgttgtgatgataattttttatcattatttatgtataataaatttattaaaagtaaaaaa

SEQ ID NO: 224725 - DNA, 1352 bp, Cannabis indica
tatgtgaattttttttcataaatattaaataatttaatattaaaaagtaaccaatcaaaagtaatcgatccaatccacacttttgcggattggatcatggattggatttgagctattgtgcggatttgattggatccaaaaaatgaaatccacacttagtgcggatcggatgcactatgagcaaaatagtggggattgaattggacgaacacccctaactagatcttggctttaatgattgtgagtaatcgtttttcaacaattggtatcaagagccaaagttattgattttagggctcaaaatttttcacaaacccattttcccaaatttgaaatttgtggtgattttcggattaatatgtttaaggttgtgtgaatatgagtattatccctctaaatgtgttcatatatgtcttggaaacaatcttttacattttctattacgatatatatgagctttaacaatggataaacctattttggattcatcatttttggatgtattgttctgtgttttttgagtaaatatgggtattggaaaaatgatagaggattaaaaatgggacaaaacgcctcaaacggatcgaatttggtggccgaatgtgggagatatggtcgggtcacgaatcaggtcgcgctgattcgagtttcagacccacggacccgtgtgtgcaattttgggtgacagggacgacagaaaaacaacatgtcatttgccaatgtcgggcaaaacaacatgtcgttcgccctattggttcagccccagccgagaaaaaacgatgggccattttctgactcttttggatgtcgttcggggaaaatgacatgtcacttctctaaaacgacatgtcgtacgcacaacgactcagccccccttcactgcgaacgacgggtcacgcatttttgatcctctggcttgtcgttcttccaccaaacgacatgtcgtttttctaaaacgacatgtcgtacgattagtgataaaaaaaagaggaagaaaatgggcgcgtgggggcgcgtgcaggggtgtttttgggccgttttccactattttcatgttttttaattctctattatttatggtatgcaaaatactaattggatgaattttattcatatttggttgataattttagtatgtggcataaattttgtgatttatttcaacaattagtgcttattttcttacctatcgtaagattaagcatgtaaaattgcttggtaatgaggaacacttaaatatttttatttaagtattgtatttttttcccccacacatacattatgatctttataagtaattaatccatcctatcgatgatggttgcttattaaagatgcttaatatggtgaag

SEQ ID NO: 224726 - DNA, 1541 bp, Cannabis indica
ttaatattatgtacgaaccaactaaaacgtaccacgtgtacacttatgtacacataggcagtccctcgtaaaaattaactgagactttttgacggatgggtaatgacaaagatagaagtgaggtttagatagttttaccgtacaaaaaaattaatttttgtggtcactgccataaccttatagcttgcgctcatattgtttattctacaaatatcaactttatgttagtttttacctcatttcctaataacatattctaaccacacgttaaaactcaggtaacaataagactaggccttcgcatcttcttctctcaaacaagcatgtttgcgactcaggtctcatcctcgtcttcatccaatttccagagtagtgatgaatctctcaactttttttcccacccatctccgtgtcgtggtggctctgcattaaaggcgattgacagccatccgtcctcccattatcagttgagatcggaatcgtcaactttgctgacgatttgggggcaggcgtgccaatccattaatgcgtcccttgtaggtttgatcccccatctgaacaaatctcatgatgatccctatttgttcttaatcattgctgtcttttccacttctaatagggtttatggtcttaattgctatgtctacctacctggtcagtggatggatttggataatcccccgcctgatctagtattaaatgtttgcctcttgttcttcctgattcactcgagtacaactcgagatatggcagatctatttgctaccatcttaattgctatatttcatctttcctatttaaactccattttaggtttatggcaagttaccttgtttgtgtttaaaccatcaatactatcttcgtatattcctatattgctgaaaatggaagacttagctagatctttttctgcagccctccacctcactgatactgaaaacacaatccattcacttgctgagcatgtcgacccaaatgagggacttccaccagccccaccacagtttcaccttatggccaccctttataccacaaaaatttttaatcacaatgccttgaaattttttttagagaaacactagaagggacaattccctgttagtgttaaagaaagagcacccaattccaacctttaccttcctgcttttcactgtgatggagataggcgtagagctatcctcaaccaaccatgggtgtttgacaaatgtcctattctgttggaaatacctgatcccgactctactttatccccagaaactatgaaaaaaattcatttttgggtccaggttcacaatatcccgttctccagacagtctgtttccttagccaaactgttgggtcaaattgctggcacccttctcgaagttcatcaatcctctctacttgaaacctggggttcatatctccgaattcgcattatgtttgatgttaccaaacctttaccccgtggtatccctatcatgtttccaggcctagcctccccaacctggctggaaatgaaatatgaggacatttctgatcactgctattactgcggccgc

SEQ ID NO: 224727 - DNA, 1278 bp, Cannabis indica
gcttttttattattaagtttattgtgctctgcaaaaaaaaagggtaaacctgtcagacaaccgtgtgaccagcccagctagccgaagatgactgagaacgatcctctacaaccacgatgatccaagggaacctcaagccgttaatcagacggtcatgattcatccactaggtttgatttcctgtctccttagaactcaaggaaatagaggtacgagtctatagaacacatcctattcaagtaaggtggtgacagtacttcctattaacttttcttcttaggttggtcaatctaaagtctaaaccctactcacactcagtactcacgaatcaccattttcaactcagattcatttctttgatccgattcacagccatggagataatctccgatttcaaagaagaacacaaagagaccaaacctaagcctaagcccaaccctaacctcaagccctccgcatccccttcttgttcctcttcctcctctgcagtgacaacttcgtttactgccagttttgacccctccaatccgctagggttcttggagaaagttttccactttgtcgctcaacatagtgattttctcgagaaagtgaccgtggagaagaagattttgtcaattgctcgcgtcgccaaggagaggaaggagaaggagaaggagagtaagaggagaaaggtggaagaggtcaaggagaagaaggttagtgtggtacctaagaatgtgactaaggtacctaagaaagaagaagaagaggaaaagtttcccgtgaaagtagaaaacaaggaagaaagcggtcccagagctcccaatcttgggaatgggcttgatcttgacaaatactcatggacgcagagcctgcaagaagttactgcatttatcccagtgcccgttggaaacaagtaaaggtcggttgtctgtgatataaagaagaagcatctaaaagttggactcaaagggtcagccacctatcattgatggggagctctttcgacctgtaaagcttgatgattgttactggagcatagaggatcaaagttcgatttctattctgttgccaagcaggatcaaatggattggtggaaatgtttggtgaaaggtaatcctgaaattgacacccagaaaggtgaacctgaatcaagctagttatctaacctggacccgggaactcgatagacagttgaaaagatgatgtttgatcagagacagaagtctatgggactcccaagcagtgaagaaatacagaaagagaacctttagaagatattcatggctgagcacc

SEQ ID NO: 224728 - DNA, 1372 bp, Cannabis indica
ttatagttgtgtacattataattgtttaagacatcctgtaaaattttgaaaaatttagaataatttacaatatagaattcaatgttcaaaccgtctattttacacgcgtataaaataataaatttacacgttcaccacattatgttatttatttatctttcattaaattacaaaaattcattctcatcatctcttattatttatctctaaatcatttgtctgttaatattgtttgcttgtttttttacctctttgtggacatgaccgcctatactactctacaacaatcgctttgtgaagataagtttgggtgtaatcacaatgttagacatctccataatgtacttcctaaagtttcattttcctttatacttcatgtggacaagagtagctaaaagcttgcttgtcttagtctttttgttcttttcaaaatattttagaaatacttcattggacataccactcctgaatacttctagaacgttgcgctttaccatcttttagacaagcgattagaacgttcccacttctcaaagttcattttttcctcaatgaaacttgactccgtaggagaagcggttgttctttccttaatgcatagtctaaatccatgtcgagaaccaacaaaatattatcttttcagctcttaaagtttgtgatattaagcatgggaattgagttcatgttagcagtaatattagcaacaaaagcagtaattaacaaattcagaacaaatacgtacataagctcacagaaaaaatttatgtcataatatattacaaaaataacataataaaataattatgtaagacacaaattttatttaattatagtgatggactcattgaaacaagatacctaatacaatattgaaatttagtctttggacagaaatagcaacttgtaagtggtacatatgttgttcacatagaacctttatgatactcatttatttttgcatgtttatttcttgtttatgatactcataaacaagaaatatatacattgtataaaataaataaatttagacaaaaaatgttactttgacaacattttatttcaattaatttatttaaaacagaggacaaaaaattaaacaagtgcatattccaaaatatagtgcataagcatataaataatttatctttacatttaagtaaatgaataaaattaaatattatgcactaaatttatcccataatgtatatataatcacggaatatgcacaaagttgcatatatatatatatatagatatatatatattatattgggattattttataaatacacaaaaataacaaaaaattacaaaaatatagtttcacggaattttaaatatttttacgatttttttaattttattttcaaaa

SEQ ID NO: 224729 - DNA, 2176 bp, Cannabis indica
ttgaatattagtggtattcggtactttttataggtgatattttataattgattaatgatatttttaaaaaactattttcttaagttatatgtcactcagtatttaattataccaatagttatataacaccgaggagagtgttataggcacgaatggtgccttttaagaattctttaagaattgtttaaagggtacttagtattctccttggtgttatactattattggtgtaaatatcgcgtcctatataacttaaaaaaaatattttttttgaggatatcgataattaattgtgagacgctacctatcaagtccaacactgatcctcaatagcaatactcttaattttattatttttaatttttttaattattaaaataaaattataaaatatatgtagaatttgtatatatttatgaacaacaatttaatttcctctgtcacttattggaattttccttttttaaaaaaatgaatagtgtatgatgggaagaaccaccttaatataaaatttatattttgagaggtattatttataagtcgtatattataagagacacacagtttaatgatgtaaaaatttatgagaaaaatactaattactctcttaatggcgattataaaaattaataactatttataggacgttatctgtaagattgtgcctcatatctgtactcatatttttgttatattattttagtactatttcttttctacaacattaatgaataatgaaattaatgatgtagatccaacaataatactatatagtttttgtaatttatcaaatatattactaatttattattattattattttaggaggcctatttgatgttggtgattagtattaatgttttctttttaataaatgtactttgttattagtaatatttagataaaactataacaatagttaagtttaataatttaatcaccatgcaacaataaaaaggaaaaaaaataaaactataaactagagcatcgagaggccaaaatagatgcaaatacgatccccaaaatttgattagatatccaaaaatttatattttttttaaaggaaatagggatatttcattaataggcacaaagcctaaaatgtctcaaaatacaaaataagcacaaaaaattaaataataaaatccataagaaaccccgaccaccaaatacgggacccatctaaaacaaacgccctctttacaagagattgggcaacgatattcttagacctttacaatgacacaaagatagactttgaaaagaattccatgcattagaaatatcattaagtacaatactaaacttattataacaaatataattataattaacaacgagaaccatacatagataatcaaagaatgctataaaattgttaaaccccaaccaaaggtaaaaggaaagatcgtgaaacaggaccattgcctctgctatgtgaggctcgaggttaccaaaaagtggaaaggcaccagagaacaagacatctccatttggagcggaaggtacaactcctaaacccatctttcaatcctcgttgcagagattggcatccaaactaggggccgagatactcctcgagcccaaattagtggagatcaggccattagacacacccacacccacacccatttgagggtcttgatacccccaaagatagttaagtgcccaaggactaaccatattattagaaggaagcttgttgtcatggacaaagatgttacgtttatgccatatacgctaattaagaataacaaactcttccaactcttgtttgctcaaaatgtgcatgcaacccaaaagaagctcatagaaactagaggcatcctttaaagtatcaagacctttaagatgtcattccgaatgaattgtgttaagggaggtgcaaagccatagcgcatgcataaatagtggtctcattatcatgaaagtaaatggagtagaccttagacacatgaaggccatggcgagtgaggttggcataagatggcaaaaaattcaagcttgccttctaaatgaagattttaatatttggttggagattaagcccctaaataaatttccaccaatgagacgtccctaaagaggtcgactcctggccccaacccaagcttgaaacagtactccaataaccactctcaacagaaaacacaccattgtcagaaaagtgccccac

SEQ ID NO: 224730 - DNA, 1478 bp, Cannabis indica
ttcaggggggaatttttaacggccaaaaaagttcaaggagcacgatttagtacatgtcaaagttcagagggaaaaattactaattagcctaataaaaactattgatgttcatataatttacaatttatagttcaaaaccctaattaatctggacaattcaagaccggaacaaatgaatccagtgtcaatgatttggtcaattcgaacggtttataattctttagttcgatcatagttttagaaattctcatatgtagttcaaaccaaaccaaactgtttaattcttgatatatacttaatataatttttttttgattgaatattgatatttagcaactaattgataatattaagtatatatcttaacacaatgttaaaatattagcaataatcttaagcctaatattgataatactttaagattgtgttaagaatatttattttcattattatttacgtattataagctttaaagtaaaattaatccagtaaaaaaaattatgaattacaaaacacaatttcaaaccaaattaatctattcttaagtggattggtttagtttggtttgagcatttaattagtctagttcggttttaaattttaaaaaaccaatattacgagtatggtttgaaataaaataaaaattcgaaccaatgaaaatctttaaatccaataatgtaattagaactatacatccatgtatttgaaaaatagtgtataatcacgtgttgtgatgtaataaatccacattttgttctacaactcaaaaaagtatactattattcacgtgtgaatgcatattaattaaaaaaaatacaattaaagtataaaattaataaatattatttgctctactaaatagtaattaagctaaattagaaatgaaaaattattttaaaaatcattctttgttttggttatattttaaagagaaattaaatatcatggtgacaaagaaccctctaaatatatgaaattgtgagacagaaaaagaaagagactactacttttataataactaaaacagataatattaacaataattaaaatatattgacctaatacttaattaagagaatgacaaaatacaatagttgtgtctaatactactttgctccttgtgatcttgctattaatataataaaatattgtgtcttgtaggatttaaaataataacttttaaaaattattaaccaattacaaaacgtcacccctaaaaagagtaagctccagtggcactctaaaacccaaacaatgctccttaactaactaatatccaaagcgctctatcagcctagggcatctaaaagagttggagctaatgttaggcctagttagagatgattatggccagtcaaagttaggaggcttcctacttggcggcgtagcccaaattatctttcttggtttgggccaatatttacgtcttgaaatcaactttgagcttgttggtttaccaccacctctagacattttaa

SEQ ID NO: 224731 - DNA, 1619 bp, Cannabis indica
caaattcgtatggcacctagagatgtggaaaagacggcttttcggactcatgaggggcattacgagtttctagtcatgcctttcggcctcaccaatgccccagccacctttcaagctctcatgaatgaggaattttgcgatttccaaggtcattgtgtcttggttttctttgatgatattcttgtgtatagcccttctttagcagctcatcttcgcttggttctcgaccgactccgtcaccatcgcctgtatgccaacaagaagaagtgtctttttctcaagctcaagttgactatttgggccatgtgaaatccgccaagggggtttgccgatccaagtaagattgaggcgatgctccgatggcccactccatcccccattaaggacctacggggttttctaggtcttaccgactattaccgtaaatttgtacaaggatacggtagcattgcccgtcctctcacggatcagcttaaaaaggatgctttttccaggtccccctcagctcaaatggcctttgaacgattgaaggaagccatgtgcacagttccggttttagcttttcctgatttctccattccgtttgtacttgaggttgatgcttccggtatggggcttggcgcggttctaatgcaaaatgggcgtcccattgcctatttcagccgcactctatcccctcgggcctaatccaagtctatctacgaaagagaattgatggccattgtcatagccatccaaaaatggcgaccgtatttattgggccacaagtttcttgttcgcactgatcaaagaagcttaaaatacttgctggaacaacgtgttgtctccctagaacatcaaaaatggctcactaagatctaggggtatgactttgatattcggtacaaacctggtttggagaaccgcgtcgcacatgcgctgtctcgtgtttcatctaaggtctccttggctgctattacagttccgggtgtgttttctactactgatttacaagctactattgcagctgatcccgatcttgctaagatcatgtcagacatcgctccgggtcaagattgtggggatttttctgtcactcatggctgtctcactttccgtggacgattagtattgccggccgcctccccatctatcccactcttactgcaagagtaccacaacagcaaaatggggggccattctggggttttcaaaacattccagcgtcttgctgctgatttttataggcgaggaatgcgcaaagatgttcaaaacttcgttgctgaatgctcggtttgtcagcaaaataaatacttagcgcaattgccggcgggtttgcttcagccccttcccttccccgagcaaatgtgggaagacatatccacggattttatcgagggccttccgacgtctaacggctttgattctatttttgtggttgtggatcgtctcactaagtatggacacttcattcctctccgtcatccctttttagccatcaccgtggcagcggtgtttgtcaaagaagtaatcaaactccatggctttcctcgctctattgtgtctgaccgagacaaaaaaattttgagcttgttttggaaagaactattcgtttacaaggcacaactttgaagcatagt

SEQ ID NO: 224732 - DNA, 1991 bp, Cannabis indica
gtgcaaatgggttaaaatttgcataaggacatcaactacacataccataaacatatttgaggcattagaatcaaattcaaagtaagttaatttttgagcactcggtgctcgagcacctaacgcccaagttgataatttttcaatctgggtgccttccaagtatcaaattaatgattcgacttttgcatcttcatcttcttatcaaaaaggaggaaataagtactttcagggaagaaacaacacttcctgggtgccaaaagtaaggcccaatgcccaggttgacattttgtcaacatgagcatcttctttgcttttagaaaagattaagattcgactatttctagggaccaaacactacatttgaagggccataactaggacccaacgcctacacctggtactaggcccagcgcccaagttgacacctgaaattgggccaaacgcccaggttgacacctggcaatgtcccaacgcccaagttaacatatcgtcaacccggactatttctaatctttttttctcatcagaataataaagattcaagcaaactcagggtgaaaactacaagcatgagctcctggaaacaaggcctagcacccaggttgacaattaacctggggcgttgctttcaattgctcaaatgtcgaatttgattcaaccaatggatccagattggtcaaaaatagggtaggagacctcgtcctcaagttcaagaaccttggaagtatcaaaacaagatctcaggaatgagtgcccagtgcccaggttgacaaatggtctagtgcgctaggtgttggtttttatggtccatactagagttataaaagaaaaagcaaaattttgataaaacaatttttatctaatataaactataagtccaaggatctcaacataatgtatataaattaaatctaaactactaaaagaaaattaattaccgcttgatacctatcagtgtatcctttattctttttgtataacaatcaaacatccaatccaagaacttgattgaagaatccaaaccttgatcttccaagttagcctcaacactcaagaatagagtgggctattagatcttataggatgaacatatttgggtattacagtatgtattcaactcatgagacactgtaatgagattaaggtttttgatctcacacatactttgagtagtgtgggcatgtgagaagagagagagatagaatagggttgagaaaaaaccaattctattttctctttaatttctctatttattggcttgttaaactatttaatcgttgttatttatgatactatatatccttatatatagttgtttaccgagactttcaaaaactaataaacccgagcttaagaaagaaataaaatagcaaataatagacaaataatttttacgtggttcgggcattaataatccctgatccatgagtcagttgtattggccctttggacaagtattaggataatataagtgtttacaatataaacccaatgacctcgataacgagttggagctttttctcccatcttttcgaggttgatgacgtgcacctcgttctttctttgcttgaaggcataacacttcattttgacagtcatagttctttacgacaaaaagagtacttcagcggccatcattcgaatgtcagcttctgacttgtcaagactataagtctcactgaaaggtgtctgaaaatgattggtgatcgtaacaggagcatgccctcctatagcgagataggcacctcgctattagttatttaagttcacccaactgttatatgtagtttgtatattatacgctaagtgtttttcatagtcattataccttgcttttcgtcttccccaggtgtaatagagttgatgtctcgccttgcgcatccaatgtcgtatgggttcctggttaacacactgaggcacagtttgtatatctttatctcgtgtaagactttatagtcgagcaagttaccaatatactctgtcacttccgc

SEQ ID NO: 224733 - DNA, 1680 bp, Cannabis indica
aatcgatgaagaaagtggtaataaacagtgaaaatagaaaagaagtttttcttagttgggcctaatcttaaataagtaaaacagaatgcttcttaggaacacaatacatcacttactgtgtttgcatgttaagcattgtttcagctgacgaaatttgccacacaactgatattgtagtggatattttgacttgtgtgtgagctttacatgtgtttttcttccgtaaatgtgtcgttatcagcttgaagcaatgggatttgatcgggctcttgtgttagaggttttctttgcctgcaacaaaaatgaggagctcgctgcaaattacctcttagatcacatgcacgagttcgaggattagatcactctctatatttgcctttttttctctatcaagaaaagaggtctcagagtaatctctctccttctctctctttctctctcttataacatttttctgtttagagcataatgatgtggagtgtgtggagtgtaaaagttgtatttttctacctataatctctctgcctctgttgttaggattcaattaaaaataatatatttataaaaaatatatagatgtttttatcattcatttccattgttgtgtaatactctgtttcagttctatgcttcaaaggtggttctaacttctaactattttgccatttgttctctctggttaacaaattcaagtttattaatcaattatggattttattactatttttttgacataaaaaggtgtgtttggaagtggtagtaattacacaaatatagtaattacacttttaaaatacatttagatatgaggtgacaattgtttatgatttttttaaatagttagtaattacacataaagataataatttttattactagaacatttaaaatgatttttttttaaataattatagcgtaattatactaaattctcttgaggtctaattacttttagttatacttaacttaattctaattccctattgacttttcaaatgtatattaagagaagatgtcttgttttaccttcatatctctttgcaaacttttcccaccttttatgattcatttcttcatggttcagtaaacgtggtcgactcaaaatgaaatgtaataaacattattttggaaagataactctccctcacaatgggaaaatgtatcttcattatatttcctcgtaaccaatttactcaatttaattaatcaatataaattgagtctttgaatcaaccattttacttgcaaattgtaaaaatgatacgtttctcaatttaaattctttttttgagttacactaagagaaaagaatggtcagaacttgaaacgatcaaggtatttttttttagactaaagtgttactattagttagcactttttaatattatttactaaattaaaatatatgaatcttaatgttaaaatatactcataacaatttgacacattttatgatgctttgacatcttgtcccttatcatttatctcttattatagactagatttgattgaccatttcaaaggtttggcgaaggtgccaccaatggaggagtttaggtgcttgtaggaacctttcgtggtgttgtagtacaatttgtggttgaaaatttcataaatgcaaattagaccttgcatcgcattgttagaaaaatattagtttaagctgttacaaaatgtttt

SEQ ID NO: 224734 - DNA, 1200 bp, Cannabis indica
aaaagaaaaaaaaaacaaaaaccctagctaacaatatcttcaattaaatgacccataaattataaataattttgtagaagtatacatatatttttttgaataaaactagtaaattttataaaaaagtaaaatcaattataataatggaatgcacttaagaagaacaatcttccaacataatcatatgacttgaagagaaacacgaactccttactaataaactactttgtttgcacgttatttaacaaaatgtaaattaacattattaagagataaaaacaaagcacaaacaacctgaattattaaaccaaaccgataaggcataaaaatattgctttgaaagcttggacacagaccaaactatcaaattcaagagtaacttgcagccaagagtgtcgagcaatattccaacccataacctctttaataccgataatttttgcaactttaggttgaaatagaataattgaatggaaaggaaataatttttatttatctattcttttattttgttatatttaaaatcattggaataacatcctgatggaatgacctttctattattttggtggaatgattattctattttgaaatggaaggaaagactattgcaatacaagatttgaaaaaatttaataatttttttttatcaattttttatgcatttaaaattttaattccattccatttctattccaatttctaatcccattcttattcttatatcttcattccttccaaccaaatgccaccttgaagtataattaagcttcaatcaccctcccatagcatgtcccaaaccacacaatcaatttcaaaacaatcctcctgctaaaataaagttccgtccacgttaactttgttctaatttataacctgtaaaagtatatattaattcaatgattttggtggaaatagatgaatttttagcgtggatgaattattttcttaacaataaaagtaaaagtatattttaaaaatatttgaaaaaaattattgctcaaagaaaagtgaaatttttaataattataatgaattatttatttatttgaatttataatttaaaattgtacataaataactaatttaaatttttaaaagggaaattttatttacactccaattttttttgaagataccctattttaataatttttattttatataaaactatatcttttaattgtactaagttttttt

SEQ ID NO: 224735 - DNA, 1415 bp, Cannabis indica
ctgtctccaagattggcttcgtagcctcttttaacagtgaaccttccatcactcgcctccttccacacgatagtatcatttgtgcgaaaaggaagccgagtgatgttgccaattctagttcctagcatgtccccaaacatatcttggagaagctccatgttccaacttccatcaggattagacacatcagccaatgtagagatgaatgggaaccggggctgcactctgttcataagatcagtaaaatcctcataggacagccatggaatccatggttgcttccagatatccaccgaatcacctttgcccactagagtcatactacctttgcagataatatctctagtattcaaaatacccctccaaaaggctgagtctctgtctcgagtgttgacactccaaaatgaatcttttctgcaatatttgttggagaaacaggtcacccacggtctgtcctccttggagacaaattgccatgccaacttcgctaagagtgccttattcatgtcttcaagtttcctaaaccccagcccaccctggagcaaaggcttacaaagcttctcccagctagccaaggctaaataacgatctttctccactttaccactccaccagaattttctaattgctctatcgatatccctacaacaagtaactggaattttattagtagacattgtatataagggaatcgaagacgctactgatttcactaaggtggttcttcccccgaatgataacaattttgttttccagccttcaagtcgcttcaacaccttttccttcaagtacaaatattgctctcgcttttttcgcttgaacacaaagggattgccaaggtgtttttcttggccttcacactgtttgacttgcagaatgttcataatgttgttttttgttgagttccccatgtttccagagaaaagaatacaagatttcaccaaactacatctttggcccgaccaagattcgtatctatggatgcaatccagtaacgaactagccatcctctcatttgcacgagcaaagagaatagtatcgtccgcaaacatcaaatgactaaccgccggtcccgatctagctagagaaatcccttgcaccagcccctttgcttgctgcttcataattagcttagaaaacacatcatgacaaagcaaaaaaagaaaaggggatagcgggtctccttggcggagcccccttctaggttcgaattttttctgcgggattccattgattaaaaccgagtatgacaccgagctaacacattccataattagagagcaaacgccactatcaaaaccattccccttgagtacctcatggaggaaatgccattcaattctatcgtaggcctttagcatatccaattttatagccattagcccaccctttcctttttttcttttgattgtgtg

SEQ ID NO: 224736 - DNA, 1650 bp, Cannabis indica
aaacttctgagttggtcagtggctgcatcgacaaaaagagcagtagtttcagggggtaaaggaggaggccttagctgatgagccaactgagggatgggtgaaacttcagcaggctgactatcatgttgttgggagtgttgtgcatctttgtattcctgtaaataattcacaacaaattcttccacattgttagtagtatgattcttcttaaaaagattagagtttcttgtattccaaatctgccaaatgaaagtaataaagatttgaaagtcctgtttatttaacatttgaaaagcctgaagaagaaaatccttgatgtcacttctgtaataagacatataaaactgtttaaaagatgaagctttccaaatagactttgctcgtgggcaaccaataagagcatgagagacagattccttgtcataaccacagccagagcaagaaggattagggagactcctttttaggaatagattgagagaacaaggcaatatgtgatggaaagctctccaaataaagtgtttaatcttggagggtacagggagagaccagagggatttccaccaatgaaggtaaggattaggatttgaggaggaaggaacttgaacagagtcaagggtgcaggcaagatggtaagcagacttaactgtaaaatgcctgaggagtgaaacccccaaataagtgaatctggagattgaggatcaattggggttgagaggatacaattaacttggtaagaagggaaatagtgattagttttcggtgttccaagttgagtcatcatttatgctttttgaagcaggtaatgaaacatggaatttgaaaccctgccaacacaatggggagcaccaagatacttgctaatgaagccttctcccataagctggagatcttgacggaaaagatcttgggccagagaagtggtgttgggggagaagagaatggaggatttctctctgttcaccaattggccagtagctttatggtaaagatcaagaatactgttgagggaattactagcttgaggatggacaggagaaaaaaccatgctatcatcagcaaacaggagatgggacaaagggggagctcccctgcaaatccgaataccagaaaattggtcctgagtttcttgtaaccgaattgcagcagagagaccctcagcaataagaaggaaaagataaggagagaggggatccccttgcctgataccacgcgttgaaggaaacgggtcagtgagagagccattaatggaaaggcgaaattgaacagttgaaagacaacgcatgatcagggaagaaaactgatttgggaagccaacatgattgaacaaatgagttagaaaagcccattccactctgtcaaaagccttttccatatcaagcttaatagcagcccaaccaaccttcccagctctcctagaatgaatggcatgaataatttcatttgcaaggagaatattgtcagtgatttgacggcctttgagaaaagcactttgattgatactgataatggagtgaagcacaagtttaagccgattcgcaaggaatttttgaaagacatttgtagaaagtgttgcaaaggctaatcggacgaaaatcacggacattcttaggattcttttttttagggatgagaacgatgatagtttgg

SEQ ID NO: 224737 - DNA, 3111 bp, Cannabis indica
cttgagaaacaagacaattgcacggatcaaagtattattaaggaactaaaaatttgaagagagaacctgggaactccagacgaatatggagcagaaatatcgagagttgttcaggtaaattttgggacgtaatttcaataaggagggaataattgtaataccctaaggtttaataactagattagcaaccctaactagattaattatgtattaattagaaattatattattatataatttagtatatgaaactatattaataaattgtattttaagaacccttgtatgttaggggcatttttgtaattttgacctaaaaagggtaaaatcgtaattttatggtatatcgtgcttgtggactatattattatatagtatgattattctatctttctacaagtatatcctaacaaatcggcgcggtatagtcacaactgggtattttgggctgaactgggtttggggcccaaaatacatttttgggatttattcatgggttgagatgtaaaatggccctaaatttagacattaagttagtaaatgtcctttttataaacatttagcaaaatggccatttgattaaaaatttgatgataaaattacaattataaccttggataattaattctagccttctaccgtcttctcattctcttctgtccaaaccatcatgcctccttcttctctcttggcactgacaagtcccaatctattcctctcttctagtccaactgccaccccttttcgtttaccaccgcagatcctcaccacaatcattccctaacttatttgttggtggctaaatggttggtgaatgaagcaagaaaaatttaccactgactggttgatcaaatttttttttcttcttgtttttttggtgaatcaaataagttataaattatcaggttgagtaaaacttcaatggttatattgtgtatgtttttttcaatcttttttaagttgcactaatatttcagtatattcacagtatattcatattccagtatctaagtttactagtttgatatattatttttatatatgaagaacgaaagatagagtataatacattatattcatattcgattatattagtttaatagtgtggtataatatttttatgtgggataatatatgaagaacgaaagacaaagtatattacaatatattgatattcaagtatattactttaatagtcttgtatattatttttatgtggagtggtatatgaagaacaaaagacaaattatatttgttgatctcgcttttggccaatgatagtgagtcttaattgtaagcgacaagtagtataagatagatataatatagtgaaataaataaagacacaaagtttttatagaggtttggccccgagcaattcggtaatagcctactccccttgatttgtattgacttacgaacaaaaaatgcgatgattccttttcttagagctcttacaatgatatctctgaatatgtgttcttagataagtttttcgaccccttgcccagtgagaattgatcactatttatagggctataagctttgagaaaaaggtttcccttctatttacaatagatataattggcaagattacaaattaaatacagaatacactgatcaagggatttgaagagcttgccatatctctgtgatatgatctcaaaattatagggattgcctctgtgattcacgatgcgagtgttgaaactgctaagtgttggcatgttgttcggactatccacttccttgtaaagaagaattcgtccgtgcaaatatatgtggtgctctgttcggcatatccctcacgaatagatatgcgaagttgattccacgtgttaccattgtgcgatgccatgccagagtgcaaaaattgggataacatttgcccccaagtctgcacgggacttctgaagttgcgtgtacacttcattcgagctgcctttacctactaattaatgctctgacttaattagtgcgtcgaaacccagtttttctcatcacgtttcatggttacacttgattaaatttgatttcccaatatttgcttttgggagggaatcaaaagcatttttaaatgattacttttttcaccacattgcctataaataaggttgagtcttcctcataactttactttaactgatttctctactaaacaaactcagagcaaaaaagatttttacttcaagtctgtcgtgagatatccaccaaaggcatctgagcagcttcgtttggactgaacttaggcgtcaaaaagtgagtaaattttttcaatctctttctctttttacatatgtttaatttctgggtttcatacatgcattctcgacttgttgtagaagatacataaaaaatctaggctcttaacttttgtgattttctttgtaatagtctgtgtagcttcatggtttaagacgtttgtctttaatcatacattgttcgtctttcaccttgctcattcaaagcttcgtgaaatttaaccttaaacccaaaaatttcaaacttctaagttttcacttgtttttgtacattttcaaccctttaatatgttgagtactcctgatcggcatatttgcctatttattgttcgatatctcggccaaacactcacctcgtgtgttgtcttttgtagatgaaccctggtgaattttggggaagcgagcaccgaatcggccaggaattgctccaaattctgtacgaggatcaacctcgtcttcgtgccagtcagtcttcttcgagtgacaaactttctaatttgagcttcgaagattgggaggtgagtagtgatcgttctcctactccagaatccgtagtgcaacaacattattactccaagtagatcaccggagaggggtacaaccgctttatttaggaattgaagaaagtttggaggcgttatctcttgtccaactggacatatattgtctagccaggtgttgctgacactcttcctgttggctgtccaagttcgggtaacttgggcatcccaattgctgttcctgctgttagggttgcccgacattcacaccagtgtctatccaaaaggaggatgatggcccaaacgaaggagacgatgcggaaggtcaacgcatctgatcctcatgtggc

SEQ ID NO: 224738 - DNA, 1520 bp, Cannabis indica
ggaaatctgtcatgtaacctatgtcccggtggatggccatgaattttataacatctagacatggtatgtccattaattccacaatgattacaaaaaaacttggatctttgagattgaactcctcctcttgccatggcagctgggacacaacagatgcagagatgggaagagaagaagagaagaacagagaaagagctcaagagtttcttggctctgataccactttagcaatagaaaggggagaatgaaatcttattgattgaatctcatcaattacaattaaattaagctcaccagagcttatatacagctgaagcaaaaaaggaattaaaaaaccagtacaaaaccagagaacacaccctttacaataacaacaattaacaacctctaactaactaacaaactcaactaactctaatgaaccaacaattaacaaacagacttcataacttccctactaacatgattgatagtattacaagtaagattaaagatacaattatttttgttcaaccaaatgaaatacaaggctgttgtcatggcagcattaataacactatcttgcaaattagaaatcagtttggaataccaattcatctaatttttgaatgcacgccaaaccatctattgatttcaacaaacacacctttggtaaaattacactctacaaataagtataaatgagtttctctagctgcttcacaaactggacataagtcaaaaggaattgtcaaaactttgtttaaatgatcctttgttaaaagttgatcgttaaatgcttgccaacaaataaatctgtacttagaaatgttcatctgatgccaaactttaggagcataatcaactttatcaacagagattagagaactaataaagactttgattctaaattttgcataccttcctagtcgagataaagcttctctatcaatgaactccttagtttcagcaactttttgaagtaccagctcatgtcttgcttcatagaaaccgaccgaaattcatttccttttaagtaaatggtgctaatccatctaactcaaaagttatctttcttaacaccaaatatactttgccatcatagcgattccatttccttccctctcgaaagcctttcctccaagcttttttgggagacaaactttttcccaagaaggaaatggaattctctacgattcccatccccccccccccacacaaaacctctacaatatttgtcgatggcagtagtcaccttttgaggcaagataaacaaactcatccaaaaatttataatccccaaaaggaccaagtgaataagttgatgttagtttggttttatggtactaaatcaggtatgcagctaaagaattcgtatgtctgattatcattgtaccacagcccaatggatctccagatgtatatacattaaataaaaaacataaaatgaaaataaaagaatacatacttcttgatgactatcagggtatcctcaaaacttctcataagttgtatccttttggttgatcagaaactcacac

SEQ ID NO: 224739 - DNA, 2557 bp, Cannabis indica
ttttaattaatctcaacttcttaatgttctaatcaagggtagtatgtaatgttacctttttaataggatctgacaagttgtattcagtgtcaatcttctcaactattacattctctttagttacaaaatccttgatattgttgaaattcctatttatatgtttactccttcgagggttctggattctttattgtttgacaactacatctatgttattgtgaagtaacattagtagttaacccatgattggaataacaccaaccgtagagaaatttctttaggatgaataattgtgtagtggccttcaagcctactttaatattcagtttcactggtagagttaaagacttcggataggtttttacactttttccaaaattactgctccaaccccagagtaatcaccatcctaaatgtagacgcatttatgcaagtcttgaaatctgagttagtgtagcctaaaaggttaaaagcactacccaaatagactaacttataggtcctcttttattctttagttttatttgattctcttacaatgttcctatattgattaaattgataccaacttataactccaaaaatctagtgtatactggagcataaatgagacttctcactattgatgcttaaggaattcttcccttaacttatatattgtctcgaatagttaaaattttaccttagataaataaactctatgtctagaagtctagtgatttcctttaaagttagtcattagatagcgttctggtatcttacaaatgtaagctacttgtgaaggagtaagtaaattactaggtataccacaaggcatgggtttagatgttctcatcaaacccatgttactaggaacgaaaagtttacttaagtccatttaatagatctattaaagtttcccttcttgtccttataattaaaacttttggttgctccatgtgattgtctgaatcaaaaatcgatgtaagaaaagtgttcaaatgcacatgtgcacatgtttagtacatttattatattgccttgtagctagtatattagaaatagcagtatgggtgtacatagagtttctctaagatattgacatctaatatgttagtcaatgttgaatagtatggattaatgctactaatataagtacgactagagtgctaagattaggatggtattatggttaatcatattataggtacgaatgttcagatctcagtactctcgtttgatgagattagtagacttatgataattgggtgtatgggtgctcattaataggtaaagtatgtatgttgtatgcatgtaaatactttaattactgagtttgtagactcacacacatatatatatatttgtgtgtagaaaaaggcaaagcaaaggttgaatcgcagtgaaagatgagcttggtgaagattgtacatatctagtagtctaagcctagagatttgaaaacttcgagacaacactaacatctttttggttaagtcgttagatgacaacttttgatactttatattacatatgtgttttgtaactagatttcaggattctagattgtaatattttataaaagtggttttgtttagtaaagttgtaattatctcaaaaaaaattattaaatatactttgtatgttgaaaccatttaattaacaaaagttagcacaataattaagaaaaataccataacgtgccctagctattagggtgttacaatagggcatttgttccaaggcttcagcaaagggagtgttgatatgttgcttttaaaacacctccgaaaacttagaaaaatgtctatcaactgtagttttcctaagcctttgaggatatggcacatgcacatgctaatcaaacataataggtggactcttttttaagttcttactatcttcagttagctcttcttcaattgtaccaaaatttttaggtacatctttaccctaaccctctttttgttgtaacacatgttgctctatttgtttaccactccttaacttaaatgctaagttgtgtgccaattggtccctagtaggcttgtcacagtagactcctctcatgagttacccactattgatctcatcaattatctcggtcgatagcgatgatggaagggatatccatcttcacttcttccccaactcaagaatccgaggcttgggagcctcctccaagacatggtctatcttgacctttgacgggcaaccaagagcattcaaaggccgccaagcctcatcataagaacccaaagggttattcaaaatacggtacaagtcttttaccgcctcccaacgggtacaacctttttgactttcagatgcactatttgtcccagtcgaagcatcttattcctaactagccacagttagctcgaccatcaagttccttaacctgggtgacccttggctgaacattttgaggctattctgcctcctcaacaatactgaccctccctctgtcattagctcaacgatgtgagggtcgtgagggggtgccttatggcatgtctatttggtccttgccatcataaactcagagttttcagttaacagtatccacaatctctat

SEQ ID NO: 224740 - DNA, 1250 bp, Cannabis indica
atgtgggaatgagaaaaactttaacaatcaagaagatcaatacaataatcttctccttcggtaacataagcactcatataattataattattaataatttgatcaattagcttcagaaatcctcaaaatatttttatattaattaattatttcttttaaaagaaaaaaatggtttaaaaatacggtctataataacatcacattatcattacttaatcaatcatttattttattatataataatattaattatatttcaatttcaatattaatcaatttataacaatattaattgtattacaatacaacgtattatacagtacaatatatttttctttatctttaattctagattcatacatgtcagtcaaaccaagtggagaactatccccgatgatctcggtcctatatcacaacaatggtaaaccaataaacgtctatcccaaaacactgtttaacaactgtaaaggacaacttagggtttcctaccgaattgtgtagtacaaatacactaaaataaaacttatattttagctctaaaaacatacaccatatgatagagcttgtcgcaagcttcgaacagtatatagaacgtacaaaatagacacccgaatgaaaagttacggtaaatatatgattctcgaatttctaaggctgcctagaaacggtaaaccggttgagaactggttaaccgcttctacctgaaccgattgactggttcacaaccggttgaccggttgggcaggggccaaaaaggtgcgattctcaatttacgcactcaccgaaatgttaccgaaacttgtccaaactactccaaacttcatagggtacacatatactatgcatactaccatacttacataatggaaactaaaatcaagcccttaattggtaaacgccactaatgttcggacttaatttttaaaaagttccaaactcaatttctaacccgaaatcacctcaatttcagcaagaaaaatcgaaactagtcccataactacctgagaacaattctatacgatcagaatcctcataattattttaattcacaaaaccactatataaaactaattgtattcaacttaaaacgaaaatcaatctttaccttaagctctccctcttcaatgatttgatattcgctaaattttaagttgaaaatcgaagaaaatagataagagaaggtaaaggtttcgttgtaccgacaaaaaatttcgactttattcttctgttatgtttcaaaaacttaataa

SEQ ID NO: 224741 - DNA, 1269 bp, Cannabis indica
attgtagatgacattctaaagtttggggatttctacttaaacataagaatgatgctctatctaaattcatacaatggaagactcttatggaaaatttaactaatcaaagggttaaaaccctaagaactgataatggcttggagttttgcagtgatgaatttaacaggtattgtggttctgttggaattcaaaggcatagaactgtgaggatcacacctcaacagaatggggtagcagaaaggatgaataggaccttgatgaacaaggtcagatgcctattgttgcaatctggactcactaaaggtttctggggagaagctgtgctaacagcagcctacttggtgaacagatgtccatccagtgccatttaattcaagacaccagaggaaatctggtcaggtaaacccccaaatctttcaaacttaagagtgtttggatgtgcagcctatgcacatcagagtgtgggaaagttggaacctagggctttgagatgtgtattcctaggttaccctgagggcactaaaggctacagattatgggtaagagaaaaacaaggttttaaaacaataaacagtagggatgtcatttttaaagaagacctatttccttgtattacaaatcataatattttatctagccctactgtagacactaaccctgcaggtacatctgtggacatgcaaacaaggagcacacaaccagatactgttcaggtggaaccaaaacaggtggaaaacactcaaggagaggcaaacttggaaggaaatgaccaagttcaagatgacaatattcaggtggaacctatccaagaagaggaacaagaaactgaggcattacaagactatcagttaactagagacagaactagaagggttcctaaacctacacagagatttagttttactgcttgggaagaagtgctagcctatgctttcttttgtgctatgggagtagagatgacagaacctaaaacctatgaagaagctatgacaggtaaggatgccaagaaatggtccaaggccatggatacagagatggaatctctgagaaacaacagaacctggatactagttaagaagcctaaggggaagagcatagttttatgcaaatggcttttcaagcataaggaaggactaactgagacagaccctaagaagtttaaggcaagactagtggctaaaggatttacacaaaaagagggataaattttaatgagattttctcatctgtggctaagtataaaactattagaattatacttaccatagc

SEQ ID NO: 224742 - DNA, 1493 bp, Cannabis indica
ctttacccttgcttgcacattagagcacctgtgtgacaaggcccatcaagacagaataataatacagtatgaacagttataataacattggatttcaagtaaaacagtaaactaagcacatagagtatatcgtgatagcacaagtatatattatatgattgttcatttgtggaatggtgaattagggttattactgcaatatcccaaaaatataactataattaattagggaaagttttatataaaatatggagtaatatgtgtgttaagagtataatgggtaagattatgatcttactaacctaattatgtgggaattaagaaattttatcacaaatgattaaataaacataatttattaattacaaagaatttattaaaatatgtgggtaatagacatgctatttataaaataaaaatatttttaggtccgacaaccatggagacctaattggtagccaaaaatgtcacaatggtattagtatgtgatattagtgatatcgagaagtttagttgattttgagagagtaaggatatttgggggtaattagttatgactaaattacccctagggctaaagtttatttggtttgtaagtaaggggcattttggtcttatgtcaaggttagagatttgttatgttatctatctttcaatagataagttagaaagtaatggaataccctagacaaatttagattgatgtgtagatagaggtaagactttgtcaaaccaagaaaatcaaaaaatatcaaacttcactctctcttgctttctttctcttggttcggcctaggagaaacaccaatgaaccaaaaattttagagtaatatttattttcttttagccatgattaactcctggagttagagttaaattgttgggaatggtaaggtaatcttcttctagctctctttgtttttctcaatggaaagtttattttaagttggagatttcatgattggggtgttgtgtgctggataggaattaaaatgttatcctagattatttttaaaggttgtttggttgatattcagtgggttttctagctggttggttagagaaccaagcttgagctcttagaactgaaagcttggtcattaatggtgaatttttatttgtgattcgattttgatttctgttaattagaaatgttattttgatgttaagtaactattgtgtgaagtttggtagcatttgggattgattggagaaaattttggggctttaaaaacttgaaatttttgagcccctgctattgtgaacgagaattctaaatggtacagggttgtaccaaatagaattttatttggcagtaatcgagaagcgcaaatttttgtattttgcccataactttccacttggttgttcattttagacgttctatatattgttttgaagcttttgaagagctctaaagtatgatacataattaaacgctaaatatgtatttattttgggtgttgtcacacaaggctcggtagaaaacccta

SEQ ID NO: 224743 - DNA, 1431 bp, Cannabis indica
ttgtgaggattgtttaataatcagttccaatcagttttctaggaaaatataatttccatcaaacaacagtctttagagaaaactaaacaatattcaaaatctttaaacaaccacaggaaaattcatcgcagtcttggaaacgacaatactgaatacaataaaggactgtggttattaaaggattgtggtacggtgtgccatggcttctagtagtaaatcttttcaggaggtggaagaacaatatgcgaatatttcactagagggagaggatgatggggagttgggtattgattttcttatccctgaggaccaagttttgaatgttgagttatgtattgtgggccggttcttgactggcagagccattgatttcgaagctatgcgccatgttatggcctctttgtggcaaccaagtaaaggagtttatgctaaggagattgacaccaaccgttatctatttcaattttttcatgaaattgatttagaaagggtggtggagggaagcccatggacgtttaatagggttcagtttgtttttcacaagcttagaaggggagatgatccaaaaagggtattgttgaacaatctcgacttctgggtggaaatccatggtctccaactgaggtttaagtctgcgagtattgtggagaagttgggtaattttgttggtacgtatgttaaggctgatcctaagaacttcctgaatgtgtggagagattatatgtgtgttcgggttacattggacatcactgttcccttgagacggcgtaggaagctccgtcggactgcaatggaggaggggttttgggctgagtttaaatatgagtatctccccacgttttgtattatctgcggtataatagggcactctgagaagttttgtcctaagttttttgatacaccagccgagatgctcgtaaagccttatggtgcttggatgagggctcaaccacgacgcagaaacaacgtgttgggctctcagtggttgcgtgatgggaatgagacggatgagatgtttgccgaccggttcaatggtggtgtggcgactgcttcggtgatgttacagcagcagccaagaagggaggaggttgttggaggattttgtggcaattcagtcctgaataagggggggaattatcctcaatttaattcttctaatactatggaaaatatgggatatcatgttggtgttgaccatagttggaatgagatacatgctaatgacactaatattgatgattctaatgatgatatcatgttattacaatctaaaaaaaggcgcacaagtgatggagtgccatcgggccaacgtggtgtgggccaacatgctatgggtcgtgtaaggatctagttgagaaggataatagtagtatggatgttcatgtagctgaagttaatcaaagaattgggctcgaaaaaaacggaccgtct

SEQ ID NO: 224744 - DNA, 2267 bp, Cannabis indica
accccatctgatcaaactagccatccatcgcatttttcgttgtcgccgagcaaaaattacaaaaataacatattgcacatataggacaaataatacccctagagtttaataaaatctccggaaattgagaaattataactctaatattcatttctaaatattggggtcgacaaataattaattcataaataatcataaaaataacagaaattagtgctaattgcctttactaattcaaattactaaagcggtcattacaacaactaagtaaaaaacgtactataacttatcctttgagatattatataacacacttgagaggtgttgtaatccatcatcaattttatagtagcaaattcacttgtaatttagttattcatatcattagaatatatcgaatatgagtttaggtcccaactgggttgttttcaatgggccaaatgaaggtatttatagtagctacgaagatgctataaacaaaaatcctaattaaggttcctccatcaaaatatgtcattatgattcttttatagaagtcttttctgctgcatgtctacatggagaaacgggacgatgcttcactgggcagcaagtgagagaactttgttgtgttaataattttccatgcatgtgggatttggatgatgataatgatgaagaagcaatcttaattctattttttcattgtttgatgagggtgactgatctggtgtaaataaatcacccgaagaagataatgtaaaagattctagtgagaaaggtaaggagccaaatgaagatgatatagaagggggagacaacggaggaatggatccttctcagaaaaacaataaatgatgtactgttttagttttcatgttatgtattcctttaagcttttatgtagcaacagtgtttgtggtgaaatctgaaatttggtttattttgaagtagtaatgtgactttcctccttaattaagtgtgcaattaaaattgaattaaataattttgacatcacaactaagttcaaaatgaaaatagacttcttatattatacaaacatttacattcaattaatagtaaaacaatagtacaaagttcttaaatctcattaaatggcataacaaaaagtgctccaacggccatatgagaggagttttaaaataagtactacatacatatataaaataccactaaatgaaactcaacggatgttcaatcaagttgtgtaacataagggaacttccgttgagatggagggctactatctcagaacgaggacttgggtcgcaaagggcttcctcttggagtatcgtttgacggttcttatttcggatggattgggtaatgtggtatggagacctcgttgtagtcgagaatgtcatccatgatattttccaatttttctcttgaagtgttcgcatgttgcagggcatgggtggaatggtagaggtgctccgccagtttaatgactcctgcttagcctctatggctttaacatgtggctgcttgatgagttttttgtgttcgtgcagagcaccctccagcctagcacagtttacacatccataaattaaagttgaatggagtttaggactccatgaaggtgtacctacggctcttgttgaagaaaaaggatgaggtggggacttttcaagacttgattcgaaagggttaaatttcgggtaagggtccatgtttagtaggtcatactaatacagggtttcaataaatgtcttgttttaaaatccaaacctttacttatatagtgattgggtgggttgatgtacacgtaatgaggttcatgtacacgtaatgattcttttttcttaatttaactattttatagttaaacaatgtgtacaatggaaataaatcccattagtaatatttgataatattacattactaaaagaaatatgatgtgacatatacatttaaaacaactcgaagtacggtattttactaaaatattaatctgtatattaaaaataaaagcttttaaatttatgatgtgaagttggagatcgtgtaaaaaatcaattgataagtcatagccctgcaatgatattcgagtaccttattgaaagtagtacaggggtaaattgggaaaggaaaaatttacgataagacatcaccttctttgataaacttaaagttaatgtcaattcaactcatctagtaattacaatgacaagtaaaggggtaaaatgggaaaagtagaaattatgataggacaacagcttattttataagtcacccaattaaataaattttttgaaagtatt

SEQ ID NO: 224745 - DNA, 1122 bp, Cannabis indica
ttttttttttaataagaaatgatgtttattgtaataacataaaaaaaaaaaaaaaaactaacttaatacatgttgactgtgaatttagccaactgacgtagagtttgactagaattagattttagttatgactacaacgtgtggaataataataaatgtaaaggacacaagaatttatagaggttcgatccctttgatcaggtaatgacctactccccttttgtagtatttactcttgaaataataccatacaaattacaggctgaaatcttgtaatttctagctatgattttctttagtgttacaataatgagactgtgtgttacagatgagaagtatgagtacacttatgaggtgatgagaaaaaaagaaagagttgaaagccttagggcttatgagctcttaagttcgtgagagtctagagaaaaatcctcctcattacgtgaggtgaagtccctttatatagtagtagggcattacatgttgttattcaaaatacataacaaatagaacatatccttagaaaatagggcagttacattttggtgaagctttcctatttttgtgggcagttcaagtcgtttcgaagttgtagggcgattgaaagtcttctagaaagcccatggaaaaaacccacaacccattcaagctgttaggatgaaagttatgagttggccgactagccttgtctggaagctgctcgattttgtttgaagttctcccttggccagccagttgatggtccgactagggtcttgtcaaaatcctatctttagcttgtgttatcctgtcttgagacctcgaggcttgacggtcagggagctgttcagcattatgttggtcgattcttagtagtttatctccacatgtctagttggacttgttacatggaaatgccacgtcataatagtaataattgagataatatttgctccttaagtccctgtacgaacgtctgatcgaatagggactttacactctttctggtcttgtgatgcttttgtccagcagctgcgcacagtcacattgattagccattgcgtcagttatcaattttatgtcaatcaatgtgggaaatcgagtggcggttgtacactttctcatgtttaaactattggcctt

SEQ ID NO: 224746 - DNA, 1600 bp, Cannabis indica
aattcaactatatatatacaatgtgatgaatgtagttcggctacatctttgcaagcaaaactaaaggtgttcagatctagagtttcgttgaagggatttcaacgttctactagtaaagggatcttgttgtgtttctatttgtgcggaagaagaagaagagagagaaaacacagtctcttgttctgcttttgtcatcagcttattctgatatgcttgctcttgccatgttgttaaagtctcgtggattcgctcttattctactcccatataatatttatccccataatcattatttggtacttctggcttatgactgaatgcttctaaaactgcttgctattgtagcaatatggcacaaagagaggtccaacagctgatggttctatctggtttccaacaacaggtattgcctttcacttacttgggaattccaatttcatccaaaaaaaatatcagggaaggactgtgaattgcttgctgaaaagatgactgctagaattaagagctggagctcgagaaatttgtcatttgcatggagaataactctaataaactcggtactcatagctattcaagcttactgtagtcaaatgatgattttgcctaagaagattctaaagaacattgaggctatctgtagagaatttctttggaaggggcaagctgcctttcaaggggggtggtgcagtggcttgggaagatgtttgtcaatcaaaaaaagagggaggtttgggtatcaaaaggcttgaagagtggaatagggctgctatgtgtaaatacatatgggccattccaaatcaataggaaagtttgagatgggtgcatagtgtgtacatcaagagagattcttggtggagttacacagcttttatccactcgagttggtattggaagaagttggtaactcttaaggatcatctcaaaaccatccaggacccggttgcattccaagaagaggaaatatgagatttctccagggtatgttcttctcaaaccaaatcaaattcatgtgtcttggagccaagaagtgtgggcaagattgaacatccctaagcatagtgtgataatatagttggctatgttgaatagattaaagacaaaggaaagacttgttaaatttggaatgcaaatttagaattgctgcaggttatgtaactcacaatcggagaacacacaacacttattttttaagtgctcgtttgctggataatgtttacaagcagtcaaatgttggctagtttggggttcttctgctattgatctacaccagttactgaggtggattaggaaagctaagataagtagatttaggaagaatgtgatggctgcagtgatagctagaatggtgtatagcatttgggagagtcggaataagctagagtggcaagaagagcagcccgactgtggtagattgattgagggcttgcaatggagaatcaaaacccggattagcaggtttttgcctaagaaaatgagttgtaaagatagggattggttttatggattgtaatgatgtaaatacaatatttgtatagatttaaatcttgaggctctctttttattggagtgctcttaggtgtaaattggtttgtgcaatata

SEQ ID NO: 224747 - DNA, 1666 bp, Cannabis indica
tctatacatttttggcattgtactaacatttattaactatgaagccatatagagaaaaatcatctatgaaggtgataaaaaacttgtttttttgcacaacgtagtggaataaggtccactaatgttagtgtggataatttcaaataaagattgactacagctagcagtcttttttcatattttagtaaattttccacaagcaatcagcacaagtatcccaaccaaaagcaccaagaggatgaaggatttcatctttaattaaacgatcaaccttttttttttcagaaatataacccaatcttttgtgccataacagtaaggatgtttccttaatataagatcacttacccacaatatttacaatattaaaaagggaaactaagggagccaatgataacttgtaaagaccatcagaataaaaataatttctagtaatttaagattcaaacataatgtctacataatttttttgtaaaaagaaaagaatatccatgtttaactaaaagagaaagaaaacttaatttctcttaaaagtaggaatataaaaaatattgttgaaaacaatcttaacactagactgtaattaagaataaaaataccaacatagataacgtcaactccaacatcattgcccactttaagcttttgctccctctcacttaaagatcccttagcccttggttgtgtttgcatattttctaacaaagttttgaatttgtgatattctgttctccaatgttccaatttttcacaaaaacacttgatattagtctattttgacttaccattgttattcttctcttaattcttatgctccttgcaataaccattatgtttagaagcataatcttttttattcttgaatttttatcttcctttgttggaaatgagttgagaaacatagtgagcagattaattcttctctctttttagcttgcttttctcagctacatgctaagaagttaggtcactgacactccatggtattgtaggttgtcttggtaaggctaaaagaggtaggaagtgcatgaagaccatgataaataatgtaagaatcagaaagagaaatattatgatgttttaagttggattgaacgtttataattttcagaataaaatctcacactccttttgattcatcatctttaatggttgtcatttcatccataacatgtctagcttcattgtttttaccagtgtcatatagttttttctacatcattaaaaaactctttgaaaattaaagtgtttggaaaaccactatatatatgtttaggaatagatcccttcatatcaacgggactaagataatttgacttttccattgtgcatgaagatttctctaggcaacagtgttggtatcagtacgatcagtaggttgttctttttgtatgcataagatcaagtcaactacgcctagagtaaatttcacatctcgtttccatttctaatagttggagcattcagaatttgaatggaaacgtttattgtttttcataaaaaggaggctgaaaactcaaaaattaaaacatgatcaagctatatgagcaatacaattagaaaatataatagagtccactattagaatattttatttatggaaattattttctaattaaggaaatgattttctatttaaggaaataaataaataattgattttctg

SEQ ID NO: 224748 - DNA, 2563 bp, Cannabis indica
aatacaaccttttttatctcttcatctgtgataggttgcagcaaactatctctttgttgactggaaactgttggcccattgcttatcacacctgctaagactctctttctatttggcatgcttgtgccaagtagttgtttatagtaatctgaaaaaatctcagttattctgcctgggtcatcaactctgttcccttgagaatccaatatggagaggattctatttttgtttgattctggctttgatgcttgcatgaaaaattgttgtgttgtcatctccttctggcttcagtttcttcagcttgtactatctggtttagtggctacgatgtgagtttattttggcagtacaggatctcctgtgctttaattattgttgcctgcagatctgtgtacccctctcgattgattctcttgaaggcaggttttagacctttcagtttagctaacaacttggtacatttgtgtgccttggtatgtcttccatatattgctcacctggtttgcataatcaggatgtgaattccacatcttaaaatatctaaaggctttttccccatctgtgtcaattgatgaaaggtgagaagggctggtgaatgatcaaacatcccctctttcataaaaatagcttcagctcctggaaacatgtctaactagttcaagttagccattatcctgtccaattttgaatatatctgatcccctccatgttgtttattgcaccaagtgaaaacttcccactacttttaatatcttgtaattaacagcaagaaacacaatctctaaacaactgagattaatgttcttttacccgatccccaactctttccccttgattcaatatatcattaaaatctcccagcacaatccatacatccttggtattaagagattctaaatccgaccaaaagagcccttctaccttcctctatcattgaaagcataaacaaaagtgacaagaaaattcttaccatccgaagtagagacttggagatagatcaattgacttgtacatttgagtatgttgatgctgaaagtattcggatttcaagcactaaccattcgccctcctttgtgccatgaaatgttactcgtaaaacaccatccattgaatacattagagtacaaggctccaagttcggcagccttgactcttacctcaaggagcccaacaagaccaacattttgagaatgaatcgattgcttgatcaagttttgtttttttgttactatggaatctatagcttctatgtactatttaaaagagaaacgatagtttccttagagtttggctaaatgatatatatatatatatagaagagcttttattttggttattatcatagtttactgaaaatcgtttataagtggaatccaagctttctaaaaggatcgaatattatttctcttaaagttttaattttggaagtgactacagttgagcctcaatttataattagaattataaattaactattcaaattaaattaacgatacttaaggatttcagtagaatgggtaaaataataattttgattaactctaattatgaactaataaattagagcatgaactacttttattgattatatattgatggactactgtacaaaacactacaaatataattctatattgtctaagagtgtaattctatatttatagtggactaataatttaattaataaataaaattatttcattgaaaagatcaataataatgtcaagtattttggagttttgaaatataggtttatggtccccagatcacctataccacattatctagggtaaggttaatacaaggattgattatttggagaaataaccgaattttgtaagaaaatatttcttgagagaaaaaatagtaattttgtgtaaattattattttgaatataattgcttaattttgaattaaataattaattaatttttagttattaaattatctattagttaaccataatattatttaattggttaattaatattatgagagataaagtataattttattagaaaataatattcattcaatccaatcaaaaaaaaagataatgattatctttaataaattattatatattggagattaaataattaatcttattctaagataaaattaaaaaaaaaataaatattttagggtcattaaaatagtttcaaatgccactgtactacgtagtagtagttagttatatgctaaaaaattgttaagattattatctcatataaataattgttaatattattaagtgagtaaataaataaaaaataaacattcagttatttattcaaattcatatttgattttgaatttaaataaatgatttattatctttattcatttcattaaataaatattatttatatatatcgatatatgtataactaaaaatatagaaatttttatgtgaaaaatcctttttacacactttattacataattaccctcacacgcctattactacatttatacttacaaacttatttttattacacatttaccacttactcatcataccatgcatacacgtgttctctccccatgcatcatcaatca

SEQ ID NO: 224749 - DNA, 1524 bp, Cannabis indica
ttttttcttattatttttttaaatggtgtcataattttgtttgattataataacatagacgtcataatgtaataatgttatgtgtaattattaagtacaaatacgttaatcttaattatcactaatttatacaaagagtgtaaaatagagtacaacaaaaaaaagtatacttagcactcctccattatcgataatccaattcaattgagtcacatcctaaaataacaatctagtgcaatgtagtgttgtgttgttcttttgttcagtgtagtgtgtcccatatcaaaattacttccaaacttaatacgctacattaccaagtccaaggccaaggccaactgaagtgcttcaacatcgctccaaaaatggagaaacaacgtaagcgcagtacgagcacaagcaagaaaaatcgaaagaggaaaaccgatgaatcctgtacgcgctacaatggcgtccacctccaatatgcctccgatttcgacgccctcttctccattttagtcgcagcccttgctaatttccacaaacaaccatctctcctacccttaatcaacaaaagcttagccaaactccgtcgctcgcacatccaaaccccaattatctctctccttccgacttctcgcctccaagtaaagaatttccctttctcctctcactgactttttatcaaacagttccggtcttaatttttcttttctttcctgaattgcagatacacctcaatcgcgtcttgtggcgcagacattgtggggtcggcatcgctgttgtcgctggagatgaatgaagaaattgcttcggatagtgagaccgtaaaggctttggtctcagccttggggagtccgaagaggagagttttaatagcggcttgtaatgctgttttggatgttggtacaacttgtattggacggaaacggcttctgcatttttgtgctcttgaggctcttatgtaagtcttttcattgttgtgctttttaattctatgaaatgagatgtatatatgcaatgcatagttgagtagctaatttcagtactttagcttagaattttttctttttcctttcaaataaagaaacaagtacacatatagtatgaacatgacaacttgtactaaatgtccacactagattttttcttaatcaagctgtgtgctgctgaaaatgattcaaaaacaaataatagtcttagttgactttgcagatgatgtattccttaggcatgaatttggtttttgatctaagaaacgatgcaattttgttaagactattgtcaacggtgttaaagaaacaagagagagcttcagcagtattttaggcttataaaatgatgtctatcagagaaaactttttcgtggcttttgacatgggaaagggaatttacggcttagttggagaatgcagtagaggccattttcctctaatggtctaagattttttattattctccctccttcctctctctctctctctcatatatatatatatatatttccctctctccattgtttttttaaacattgtatggtag

SEQ ID NO: 224750 - DNA, 1535 bp, Cannabis indica
agtggaggggtttgcaatagttagtaaaggtcataacctccccggcaggtgccttttccttggaaggggtcccctcactgcctctcgatttcttggccggaggagatgtgctggagcttccaccaattctcttcttcagagcatcaggcatcttttgagacatgtatgcatgaaacaaaaacaacatggttagagaaaacagacatcagaagcataaagcataatagtcaagaagattaaaaacaagacggagtagtctgcaaaacgattgcccgagcaagactcgaaagtccgtcatcacctgacaagcctcttatctcagacataacaactttcccttttccgagcatgggagaaggcagtcaagcaggcgaactgggctccctaatgcaaattgcctgttcaataggcctaggctgggccggaagtttcttcctcctttttagcggagtcaccatctctttctcagcctcatcttcaggattcaagggctcctgagtatattgcttggccgttgcacctcctttcagcttagcctcgtgcttcagttgaatcggctcatcctcctgataagctcgttcagcctgtccagcaccagatttcctcttcctccccttcactagcttaggaatgaaatccttcggataaagcctgcacttcacaaagttgtcctcggaggtcaactggatgatattccggtcatcccccgatagctgagtaagctcttgagctctattcctaagagtaagagtgaggggaggatggtgatatgttagaatctgctggaaccgagtatgggtgatgcccgcaccatccaccatgaagtactcatcaacaaaacgcccaattttgctgatggccaaatctcagtgcccgtcaaccacttgaagtttggttgagaaaaatagaagtaccccgacctgccttgctttgtggtggacttcaaatcaaagaaccagctaacctcgtggggagaaggcatatcccacttctaggaggcataaaggacgaagagggcagacagatacttaatgcccttgggggtgaactgggtcgggcaaaggcagaagaagtctgccacattcttaaagtgcgagtgcaaaggcaacaaaggcctttgctgggcatgagctgttggaaatattttaccagcatattagatttactaataggtatgttgtttaacatcctaaatatgaacttctaaaatgatattatataaacatatataaagtatgagaaacattacagtggttgcagtggaatataatgtctccttccactcagatctctaatccttgtatcctttctgtcgtaaagtatcaccaagatctgagtccgaatgtccttctgttgaatctggattctttacgatcttccacaatatgattgaggtaccacttgatgtgtgtgggcactcactttatcactcaagggtttggtttctatggtgaagaagagagaggaggagtggaagctaggttaaggagagaaggcacttagtttttctttgaaggtataagatgcatcatctt

SEQ ID NO: 224751 - DNA, 2063 bp, Cannabis indica
tctgcccctataaccttttacttacgtagtaaaaaggttgctggtgcttgccctcttctcgcactatagctgcactaatcgcatcttctgagatggctaaatagagaaacaacgtctctcctgttaatggtttcgccaaaactggaggcgttgctagatggctttttatgttctaaaaggcctcctcgcactcttttgtccactcgaattttttgttgcctcgcaatatgctgaagaacggcacacacttatcagttgacttcgaaatgaatttgttaagtgcatccattctacctgtcaaagcctgtacttccttaggctttgtcggtgatggcatgtctattaatgccttgatctttttaggatttgcctcaatacctctcgcgttaactatgaatcccaaaatttatctgaggaaactccaaaggaacattttttcaggtttagcctcatgttatacttctttaatatttaaaagcattccgtgaggtctgaggtatgatccttacttcttatcgattttaccaacatatcattgacgtaaacctccatgtttcgccctatctaatttgcgaacatttcgtttactaatcgctgattcgttgccccaacgttcttcagtccgaacgacatgactttataacaatagagtcccatgttggctatgaagcttgtatgttcttgatctaggacatacatttttatctagtgatatcaagaatatgcgtccataaatgacataagctcatgcccaacagttgcatccactaactggtcgatcttgggaagtggaaaacacccttttaggcacgcctaattcagatcggagaagtcaatacaagttctccaagttccgttgagcttcgggatgagaacaagattggttatccatgagggataaaacacctcgcgtataaagtcattggctaacaacttgtcaacctcctgttttagtaccccttgcctctcggaatccaagggcctccttttttgtctctttgatgggtagtttggatcaacatttaagtgatggcagataatattagggtcgatcactatcatatctccatggctccaggaaaacttatcctggttcgccttcagaaaacttgttagctgctatttgagctgctcgcctaggttcttcctaatgtacacacagttttgtgagatttcttgggtcgagatgacctcttccaattgctcgattggtttcaacaggtttctctcatcttgaacttgggggtcaagatcttcatctttctgctcagtttcttctgccaagatcgccatcagctgatgaccggcttttctatgctgtagctctatgcgatagtaatcgggagccagcatctggtcaccacgcaccactcccacgccatctggtgtttggaatttcaaggataggtgcttgattgaattgactgtccctagttcgataagtgatgggcgacccaacaacatgttgtaagttgagggcaggtcgataattaagaagtcttacataacagtagcagttaaaggtgccttgcctaaggttaatgcgagctcgattatgccaaggctaccgatgctatctccggtgaatccacaaagatttaccatacaaggccttaacttgggctttttcgagccccatcttctttagagtctccttataaaggatatttaccgagctcccattgtttattaacactctcttgatcctcttattggcaagttgaatggttatcaccagtggatcgacgtgaggatacctcacatttttctcatcttccttcgtgaatacaatgggaggttccttggtttttaccttcttcgaaggttctggggcaaaggtcgattgctcgttctttatttctttcacatatattttctgggcgttatttctttcccctgcgatatgtggccctcttgaaataaccaagatgtcctctccttccacgggaataggttgtaacccctggttgtttgagttattgggtagagtgggctggttgtaaccctagccctgtctttttacgtactgtttaaaatggtctcaagcgatgagactttctatc

SEQ ID NO: 224752 - DNA, 868 bp, Cannabis indica
acaaggaattggatgccagcaaatcagatcttgaagagaagctaaaaaagctcactatggaactgtgctcaaaggatagtgagatttataagctaactgcagaactgttcagaactaaacaatccctctcatgcttgcctccaggaactgcagccttgaatcaagctctacacagtcaaaaaccatatggggatcgcacttccatagggtacaaaatgttatataaacaagggcaggatctgtccatcaatggtgcctcatcctcacatgaggaaattaaactcaaatttgtccctgcctctgagaacttgccatgtagtcagaaagagaactcttctagtgagtctttgaaaaaggttgacaataatcgaagatctggaggaaagaaacctgccccatctcaagaaagatttgtaccagtatgccatttctgcaacagaagagggcatatcagacctaagtgctacaaactgaacacctatttgagaaacctgataaagcgtcagtccacaaagggcaaatcttataactcctcaagtggggcaacaggtagaaaatcaactgctaaggcaaaagatgtagctcttgttgctcatacgtctctgtctgctatgcaagaaaatcactagtactttgatagtgggtgcttaaggcacatgacaggctcgcgtgattctctaagaaacttcaaagacaatcaagaagggtctgtgacgtttggagacggtaatcgaggaaagattatgggttacggagatctgaagctggcaggcaagttccctctaacaggtgttctgtttgttcaaagcctgaaggccaatctgatcagcattgggcaactctgtgatgcagagtatgatgtacgttt

SEQ ID NO: 224753 - DNA, 1355 bp, Cannabis indica
ttttaaatgattataagggtatttttgtcttaacccaaatttgaaaatttgcatgctttgggttttggtggtttaggattttgaggcacatcactagcattaaatgctatctttttcaattttgtcgtgttcccatatgttagatcttatttcttttgatctaacggtgatcgcttccagagtataaaatttgaaagtaagcactcattttaccatttttacctttcaaacattcaagcctttctgcataaatcatctctgacttctcatcaccttgcatgccctcactctcactaacttactttttgcgtgtttcttcggatttcatcttcagtctcaagatttttcagaatacggtgattcaatcatctcaatcccattcatagagttcttccttgtgcaaaaattctcatcagaacagtaagtggtctatacctttctttttcatatttacattttgattttcgcaattgtttgtcttctttatttatttttgtttggttaatttttaggtgatttttgtttgttggataattttagggttaaggaaaaaatataggtttatttgatttgtaggtttctagtttaagttgaatttacgttttccaaaaatatggattatgttctttttgcaagtatgtcccaatctggttctgaaatcccaattccagatttcctagaaacagaatgtcctaaaaaattagctcatccatttgaaccaaaatccaaaaacctaaatccaaacttgagataaatgatgccaaaattagggatcatttaatagaaaccaaccaagctgaaattacctatcgttataggcagtttttgcaagaaattagtgagggtaaacaccattttctaaaatatgtaacttggccaaaatcctagattttagcttctatccctttagcgagacccttgtttttacctcaactcactgttacttttttaccaggtgacctagatttcgaaatcatgaccacccaagctcgtaaatcaaagaccccccaagattctaccatcaactttgaggctgagcttattgaatccaaagtaagggctattggagactatgtcaacaatacactaaagtcctgtggcatcaagcaagagcgacgatgtcgcattagatctgttgctccaggggaatttagtttcattccaccagaaagggtgattcgagaggaatgtggcgaagccagcactagtgcctcgtcaggaattggctcttggagcctcgagcacatcaaggctggggtagtatttcccttgagggaatactttaaggagttctgtaattatctctgaatcgctcctttccagttaatttcgagttcttacagaatcctggcctg

SEQ ID NO: 224754 - DNA, 1869 bp, Cannabis indica
ggtgcggttctaggtcctggccccagtttggtgtcccgagtctggttccatgtttgggtctgagttcgggtcccgagtccaggtttgggttgggatctgattgttggtttcagttcgggtctaggttggagctggagtctaggtcctggtccggttacggttctgggtctacgtccatgtacggttacggttccaagtccaagtactagttttggtcccatttttgtgtcgccgtctacttccaatttcaaaccaagacccttgaacaagactaggaccgagattagggtccaattctcggtctcgatcccagttctgggtctcgagtcatgttcaatgtttgggtctgagtttaggtctgggttcaggtcccgagtcccggttcagattttgattcaggttttggacccaatcctagagtgggtttgtgtccgagtctggctcctagtctcgttatagttttgggtctgggtcctgtcctggtcctggtcctgttcctgggtcctaatcggcttatagtttcggttccagtttcaagtcacgaggtacgggttcggggcgaggttcaggtccgggtttcagtctcgagtagggttcgaggctgggtctggttccgagttcgggcctgggtctaggtctcggtcccgttcaaagatctcggtccggttcaagtttaagtttcggtttttgttcccaagtgtgggtctgggtcttggtatgtgtctgggtcctgatttgagtttgagtttgggttcgcgttctggtctacgtcctagatctagacaccgacaacgaatcgggtccaaccatcgagtcccggatccctggtgccgaggtgggtcctatgtccaggtttgggtctagggtctggtccctgatctagatccaagttctaatgcccaagttctaggcctagttttggggcccaattcttaggtcttggtcccccatctatattcgggtcctaagggtccgggttcgggttcgggttgaattcgagtccaggtcctggtttgggttcaggtacgagttctcgtcccagtcccagtctagctctcagtttcgggtctaatgttcgagtctggttcttgggtcctaggttcggccgcggttttgggatctgggtctaggtcctagtcccggtgtgggtccaggtcccggtcttggtttaggtcccaagtcacaagtcgtggtctgtgttcaagccccagtatgggaactggtctgagtttgggtttaggtttgggtcctattacagtcccaagtctgggttctcatcctagaccgggtttggatcccaattttgggtccgagtttaggtcgaagtacgggttcaggttcgagtctaggttcgggtcctggtctgagtccaggtctttttttgggtccaggtcggggtcccgatcacggtcctagttaaggtctaggtcccggaccaggttctgctctgggtttgggtccgggttcaggtcttgagtttggttctaggttcgggtcttgattcgggtctgggtctcggtcctgggttctactctcggtatgggtatgggccttgagttttagctcatgtcttgggtcgtagttcgggtctcaggtccaggtttgggtctaggtttaggtcttgggtcctgagtcattggtacgggtccccgattcaggtcaggttcctaggtcctggtctgggttagggtcctagtctgtgtgtaggtcccggtctgtgtttggtacttgtccttgtgttgggtcttggcctggtctgggtcttgctcacggttcagttcttaagtcctaggtccgaatatcgggtcgcgggtcctagtctcggtcccggtcccggtcccagtctaggttctagtcccagtccaggtt

SEQ ID NO: 224755 - DNA, 1583 bp, Cannabis indica
tccagttttcacatgcaacaaacattttaacagaaaaaatagcaaaataacagcaacaatccacagatcaatcatcaaacacaacattcttaattaaatatgacaacaacaaacaagatttaaaaaaaaaaattaattacttacccattgatggagcttgtagtgtgttctagcttctaatgtggtggattagtgtggtggcttgtagtgtggaaggttgtagcttctagtgtattaatgagtgaagagaagaaaaaaaaaaatttgatagttgtggaagataggctttcgggtggggaattctcatagtgtcatatataactaattatgttaagtataaatttaggggaaaaattatggggtaatgtaagtatattaattcaaattttcctttccaaatctctcctcaattctctatcttgccccattttaaaatgttaatttgggtatgcttaaaactctattttttattatatttttaactctttaaatatatatctttttatcacggtatcttaagattactacctttctatataaggagaaagaatagtttttaatgatattttctatactatattttttttataagtattttctaccctattttgagtttgtttgggctcactacaaaaatgggttttagaggtaatttttaaagcattttcaacatcaattttggtaaaatttactatcgacattgttctaagcaatgctgtaggcgagaaaaacaacttgacggcatagaaatcttatggcgtcgattattataaagtaaccgcctcattggggcttcctatagtttttttttcagctttattattttgtatttgaataacataatttttttttaaatttcaattaaaaaatctaaatttatttttttctatatatatatggtaaataccattttggtccctgtattttgtaaaaattaccaattggaccctctattttgttaaataataaaattgaccctatattttctaaaatggtaaaaataggacattgagctcaattttcaataattttattttttaatataaccaactttatggcaatttctaatacgaatagatatagaaaatgtaactactttggtaataatatctctagatcagattattattaaattttattttgacaaaaaattagttaatggtcctatttgtacatttttagaacatacaaggtccatttttgtcatttatcaaaacaaatagtcaaattgctaatttttgcaaaacacaagatccaaaatggtatttacccatatatattatattattattcatataattaaataaaatgttaattatatatagtaagcataaataaaaattaaattgaaaagttaagtaaatgtgatttttacattagatgccaaatttagcatcttttacatttttatttatgtttggttttttaaacttttttatacaatttatttttcaaaaaattctttaattacaaaaatacatttattgcttatgttatctctttcccatttttcttagtcttttttacatgttaactccctctctttctttttctttcttttttttttctactctctctctctc

SEQ ID NO: 224756 - DNA, 1414 bp, Cannabis indica
tatcaatgggtatcgtccttcaggttcaacaattcttttgttgatataatagactggatgatgtacgttgttttcttctccgagcagcacaacactcacagcatgttctgtaacagctaagtatattcttaattcttctccgtctagatgttttgagagtacaagaggttttgcgagttgcctttttagttcttcaaaggcattcttgcattcctccatccattcaaatttcttgttacctcaaaggatgttgaagaaaggaacacacttatctattgactttgaaacaaatctactgagtgcggctatccgaccaattaagctttggacttcttttgtttttgttggcgatttcatatccagaaggcttgaattttctctacattggtttcgataccttaggcattaacaataaaaccaagaaacttacccgagctgactccaaatgagcactttaagggattgagtttcatgttgtattttctgaggattttgaagcattcatccaggtcatctatatgcccccagccttcttggatttgacgagcatgtcatccacgtatacttccatgtttcgtccaatctggtctttagacatttaattcaccaacctttggtaggtagctgcagcattctttagaccaaatagcataactttgtaacagtacagatccatatatattcagaaacttgtacgttcttagtctggtaaatgcattctaatttgattataccccaaataggcatccataaagcttaggatctcgtgcctggctgttgcatccacgagctgatctattcttggaagtggaaaactatctttggggcacgccttgttgagattggtgaaattaatacatatttgccattttttattgggcttgggtaccagtggttggctacccaggctggatagaaagcttcaatgataaacttgttattacatagcttttctacctcttattttaatgcttgtgcccgttctttgtataaaatcttcttttttattgaatgggatgaaagtttggatcaatgtctagggcgtgagatattatagaaggatcgataccgaccatgtcttcgtgcgaccaggaaaaaatgtctaggtcagctcttagagattttattaaagctaattttacttcaagcaacaaacctttgccaattttgaagatcctggtcgggacatttgggtcaatttctatctcttccaattcttctactaacccaacatttgtatttggttccccaagttggggatccacgtcctcgtccccgccttgggtgacttcctattgggaaatactttttctcttgtccaaattctggccaaaggaattttcctttttagccttggtcagggcaaggttatagcactcctgtgcaacttattgattccctttgaggcacccta

SEQ ID NO: 224757 - DNA, 3228 bp, Cannabis indica
ataatcccagctaacatagccgcagttgttcctgtataagtggtaacacagaccaattccgtcttactaggaggtattcaccaagaaagcctcttgcgagcattaagaatgatcgagtagcaaagaaagcccatctacaatctccatgggacatcgccttttacagaagaagtgcgacaagctcgactcctaaagggtttcaggctatctaaatcgttcaattacaaaggtaatactaacccaatcaattacttagataaatttaatatgattatggaagtagatcaggtaccacagtaggcaaaatgcctgattggtttagccaattacctgaggcctccatataaacctagaagaccttcgtagacttgttcttgattcacttccaagccacgatgacgtacaaactactgtacacaacgctggcaaatattaaacaggaagtcggtgagtctttataggattattttaaatgttttaaccctaaaataaccaaagttgagaaggcccccgagtcttcgttaatttgtatgctcattataagtattttaccaagaaacaacttttggaaggaattacaagcgcgacgacccgagttgttagtggaattctttgtaatggtcgaactacataaaagaattgagaattctttggccgagttggaaagagggaaagagaaatgtgagtctcttatgccccggtcgcgttcccaaagcccgaaaggaaaaaattccagaggttgaagccccagaagacgtagtccattgaggtgacgaagtccaaagcttgccaaatctccctctaagaaagagacatcccaaagaggaaagggggcccacgttttgtcaattataccgagttgtctgttcctcgcgaccatacctatgtgatagaggaacataatggcattttcagaaatccactaccaatcaagggtaatcgcgacaaaagggacccgagaagttttgtaagtatcacaaagatatttgccatacaactctagagtgttggtttcttcaagaaaaaattgaagagttaattagacaagggaaattcagccagtataagaagaacggagaaaatcatccccgagtggatgatagcaacaatacgaatgatgcaagtggtactcgagcccctagtaatattctgactatcataagaggaccacatgctggtggagaatctagaaaggtgaaggagcgctatgcaaaggaagcaaaagaaaaaccccttaccaatgtaaacaatttgagtgaacaactagagaagttgttcaaaaaagaatgagatgacatcaccttcatggagagtgatgccagatgggtacatcatcctcatgtcgatgctctagtaatagttgcaaatatcacaggggataatgtacatcgtgtcttggttgaaaatagaagctttgtcaacctcttgaatttaaaggcctttaaacaaatggggttgcatgaaaaggacttgcaaccagtaacttcgagtatttatggtttcacttgagatacaatcgcattgaagggaatgatcaacttacccataactctaggaactgcatctgtcaccgccaagtcaatggccgatttcgcagtaatggatcaacattctgccgataatacggtgatagatcaccccattctaaaagaaatgaagatagtcacattaatttattatctcacaatgaaattccccactctgcgggtgtaaggtcagtgcgaggagtccaggaaaactcgagagaatgctataatacatgttcaagatcgcaaaaatgaagaaatcgatcaatgtcatctatttgctcgaggctcctcctcctcaacatgaattttagaatcgaggaaatactgcatgttgaaaaacctaatttggatcctaggatcctcgactacaccaacactacgcaagccgcataatagacaatcgaggtacgtattgattcctttgataatactaaagtgctaaaaattggttccaaactaatttttcaccagcgggaaaagcttgtcacttttctcaaatagaattcggatgttctcacatggaaacattcagacatggtcaaaattctgctagaggtcatgtgtcacctattgaacattgattccgaagtgcgaggagtacgataaaagcgccgtaaaatggaccccgcgaggtaccaagcgcttaaagaggaaggagatcatttgttggcatgcaaattcataagggagtcattatatcgaaactagtttgctaaccatgctctttaccaaagcccaatggctcatggcgcacatgcttcgactttacaaatttaaataaagcttgtctcaaagacaactttcctttaccaagcattgaccaacttgttgatgccattgtaggtcatgaactccttagcttcatggatgcatactcaggatatattcaaatcccaatgtatgagccagaccaggagcacacctccttcatcactgatcgaggtttgtattattataaagtaatgccttttgggttaataaaatgcaggagcaaggtaccaaatattggttaacatggtgtttgaagatttactagggaagacaatggaagtgtatgttgacgatatgctcgtaaaatctcaacatgcaaaggaccatgtcgctcacctagattccaagtttagaatcctacaacactacaaaatgcgacttaataagtgctttctggagtggggccaggataattccttggtttcatggtaaaccaacggtgaatcaaggcaaacccagtgaaaataaaagcattggtagagatgttatctctcatcaaacctaaagaggtttaaagcctgataggtaaagtcacatcattaaaccgttttgtgtctcgctcctctgataaatgtaaagaattttttaagatactaaaaggtaacaaaaagttttattggactgacaaatgtgatgaagcttttcaggcattgaaaatgcacttggggcaaccctcgatactatccaagtcgatgcctagagaggtactatcaatttacctggcagtgtccgaatacgcaattagctcggtgttaatctacgaagaccaaggtagaaaacacctgatgtactatgtaagaaagcgcttaatggatgccgaaactcgctatccacaaatggaacgactggcattttcactagtggttgcttctcgaaagttacgaccatattttcgagcacacagcattaaagtactaacaaattatcc

SEQ ID NO: 224758 - DNA, 1333 bp, Cannabis indica
tcctttcttatcgactcaatttgaaaatagtattatattgatagaaaaaaaaaaaaaaaaaaaaaagataaaaacattatggaaactctacagtgacacatttggataattttacttttaataaattcagaataattttaacaaccaaaaaaatatatggtgattatacgatgcactctcttaaaagtgatgtattaagcaccattaatttatttcggcatccaagaaaaaaaatttaatctaatttttgttcatattcatgtacgttataactatttaagatatcctacaaaatttggagaaattcagaataatttacaatatagaaaataatgttcaaatagtcgattttacacgcgtataaaataaaatagtcacgcgtgcaatataatgtttgaacatagttttcggcgtgttaaacttttctaaatttcttaaaatttcgcagaatgtcttaaataactataacgtacataaccatgtgaaaaaatttgactaaaaaattatttcggatgctaaaacagataggagtgcatcaatatatccattttaagggggtgcagtgtagaattttccgaaaatatatacatttattattagctatagtgtcaatttaacattccaaaaaaaaatatttgtgttttaacatattgaaaatgttttctatcgtatgttaggtttctcgtttttaaatttttagctgtcaaaggttgttttaatactctggcgtggcttggacgggatatgtgattagtgcaacagacgtagcatgatgggctccatctctatgcattgtatgttgtcccctattccttttctccatggcttattctatgttgttggtaatttcttttgggttttgggcttcgtccagtgaaattgggaggttcgtccaattgggatctaggtaggattgttagtgtggcgtgatggtctaaggatggacttgcttacaaatcgagcaaggagtcagtttgggttttggtccatggggtggacaagatccaattaaattcaattgaaccaaattgatctaatctaattcaactacaaaaagttggatattcaattacaattagattgaattggatgttaaaaatttagattctaattggattggatcggttattagatgtcaatgtcaaaattcaattaaaaaccgatccaatctaatttttttatattttattgaatttttaatacttagttgttttgtctatttatttttgtatttttttcgttctattttattacttgaaaatattcttattttagttattttaaactttctgttgcattaaacctgtatggataatatctttatggagtatta

SEQ ID NO: 224759 - DNA, 984 bp, Cannabis indica
gcacgaaattctggggagaatttgtggtatgacaaataattgatcagagggtgattggtgctatgcttggttgtgacagagtcacattggtaatctgttaaataagcaggttttttaggtgcacggccggatttggtagtgcatggttgtgtatttggcttattttgattttgttgttggcgctgattgaagtcagtgttggaatgttcaggaattgaactatctttttgagtcgaattaggctcagtaaggacaggggaagtgtcgtgtggttgagatgaacaagtctcagtatgatgtggaaaaaaactgatctatagtgtgagtgttagtgaccgaaccaaagggaaaaatatgttcataaaagagaacatctctgcaatggaatatttgtttggtttgaaggtctagtagagtgtaggccttcatatttgggggataaccaataaatgcacaggctctagctcgaggagagaatttggtagatgtgctaacatgggatgcgtatgcaagacaaccgaagtttcgaagatggttgtattgggggagtttgttgtgtaataattgataagaagtttggtcttttagaagaatggatggtgttctatttaataaatagacagcagtagagatcatgaaagaccaatattgtaggggtaagtttgattgaaaagcaagggctcgggcaacattcaaaatatgctggtgtttcctctctaccacatcattttgctgtggtcttcctacacaggaagtgtgatgtatagtcccttgagatgcataaaaggaagtgagtgtgagttctttagcattatcggttcttattgctttgatattggtcttaaactgagtatgtatgagttggaaaaaactctgtattgccaatattgcatctgattttgtttttaaaaaatataaccaagtgtgtcttgagtgatcatccactatggttaagaagtatttataaccttcaattgaggtaat

SEQ ID NO: 224760 - DNA, 1859 bp, Cannabis indica
tcgtggggcgaaggtgtctgtacagatggggcccacgcgttctggacaggtgtcacacgcgagtacttccacagtagacaaaaattttagataagcatcattggacaaagaggatgtattccttttggtagtgtacgcattatcatgttcggacataggagacaaagtctggaattggtgggatcgggagtcagagggcaaccacgtcacccctcaaagggcttctagaggcacctcttggaattcctctccaagtgcatcacaatgttcatgcagagggttttgcttattctgtcttttgaaaagcgagaagccttctagattcaggtaagtctcatcctcggaggcaatgcttctaggcttcaaatgggctcgagcccaacttctgtctagacgaggccttcttatgtggaagggccttggcccaggcgatttctggttgataattctctagaaatccacgtgtcatccttccgaaaacacgaatgacaccagttttagcttttagctatagctcctccataatttcttcaataaactgtttttttatagcgtaccaaacttttttttatcatatataacttttttaaaaagtaacttttagcttttttgaaaattgtgccaaacggactcattatacttgattagacatatcaactctgacaaggaaaactcatgaaatcgattccaattgaatctaaatgcaaaaattaagatatccatgtatgtttcatatatcaaaaacacctaaaatatcgactttaatttcacaatttttttcggctataaacgtctttataagaaagtttttagattttcaaggtttttcaaaccgttactattatagatcaaatgaaaaatgaatatggaaagagattaatcatgtttttaatctaaatgaacacgtataaaaccattttgaattatcgaaactctcggccatgaacacgtactataattttagcccaactgaaaaacatcttgttcaatatcaaaatgaatgggcttttgcttagattagtttataatgtatataaagagatttctaacatttgtatgcataaaaaatatagaaatcatgattaaatttaccaaaaactttcatactttaacgtggtcttcatactaaaatcatgattcgaaaccacttttaaatttataaccgaaaagtgtgtataagtgttagtttataaccaacacaaaaggatcttttttagtggcgattatgaaccgacacttatacttaatttgtatgtatatttattttttagcgtttttcaatctcggttattgttttagtgatagactagtaactggcacttaaagtcattataggtgttcgttatgaatcgacaccttagagtttaggtggtctctagtatcggttttttctaaaagaaaaaatagttcctcaaactgacatcaaaaatctattttatactagtgatggaagaatgaatatgagcaactagtaccctatatttatatagatgagacttccatcaaaatctgtgtcatattagttgtcaaattattttgacaattaatttaaaaaattaaataggtaactaagatatttgttaattaaatctgaatataaataaaatattttaattaattattaaaatgattagtcatatttcataaatcaaataattcatttatttttatataaataatattctaagatatatatatcacaaatatccatataaatgtatagtatcttggacattattaattatttaaatttggagtaatttaaaaatcaagctttcaaaatgtctaaagcgtattacgctactgctgggagttgaaaatgaatacaaacaggtactcaaaaatcaacaccaaaaaat

SEQ ID NO: 224761 - DNA, 800 bp, Cannabis indica
agaaatgcatttcgagggccgcgtccactggaaagggaagaagagagtggccacctcaaaggctccttctgattacgaggtggagccccctaaaaggcaaaagaaaactatagctaacaagaaacgagcctcctagactgctaattgcgaggttcctgagactgaaacctacgatccgattcctcctccagtctccacaagtaccgacaagcatcttcccaaagcgactcaagcctctgcctcctcgagtcaggcccttgaaacatggcctgtcgaggctggaaacactggcccagagttcatcgcagagtttggagcagcaagttgccatcatttcaaggatctccttccccatgtctgggatttgataaaccatgaggatttggagggggtgcttacaaggagtttgtctcacagcctcttagtaagtttccttatccttttttgttcacttcttttattcttcttcttttttattactcatgcatctttatttgtgggtttccagacttctttcctctcctttgtcacccagtaccgaggcttggaaaagataaaatatttggagggcgaggtccagaacctgataggccaacgcgaggttgtggccaagaaatggaatgatgcccaactggagattactcatcttaccaaagacgccgagaggatgaagaagaatcttgaagttgtcgagaaggatacaaaggatgagatccatgaatgcgagaagcccaaagggaaacttgatgcagccaaggtgacacttgatggcaaaggggccaaaacctaagaacgatgca

SEQ ID NO: 224762 - DNA, 1161 bp, Cannabis indica
tcatcatcatcatcatattcatgtaaggattaatctatctacctttacttctttcaattcatctaacgattaaccttaatttattaatttattcggtataggagcatgaacaaaaagaaaatcgtacgtttttgcgtaagaaaagggctaaaaggacatcaccaatggtgtgtggtgatgataatgacagaatttcgaaacttcctgatgcattgatcattcacattctttcgtttctcccaacgaaagatgtggttgagacatgcattctttcttaaacgttggaaactcgtctggtattcagtccccacactctttttctccagaaaaatgtatggtacttggagacagagacaaggcctaaacaggttttacaattatgtcagtaattgtttggaacatcgcaagaaaggtatgaatcttgttgttgattcagacataactagttttaagattgacatgacttcttactatcaaagacataaggctaggtcttctactgcttacctaaaatactagacaatgcaagatatttgactagtttggagttgtatggagtaatgttggatactaattcttgttcatttagttttccatttttaaaaacttgtcattgaaagatgtttggaattcagaggatgcagaggaggatggggtagttaaatttttgttgggttgcccatctattgagaaattgctgttacatgattattatttctttgagatgaatgctcattatcagttacaaagtttaagcctcaagtttatggaacttatatttcaaagctttggtcatgatgcacaaattcaagttgaagccacaaatcttgaatctttggttgttgagggaatatatattcccttgaacgatataaatttctcttcttgcgagaaaattagaaatttgtcattatctacagtttactttgagaacaatcacctgtcatcatttgaagctctcatttcaaattttcctctaattgagaatttggctttgaacaattgtaatttattaaagttggagcaccttaaaatctcgagccaacacttgaaaagttttcatcttaggaattgtcattactcgcgtgatgatggtgagatgatggttgtcacaattgaatctgctccaaaaatagcttacttttgttatgaaggttatct

SEQ ID NO: 224763 - DNA, 2107 bp, Cannabis indica
aagaggctagagtattaccaagattatctgcatgagtggagataatatagatttgtgggatttttcaagtagatttctggtatgattcacctatgaatttttggaaattatctattggtagctgtcacagatcttattccagcttgagatgtagcttgaattgattgatcatcagtagatatggttgaaaaatcaaagtgatgaagaacaaagaatcaagaaaagaggaatcaattgaagaataagaactgaagcagagatcgaagaggaaaggcttcacagagaagaaatttgagccctaagattgatgaccgcaacttcgccgaagagatcatcacgacaaagatagaggaacaagattagaaggagagcttaactttcctactctgataccatattgcggaaatgagaaattgagaatcaaagaattaagagaaaattgtattaaaaaaattctaactgagtacaagagatggtgctaagcaacttatataagtagggatgtaaacggggcatggcgggggcatggattgctcccccaccccatacctgcttcttaaattcacccccatacctgctcaatatccatttaaattaaagtggggatggggcagggattacccgaaagggaaatgattcccatcaagtacctattacatatatatttgtagaaaaaaaaatgatgtctcaaatagaagtaaaaataacattaaaacacataaaaataaacataagtagaataatatgtataataaatggagttagtaaatacaaaattggtaatcgaaaataagtggttaagtgttattttatttaaagcagttaagtgtgattattaatatgtatcacgatagatcgatattttcatgaacactgaaatgtctcattaatataatcaataaaagagctaaaatatgaaattattttaattgtaatatttaagatattaaaacttaaatatatacatatatatcatatcgagacgggtatctattctcccgttctgccccgaacccgactcaggtatgaacatttaaactcatacctgtccttgtccccaaatttcgacccctgccctgcctccttctattagaagcgggtacccacaggtaatagtcaatcctaaaaaaaacattaaaactcttaagtggaatgatatgtccttatacatgcaaaatctcttaagtcaacaagaggcacggttgtgacactaatgtttagaagaattaacgtcacaatgtatataattttgaataaaattattgtataatttattatttctttatttataagtttttttttttttgtaataagaacattttaattgaaaattaataagagaataagttctaataattatttagtttcataattttgaatgaagagttgttaaagtgagtgaaacttaccacttttatcaaattgggaaagaaaagaaagttgcgttccgtatagcaattgactttcttttagaaaacaatttgccaaatgtttggtccttttttttttgatggccgattccttaattttggatttgtagcttagtttttaatcattatactttatacccatcaaatgccaacgttgtaaacgtggcaattaataatttatgttgattgcaaaataactaaataatttattcaacttcaacttgaaaaaaatttgtaagttagacttttttttttttttctttttgagaaaaggctgttattataaattagaaagagtcatttacaacaacagagagaataacagagggaatttcctcatgccaaatacaaatattatcctgtactaaagcctgttttgttaattcatgagccgcttgattagtagttcgtcaaacatgacgaacacaaacttgagggagattggataaatgttgtttaatatctatgactaaatcgctaaaataggacttagaagatgttggattattcaccgcatttgcaagtaaatgaaattcaaacgcaaattgagatcttgggccattagtaaaccattgaacatcgccttagcctccatttcttgaggactataacaaccaaatgctggttttgacatagcagccactacacatcctaaagagtcacgaacaatagatcca

SEQ ID NO: 224764 - DNA, 1879 bp, Cannabis indica
gtcataggtttagcctagtggttcctcacttttcaattgcaagttcgaatttctctcttccaatgtctaaatttatatatatatatatatatatatatatataataatagaaaattagctaattaggaattttttctatttaattttaacatgtgctaaattgtaattcagaccctaaaattattaaaagaactgtaatttaagaaaaaaatttaatggcctaaaaaaattggtgggtaccattttggtcaatgtcaaagtttagagtgataaattctaattagctttaaaaatacttttgacaaatcttaattagcttaaaaaatagttataaaaatatagtatttgtaataaatttttgtttctttgattaattgaatttactaagattttatgactgtgtatttatatattttgttgtgtttttgtacggaaaaattatttaattttgacatgtactttattttacaattttttccctaaatttttgttatttcctcttttttgtcccctttaaattttcaagtattgattaactaattgacgataataatttgtactgaatagtatgtatgcatttttttttttcttttcctacgctagagtatattgccacaacatcattacaatacatctaattgtctaaatgtcatcattgttaactattacaactaacttattatcgcaaaaaattattgttgtgacaacattatcatcgcaataggtcatatataatgaaaatacataactataatttgtacattcaaatattttttttatgtagtgattagaatcacccatgaatttacgatacaaatattcacaaattgcgtagaaaactcctcgaactaggatagctcaccgtctaaccgaaggacaagcttgtcattcgaatattattttgatttcattagtaatgagaattcaaagtatcacacattaaatcagaaacatatatattcaacaactaaaagaagataattttttgggatcccctatttttcgtgtaattggtttcactgtttcaacgtgtacaatataatttcacgatgctactattcaaattttcttttacaataacaggattgttgttcttttttatgttgtatttcacaacaattattttcatattattctgtatttgtattatatggtttttacaatattattatatcgcttacatgacgttacggaaaaatgactagaaaaaaattcttttaaaaataaaacgtagcgtgaaaatgtattaaaaaaataatgtcatttttaggtactttgtataaaaatccatttacaaacaacattaattaaagaacctatttggacgacgttgggcactatctatctatacatcgatatgatattgcccaccttagtatgcaatttttttttcctttccaacactactggaaaaagaataattatatataaatataatttttttaggtcttaaatgttgtcattatagaatattaccacaatttatcgtcgcaataaattaatttattgttattgttactttttattttaaatatttttgttatatccctcatattttctcaaaaatgtaatagaaattttacgaaaatttaaaagtcattttgatggcataatcttcattcaaaaagacaattaatatactataagtcatacaatcaaatgcagctatccatgaggaacaacatcaatgaagatcataaaaacaataatatagggtaagagattcaaacaaaccatggtaattatagatttattttgtgatatactatttaaattgagatatataatttttatatgttaatacatataaaatgtatatgagttatatatatatattgttggacacaataacacgtgaaaacttaggtgtcgtttggta

SEQ ID NO: 224765 - DNA, 2106 bp, Cannabis indica
taaaaataacactacgtggcttggcacgtaataatcacctagtatatatatatgtatgtttgtcaaggccgactcaagaatgaggcagcaaggacccacgcccaagggcctccacccaagtccaaaaaattctttaataaaaaaggctctaaatttattttttaaaatcaacatattttgtatttttactacttttattaaaaaaaaactataattattttctaaaataaatgcctaattatgttttaaaatactaatatttaatagttaattatatttttaaatattatattttagatgtttaccattatatatatacacaaaaaacataaaattttcatataaaaagccttattcaattttttagcctaaagattctcaattagcttgagacaggtctgatacttgtgctactaatcactattttgaactttattttttaatattataaattattcatattttttattttaaaaaaagaggtgagatgtacattataactataatacacaatctcatataaaaaatttcgataaatttctctatttgccaaatataaaaatccgcccctaattaagaatgaagcaaagtaacaaaattgcatatttatgtttattttgaatatgtttagcttaattaataaaacataatacatagttttctaattaaatggttggagttatgatcactgcaggcatttccaaaagagtctccattacttccaagtataaataaggcattacttgaaatttctgaaagtggaaagctattagaattggagaacaccatgcttgaatctgagaattgctcattcaataacaaagataataatggcactaatggtgatgatgatgaacctcctagcttaagcctcaagagtttttgggtactttttttaattacaatagctacatcaacaattgctcttgtcatttacatttttcacataaccaaatctaagtttaaattccaagctctatggtattggccactaatgatgaaatttataaccaatcaatctagattgagtaatagtattattcatccttttgtttaaagtgtacatatatatacactaattaatctagtaaaattaatgtaataattttttaattcatgttgttattaatttgggattgctatttttgttttatataaacctttagttttttttttaatattattgtaccatatggagtatattaataacttattacaaaatatgtatatgcaatatgtaaagtgtaatttagttagttaaaatatgtatttgtaataaaagatgatatttatagtcataatgttagttttagtataatggttaagctagattacatataggatagaaataaggttcaaattccaccaaaagcattttattttatttttttaagtttatttttgtcccactaatgaaaggctaaatagagaagcttatgatttgatttgtaaaaatcaaaattttaaaaacttatatttgaaactgcacaagcttcaacactatgcaatcaagactgaaaaatctcaagcaactaaacaacactgtttgtcattagattaaccatggattaatataacaaaaagtgaaatggtacttatggtgcctagcatctttataaggtgtaatatcgttattggtacaattcaataataggtcacacttatctcatagcagtactaggtacattgatgtcccataacaatgctctaacgaaaactggacgtactcggctatcatattttcagcacttaaatagctacaatgccaattttgggaggctttggatttgtaaattcataatatatcttatctcgaaaattttaggtagagacaccacttttattcctttcataagagtttttttcgatttttagtagtttttttatatgacaatgtatattatagttataatagatattttttttcactatttctaaaacattctgaacaatttagcatgtgcaaaatatattctaatagtcagcattcttaacaattttttggaggccttaggccaaaaaatttatttgaacttttttttatgtgaatttttgaaaatatgtattaggttttttttcttagtaaaatattaattgtagtatctt

SEQ ID NO: 224766 - DNA, 1365 bp, Cannabis indica
ataatttttctccggaaaaaattaagtgcaagaacggtccacagaagtaagaacacataataattattaaattgctgcataatctttaatactgtcatatagttaggagtaatttaaggttaaatcctagaacttttaattcacttataattaatcttccaatctcaaattttggtagaaaaagccgcaaacctctacttcttttagcaaattaaaaatgtcatctataaccgtagttatgtgacagtataaattatcccacaagtaaataaatatacaagtatcgcgttcgtatttgcctatataattatttgaatttgaaaagtggttaaaaatatttcaaagttgttaagatattctctcaagtaattgagagatttcctcataaatatcagtaaccgaattcatttatagatatttatttatttaaataattaagtataattttgtttatcgaaatttttgaaaactaaatattttagaactaaagaaatagtgaaatgcagaaatgaagagactgagattttttatgtggttcgggtgttaattaacattagtccacgagttagtctattagcctcttaaggagtttttgatatgtttacaatatttttttgtaagaaaccctaactttatactctaagtttcttgttgtgctaaaattagatatacgcaagtgcacgtagtcataaacaagtaatacaatgataagtaacgagtatcgtccccacaaggactgtataaataaaatttctattgcaaaaccaagcaaaatgcctaagaaccaaattgaaatgattaatgattcaactaaatcaacaagaaaataagtaaattaactcaaaagtggatgcaagatgaaaataaaaatgagttgtaaactattgaaatgtgaaaggtttgaactattgaatccccctatgtttagcagaaactgtgcgatttgctgcagcaaaacgttagcaaaaatcccaggttgacaagaactccaataaagtgcataaaactcttccaaattttatgcaatcaatctttgaacctaatcaaacatattcatatgccaattaagctcacgaataccatttccaagcacaattctcaaatattacacaaggatataacatattcctatgttatctctaatctaatctaataagattaagaacttgtatcatccaagttaagttcattacatttaacctttctagaattaaatataactcaacatcgagctattggtggccaatcaatatcaagaaattaacataaagcacacttgaatgaacatgagaatttttactaaatatttgcataagaaaattactaaactaaacataggttcttcaacaattcaaaccataaaaa

SEQ ID NO: 224767 - DNA, 1264 bp, Cannabis indica
aggtggctattttagagctttacacctagttaatgttaattcgtcaaggaattaatgaaataggcctttttcacttaggaaaaaacaaaaaaaattaaagaaaaaatcaaaaatcaagagaaattcattctcattctctctctctctttgctcagcccacatagaaccagaaggaaccaagtttttacttcatcttttctaaaaattcaactaaggttcaaggagtaattggtgtaggtaagccctagaaactcttaacttttgacttaagttttgattgattttggtatgtaattttttaggggttgttagggtttgaatagtttgaagtttgatttctaagtttaatttgagttagaatgttgttctagcagctggtttagggatgtggggtgatggatgcacaagttgagtttgaaaactcaagctggttcatccatgacatgttttaattttgtgtgtttttctggattctattgattggcattggttgtgggaggtgaatatagttgttctagaaattttggtgggattcggacatgttttgtgcaggttttgaattgtttgggaaaacctagtgcaaaccgattaaccgatttgccaagacctataaaaccggttaaccggtcctggcaggttcccctgaaacaattcttttcgtcgattcctgtccattttatagccttatttgggtgattccctgttttctagagtattgtagtttcagttattagtaacagaaccttaagttggcagtttggctttcccagactagggttttggcttattatttagtcggttattttgtgtgattagggcatcaatccaacatgagattttctattcaaatcagccaactcacttgaatttggaaacgaggtaaaaatagtgtagaatatgtgatatatgtatgtgtgaaatatatatgcatgcttattatgtttgtatactaccaacatttctacaaaaatggtacagagtgcattggtatagtgtatatcgttacaggaaagtacatggtgtgtgtggtatatcacttcgtggtactcaaggtacagaacaaaccctatcaacactcgtacaatgttggtgcgaagtgtatgtggtacagtggcagtaccccagtaaagagcattcttactcatttgttaagccttgtaaataggtgtatgggtgcctaaatacaagtcaatattatatgatttgttatatgcttttcttattgagtttgtcgactcacagttttactttcatgtgtaggtaa

SEQ ID NO: 224768 - DNA, 1685 bp, Cannabis indica
aacgataatagaagacccccactagcattctttctcgtaggaacagctttgacagagtaaaagcaggctatctccaaaggagtagggcactcccagcctaagatgtgatacagaaccttgagcctcacgaggatcctgtatgaggtgggatttagctggaatggggaaagcccgaggtagttgcagtagtccttaaagtaatccctgaaggtaagaaccactccagcattgatatgctcaaggctctaagatccaacacccaaagagttactcgtgcttggaccactacactcctcatgtattattctttcgagaggaaaacagctgaattccccaagtgccactgaccttataacgcaccctttccgctgcttaatgccgcaagactgtaggatgccaccaatgtaggccccaatagacctaaccttggactcgataagttctgcctcgaaggtaacattggggtcctaaggggtctttgatttgtggggcttaggagatatgatttcaaactcaaggtcacctggttcaaaagtaatagtgacgttgggtaaaaccattggtcttgcgagtggaatagaagataaactcatgggtttaggcgaggccgtgtctcgcaaaaagcgatgcttgccctcaaaaatttcttacaagaatcgcctataacgactggcactctcttcttggttcaacttaatcaaatggtctctaatcctggcattgtttatttttaatttggactgaggttcaaaatttatgggtttatgtgggcaagcaatatgtttaggatattccagtgcgtgaaccagattgggacatctctacaaaagaaagacaatccaatttctggatgaaatttatcaaatgagaggcttaaggaatataacaaacctaaactatgtctaaccctaaaaatcgcccaggagatactaaccttattttttaaacaaaatgaagtaatggaatgtaagacaagtcataactcaaataaaagaaaagggagaacaatatttactatttgaagtcgaaaagctggattctagagacttctgcgaatggagacgtgacgaccgaagggataagttttttgagcaccgagagtcgaaaaagcaagtccgagtaaatttgcaggaagaatgtcaaagatagggatggcatgcacaaatttagaaagctcgagtggaagtttcagaaagcttaaactttttggagaagatgaaaatggtagaaagtttgattcttactgttttatactttatatttttcaaccatcagatcataatagcctattaatgctattgatgtgtattggaaccataaaactgccaaaattagagaacatgcgtttttcaaaagggattatgacaaatataccctctgtaatcactaaaaagcactttttctcaaaaagaactttttaaggggcaattgttatacccaaaattcgtctagcacttcagaggaggacacgtggcaaactgggagaatacgaactaacaaatataataatatttatatttaaaaatggaataactcattaaatgcggaactgacataatatatttacaacttgctgactgtaaggtcttaagcgagataaagatatacgaattgttgccttgtgtgttagcaagaaaccatacgacatcagtagtacaaggcgaggcatcaacctcgctacgcat

SEQ ID NO: 224769 - DNA, 2236 bp, Cannabis indica
aacaaagcctttcaagctttcatcataacagacacaatagggtcgaatgaaactctgagtttttgaggtagatttaggttttacaatctcagatctgtgatttttgcaaggtctgatggggtccgatagggtcgaatgaaactgtgagtttgcgaggtaggagacgtaggtccgatgggggggggggtccgattggtcatatatagggtccgatgggtggttcgatgggtccgattgtgtccgatgtgggtccgattgtgtaaatgggggtaatttagggatatcataaaagttgtcatatcctacaaatattaattattatgtgtttagggaaaaaatttaaccaaatataagcataaaataatcaatttttgcatacaattttctaagaaatttatacatacatgcagtaagatttttatacattttttgatcgatcaagaagaaaaaaaaattcattaatcaccaactgaagaagtataaaaatttaattgatgttttgaatgagtaattttttttaaaaaaatgaatacatacaataaactaataaatatataaatagagtaagctaatacagcagggacacaaagttttgtatgaaactatcccaaaaaagttgacaaaagtagacattttagaaaagatacaacatggcttccaacctctgtttctattcaagataaaatatatcactccttccacataccggcaaattcatcagcctccaatggatactttattttgtcattttctcacttcctttcacttatggaaggattagattttgtataaaaggggaaagcaaaaaagtggaattccatttcttatttctcaattggttattggttttgtatagtagagaaacagttgacaaagtcagtcaacgtacacattttcttgcagtcctacttttcttttcttctgtccaccacagtttaaggatatggattcagtggtgtacaagacagcttctgaaggcaaaattggcgtctttaaggaaaagcgccaaatggggctatacatataaccatagtagagaaacattaacatggattacatatgaagtagacaacctacaacttaaaaattttccaatcctacttaatttcttttcttctccaccacaacagctccatattaattaagtttaatttgaggatatggatccagtgctgtacaaggcagcctctaatggccaaattgacccctttaaggaaaagtgcaatgaactcgatcttaccaaagtaatcacccgaagaaagaacacagttttgcatctcaatatcatttatggaaaaaccacagatgacgaaattagcttcgcaatagagatcttggatatgtgtccagcactgttgatgcaaggtgatgcaagagaggagactcccttacttatggcagcaaggtatggtcgtctctctatggttaagtttcttattgaaaaatgtgaaaacgaccaagtgatgaaatcagagatgatgaggatgaagaatatagaaaaggacactgcgttgcatgaggctgtgaggttcggacatcatgaggttgtaagtatattgaccagagaagaccctgatttctcgtattcagctaatgaagcgggtgagactccactttacttagccatccaaagaagctactgctggccgaaattggttgatgaaatattgggtaattgctcgtcattggacactggtgttcctaacggaagatctgtactgcatgctgcaattcaaacaggaaacgaaggtaattaatattatccacagcgatcgaaacacattattttggaaccttttattttgatgacaatattatctaactaatttcaacagttattaaattgaaatatgtaaaataaaatagtcttggaaatcctttacgttacggatttaatttgaaccttgactcacatcacatctgcatgtagtttagaaactaagatcgatgcaaactagaactcaattcacacaaaacagtcaaagtgcatattagacactaaaccgtttctttagttagttattttcctgttatgctgtcagtttattattttgtaactaaactgatgtaaagtgcctactgctataaataaaaccagctactcattcaaatgagttaagcttttcttgcatttctctgttttgttctgttatgagttttactctcttggttatacctgctactggtttttaccaactcatgcttgattagcttctacatggtatcagaagtcttc

SEQ ID NO: 224770 - DNA, 1393 bp, Cannabis indica
ctttctttgctatgcgtaatatcactatctgtgagattcttgcacccgactcttgtccaggaaatccttctaaggttttcttgtcgacaatcgtccggagggggcctctttccagcggttaggggacccccattcccttttttgaacttagggtttggtatggggcctgactgctggaatttttactctttttcagaaccaacatgtctacgtccggttccaaatcttccaaaaaggaaggaaaacgcctggccaccatggaggaagtgatggtgggtcccgtcacccaggaggggtatagacctcgcgctacgggatgggaagcggccgagctccactctactttaacttgccctcaccaattggagagcatcgtggtggtggctggcatcaaacccgcgacctccgggacgtaccaccggccgccccgtgatgaggagacgcccaatcacaattacggaggcttcggagcttggagccagactcatttgatggtcggggccatgcttccccttcaagattatttcattaattttcttgtatttgtcggcctcgcgccttaccaacttattccacaagcttaccgcatgcttttaggcttattcattttttactctgcccggggatggggctctcccagtccggcagagattttgtatttttatgaacttatttctgtccccaagaagggggacaaacttaaggacggtttttacggcttccgagcccaccctttgaatgagggcggcgtggtccctttcaatcagcaaaagcacgtcaaggagtactgccatcgtttcttcttctcctccgggttccgagctgtggaacacctggagcttcttacagagtgggttaggatccctccgtatgagcggaccgcgcctactcagctcttccttcagcgggccaagaccttcgcaacttatgataggcaggatctcgacgtcgggggttcggtcacgacagagaatttccggaaggctaaactgatcctggggcaccagtcggtggaggactccaacctttccaggtcatctgcccgaacgtaagggttccggccgcggagaagaccttccgggatgagattattgccaccacggaagagaagtaccgagagtacctctaccagaaggcccaggagagggcttacactaaggtccaggcggctgctgggaggccccttcgcgttgggagcctggttgagagaaggggccagatggctgccaggagaccccttcgcattgggagcccggtcgagaagagggctcccaagccaaggcctaccgtccaggtgccgaatacaggggctcctgatgccaggacgtccggctatggtaagtcccctttaacaatacattacgtctcttctgttcgtgaatatgctagcctt

SEQ ID NO: 224771 - DNA, 2882 bp, Cannabis indica
ttgcaccactacagatttgaaattgcactctcaattatatagagcgctctatatgttccacgatatagatacactatgaaattatccatcgttctaatcccaatagatgatttacatcgagtagggacaaatttaccgtttcacccctcaatgtattttatccttaaaacacttagcttcctataaacgatatttcaataaactaatataattactgaaataagagctcttcattttatctctattaagccaagctcgaaggaaatcatcattttacttctatgtccatgtagaagcaatagattccatatatatgattagcactcccactcaattgtactatcatgtttccaagatgtatgtgttcacccgtatgagtttcaacgaacaagttaaagaacataaataatactcttgagatcaaacctaaccataccaggattaagatcttttgatctaagatcaaccagtgatattgacttagaaagatacaacggtaagattataatgtctttaccgagatcaatatcggtcccaatccaatgtatactccatacatccgatactaccatactttgccaatgtcttgaaaagaacataacacttatccaaggtgtaagtaaactttatcgctgactatcacatccgcgtaaattcagttcactgatgaatatgggacataaacttttgaagcatataatcataattaccttccactgtgttgaccttactgtaattgtgaataactataaaccataaacatgaaaaactacatgtaaacataaataatttctaatcttttattgataacaaataagattatattgaaatgggttttatttagggcataaaatcccaacacatatataatgataaaaagttttaaaacaaaacttaagaaacctaaccctctccttctctgtctctttcgtgccataaaaccaccccaccaccatcatttttcttcaattttcaacccaaaaacttatgttctaagccctagtagcaactaggtggtaatccttgaagggggaaaagcttgaggtaagagtttggttttcttttatactgaaaagcttaagttctaaaagttgactttgtgttttggagctgttgtggggtctgtgtgcttacaactttgtttttgggatgatatgggattgattttgaggtttacttgatggttttgctatagctttgaagtagaaatcaagtttgagcttttaaaactcaaagcttgagctttaatggtactttttgtttaaaggcatgattttgagttctgttacataagaattgttgtatggatgttatatacgtgttttgtgaagtttggaatcaattggttaggttttggtgggattttgagaagttgaaacttgagttttttcgtccctacgatggttaaccattttaaagcggttaactgttttcggtcttttcagcaggatcgaaaattatattttggccataacttttcacttgagtgtccgttttagacattctatataacgtttcgaagcttccgatgagctctacaatatggtatagatgttagagccaaagtataatttttactttaggatttttataccatggaatttggtagaaaaccctagattattttatgcgaatattaagaagtattttgggatagacacttatcggcttaccattgttgcgacataggactgagatcatcgtacattttctccacttgggttggccgagatgcatgaatctggattaaaggtaagaaaaatattttgtacttatagtttgttatgtggagacatgattattatcataatgactcgattatgatctagatattggaacaatgattactattaaagtgaactaagatcatgacatcattggaagcgtggttaggtttcttacttgtcaattatctcattaggcaatggcagagttatatgttgtcaattgtctcattaggcaatgatagagttgtatgttgtcgattctctcattaagcaatgacagagttatatattgtcaattgtctcattaggcaatggcagagttatatgttgttgattgtctcattagcaatgacagatttatatgttgttaattatctcattcgacaatggcagatttatatgttgtcgattgtctccttaggcaatgacagagttatacgtcgtcaattgtctcattaggcaatggcagagttatatgtcgtcaattgtctcattaggcaatggcagagttatatgtcgtcgattgtctcattaggcaatggcagagttatatgtcatcgattgtctcattaggcaatggtagagtcatatattgtcgattgtctcattaggcaatggttgaattatatgttgtcgattgtctcattaggcaatgacagagatatatgttgccgattgtctcattaagtaatggcagagttatatgttaccgattgtctcattaagtaatggcagagttatatgttaccgattgtctcactatgcaatggctgagatatatgaatgtcgggtaagggaatcaaggttgccttattaggcaacaatagaaaatgcttattttatgaagtaacaaacatgtttgtattattaaaggaatattgacatgttatttaatatttatattgatgttgatttaaaatgagtatctgtattaatttggacttataaatgcgagtaatgtacgaatattaattatgagcactttataaaataataggtatgacttatattattaaatcagtaatttcatattactaaatatttttatatatactgacgtttatctatgactaatattagtggtaatttagatttaatcttacgagtatgtgcgattatctaatccttattgtctgagtataaatgataatatct

SEQ ID NO: 224772 - DNA, 7429 bp, Cannabis indica
ctacagaaaggaatcaacggctagagatctaaacggaaggagtcattatattaggatgttaatgaaacttacttgttagtaaatctagatcctggtaaaatatatccaacagtttaagctttgatatagtgttgcatgtattctatcacctttctattggtgcacattaacattttcactattctcataaattgtgatttattgaattagcaattacgattttttttccagcaaccgaaaaatagaaacaaagttgcttgttgtgatttgttgaatattgaatcacacaaaaagttgaattggcgtcggtcaacctgatggtcaacagcacagaatgacacaaaaaatagaggcagagttgttgcgtcggtgttcaacttacgcaaactataaagaatttgcgtcagctatgtattcgacgctagaatgtagactgacgggaaaaacaaattctttttaaaaaatatatcttttatgcgccggttaccctaaaaatgcttgagttggttggtaaataacgcaaacaatttaagcatattttaaaacttgatgctaactaattaattgtacacaaattcccttctaactccaacatatcgtttcagaaaacctaatgtaaaaaaccccgttgctctcttctctctctctccgccctgctctctcttcgcctcatgttaggttatttttagtactattttaaggttaatttttagtgtatttttaatttagttatactcttctttggagcaattttatgctttttatcttttatttttacaaatttaaaatagaagaagattaaaaaatatcaaaggaataagatagaaaaaagataaaaagatttcacgaaaaagatgaactataaaatagaaaaaattgtgccaaaaaaaaaaaaaaataataaagctgaaattcaagcctaaattagactatgacctgatcaaatttcggataaagtctacaatggggacctttctagtgactggttgcctcatgcgggtcatcagtattcccaactttggtgctagaactagtgtaatgaagacctaacttggttcgggtgaataccatggttactgaacgtaatcctcagttggtatcactgctttcttcaattctcaatgaaagcaccaaaatatttaccaagattttcaaaaaaactaattaaataattacaactgaaaaatgaaaaagtaagtaagacacaaacaatattttttacgtgattgggacattaactagtcttagtccacgagtcaatgttattcaatagttctttagcttgaaaagcctttacgaatacaatgaatgcaagttcttaagttttcttaagcaagtattgcaagagaattcaacccttaacctataggattcactagctatttatagtaatttgagaattacatttagttttccttttccctctatttgggagcttacagtgaattgcacacttgggctgcctcgtgaagtccagccaatgacggagaggatctactgactaggtagatcggatttggttaacaccgtgaactctgattgtgggcaatcaactgtgaattaattgcttgatatctatttgaagaagttttcctatttgtcttgatacaatcaactggactaattttccaggaacacgctgtcttacccttctagactcacagtactggacatgtttctagacacagtctatcaatagcggaaggttatacaattacggggctgaagtatgctcttggaaggaccaattcaaatgggcttggcccactttatcttctttagtggacccactgatgggctctaggcactcacctgaattccacgtgtccactgtcgaaaatgcggataacaataatgaacatacatttgcagaaacatcacaactatactagtatacaaataaaatattacaactatactctaagaaaactctcataaaaatataaacaaaaacaatatatcataaaaaacttaagaaacaaaaactgccatatgtatatttttcaaaaaaatctcatatatttagtgtaatttccacttttgaaaatgcccaaatgatacaggcccatcagtgaatagggggcgttacactctctttggaatgggctttgtgatctaatgttttggaagctggaaggaagtagatgtttttgttgggattaaatcggagggaaaatatacagagctgatctcaccgatacattaacgccatggattcttgctcaagaaagcttcccaatacaaccccatgaaagcatagacattttccttggtaccatgcccatttctcgttttcttttcctttcttccaaacgccactcaggagagtctctcaatttattccgaaggtactatacaatacccttgaaccgttttcttgtttcttagtcagttgaccttgtttttacttaataaaaatatttttatacagggtgggtgagaggctgagagctcctatagctcaatctcagatacccattggaattgagtttctttccatttgagtgcaaatatatacactaaatactacctaggctgtatataagagtagtagtactagtttttttggtgtttcccatttaaagtctgatgatgaatttggtttgtttttggtgctcatttctttcttacacagtattattacattaagtaagaacagaaaatatggaactctgagcaagtatctgaacttgttcattttgagtccctgggtcagatgctgtaacactcttgttctttagaacaatgactttcagcagacattcaactattatggtttccttatatgtttagtccattgtcgatacaaagagatatcttcagcaacatactgaagaaagttaccttcacagtttgatatctaaatacattactgtactgtttgagccccttgtaggtttggtccttgtaagaggattcagtcccgtaactatgtaaattcatcaaatcatgctaatgggaagcctggtggtgatcgtgtaatgaacgtagattcacaagcttctaggacttggggtacctatgtcattgtatgctgccttcttctttaatcctatgttattcttgaatgttacaattcttaagagcttttgtgtgtgaatgtatcatcatgtgatgaaaggtgggcttctaattcttaagtatgatagtttttgtttggacattttctgcagcctgctgctctattaggatttgtgggcctggcgggtttagctcactataatgatgaaagaagagcaatttccgaaagtactttcattttctaccttcataatttgtaagttttctgttttctcttgttaaaaagaaaaagaatctgttaactttaatggtttgtatacttaaccgtacttaggggctactatttttgtttgaattcactcttttcatttcttctatttatttcctcgacattaggttttaaatttggttaattcttgatgtgtttataaggaagggccatgagaattgacatgctctatgctatgtgtacagaagcaattaatcattgattttgttggggatgtgcttgtttagttattaatttatcttaagttcttatctgttattagagattaatgatttctttaacttaacatccgttctgaacaatagtgattgcatagttgcttattacgtaatctaatcaaatgaagttgtattgataatcttggattgagagaagacagatgtgtgaagtcttacaaaacttgataactgacattctactgctctggttgttgctgctgtaaattttctgaattatgctcctcaaatttctttcccatgcgatggaaataagctatgaattattattattattattattttaagaaaaaagcagcttgacgagtatcagtttactgatgatattttaatgaaattacacctcttttctcatgataaggttaatttgtatgccaccacattttacatggtgagtgagaaattgtgagattgtttgatcatgggtgaatagggtaaagtgggggtgatctctaaactgaagtgttatggggatgcttagaaaggaaaggaaagataatcccaagattctctataagattaaagtaaatggatccgatcgtcttgggttcaattgagaagtctttctcatggctggagtggaattcaagtaccacgcagtattttggattggtttcagttttcttttataattctgaaattaattatccctgctaatatatgaagtaggaggttgatagattgttgatcaataggttggactgttgcacaatattgaagtcttgagttctgataagttatacttggtgtcgttatacgctaaaaagctatagtactgtttcttaattaattgttgtagggattgattcagtttctattatctctgttcaatatagtctaagcttttcagtttctattagcatacaagtagttatcctatgcagttgaaagtgggttttggttctgttgtatgatttaaaatctttaactgccaagtttttaagatggctaattatgatttttgcctctaattcttcctgaactattgagattgtttgatttaaagacttttgtccaatttcattcaattttactaattcgatgattgtccatgtacttaatcataatccttagactttgatatctaccaaatcgtgcccctttaaactttgacatgtgctaaatcatattccttgaactttcatttatgttagaatttctatactaaaattaaataaaaatccttaaatccaacaatctcaatagttgaggaagaattattaacggtcttcaaagttaaggggatatgatttggtacatgtcaaaatttggggtcaaaaatcttaattagccttttaagaatcactatggccagtagtgccatttgtactatacaaaaaatgttgttccgacaggccacacccacacatatatttgttgatttgtacgcatcatgttctattgcatattgtttttgtagagttttctgtcttagtattgtccaaacacaatgttgtctccccaatttatgcagtgtccttcatctatcgcaatatagattttacatattgacccatagcagaagagattgtaaaagcgaaaaaagaaaaagaaaagaaatcatagatcatcaccatatttcgagtcttcacgtaattttctctttttattgtcatatatgctgctttatagtttgcagtgttttaatctgatcattgatcaaattcatggtgttttaataattgttatcaaaccccttggtaggtatcttctttatcacaaggtcggggagcctggttgactcctcagtttgttgccagggcttacctgatcatccaacttgcaagcaatctgagattatacatacatattctttttccttaaaaaaagagaaggtatgatagagatgacttttggagagtgctgggcttggttaaacatgaatgattttgtaatgatatgtcgtatatacagcattaggctcagtgaacttgctctagtgtgaagtaatttgtttgtccaaaattataaacaaacatcgagttcctgatgaagctttctcttagattgtccaaaagtatacagttataacatgtttttggtcattgttggatcaggccagggtaccagctctagtggaactactgccaaggggcctataattggtggccctttcagtttaatagacacacagaatcagacggtcactgaaaggaactttctgggaaagtgggttctcctttactttgggtatacattttctcctgatgttggccctgagcaaatccagattatagccaaggccatagataaacttggtttgttgtcacctcttttcttcttttatttcatctgctctttatttgagttaactgcttagtgcttacattgattttatttttattttgaggaaagagtctaaacataatgtgaaggttctaccggtgtttgttacgattgatccacaacgtgatacaccttcacaactccaagcttacattaaaggttaggctttcctatccacatatagcaagcaccaattcatttcttttacagaaatagcatgctgacactttaatttgccagaatttgattcgaggatcataggattaaccgggcctgtttcagctgttagacaattggcgcaagaataccgtgttttctttaggaagattgaggaggataaggatgattatcttgttgaatgttcgcacaacatgtatgcgttctcaagaaaagctaaacgttttctttatctttctattatgctgattgagctttcttgttgtgtatatgaaaaacaggtacttgttgaacccaaacatggaagttgctggagtgtttggtgtggagtacgatgcagatgatttatctgatgcaattttaaaggaactgaagagaacccaaaattaacaaactattcccttacattgcaatattcattgccaactttatttttcaacttttttttactcttttctttcatgattgtatttcttctatacatgtcactgtggttggttgatagaaacttttgctcccaagtcaccaccaccaccaagccccaaacaacttttttcagtacctacaaataaaccaagagaaaacaagagagggagatactattaaagattttataaagataatgatgtattgaggaaatttccgttctccttgactttaatgttttaatgttagaggatttatctttagcatttctggataaggatgagagaagagacgacagagatgttatgttctttggcaaacacggagaaacccattactttgataagagaagagacgacaacgatgttttctttggcaacataaagagacccagtgctttgatattattgcgatttcactttaatgaaaagttaattaggacaataagagcatatgagatggagtactaaaacagtagtctagtgctagattttagcatttttttagaaaattagttgtctaatgatttgttgaattttggactaaataaatgaaactttcataattaaagtttttcatagatcattatgggaatctatttatacacatttttcaattacaatattaccattaattatttttaagtatttaattaattaataattattaataatatcttacattttatactaatttgcatcttcaaatgtaattgtacattagaaatttaaaacacaataacaaatattgtaactaatataaaatttgtttatttttttttaccaattttgcttaacatttataccttgcattgacaatggtaagtgacactattgactgttccccaaagtataaattaagagtcgtatttgcatcttaaaataatcacatatacattccaaacatgggtgaaactagtggtattcattggaccatattcaatattttttgatttatccaaattcaatcaaattatatattaaatgttagattt

SEQ ID NO: 224773 - DNA, 2484 bp, Cannabis indica
tttttttaaaaaagaaatgagattatcattcaaagtcatgtgccaaaatatgtgtacaagatttataataaaggaagatctcgccaccaaatcatagcgtgatttgaaaataaaactagctctgtcgcatttacaattaccactaaattatccaatgtttatttttttcattgtaaataaatgtttctttagtttaaattaatttgtagtcatagattgattagatcctttaataattgatagttggcttttaaaaatgaattattgattgattagattgattaattaaaaaattacatactagtgcatacctatacctcttcaacttcaaccttatcttatgcttataattagttggtatgctgctgtcattccacaactagttccattagtaatttagtacttagaattgttatgttttcaaaggagaattaataatctcttcttttcttttcccatttttttcccttgtcctataaattagcctactttttattgattctactagttctagtaggtatttaattagctttttcaattaataagtcatagtcattcatttaatatttattaatgtgtatacaaatgatatatatatatatatatattatatttaactaagaataaataaaaaaattatctttgattattgtataatcttgctattttattttctttttaatattattagaaaattattgtacttcaataaaaaatttaaaattaaaaacaattccatgacaaaaaaatacaacatgaaattaaataatgttacaactctataacatagatatacttgaaatagataattgtggagatgaagagtgttggaatgatttttgcaccccatttcccgaaagcacgtaacgatcttcatctatcttatttttcatgttaggtggcatttcgccactcactgggagacatgtcgcttgttgtttttcaaaaaatttcaaaatttaagtttcttcgggtggtacctgactttttttttttcttttttaataataggaggaagaattcgaatttagaatttacttttttaaaagaaaagtgtagaactactagactatacctataatcacgaatcatggctgactttgaccgccaaaatataaaaaaagatagtcttttttcagtctttaataaattgaaacatggaaccttttggtttgttagtctattacttagccggccttaaacaaaagccgtggctcgtttgctaaattttgagtcgatcaatataatataagtaggcactttcttttgaagttgaaaaaaatcaaaacactaaacaaatcatccccaaagtcatttctttcaattttatttgctaatttgatttacatatacattgttatatcaactactaaagtaaatatttttaatcaactactcccatataaataatataaaagttaaaataagactttgaaacaattaaaaaattacaaaaattaaacaattcattttgtttagttcactatcacatgcaacttgatcgagtaataacaaaactttaacacaaaatttcatacaattaatgtgtacaccaaaaaaaaaaaaataaaaaagaagtaatagtaaatttggtaatatcatatcaatatgatatgcatgtaagtatgcaagacaatgatatttattagttggggtgtcaattatggtaagtaaagttaattttaccaaatcaatgaccacaaaggactgagacaactcacttaattgaacaataataacaataacattattgtacgtatttgccaagtgtcaactacatgctatcacattcacatattgacatgacaagtggagtcagcccttttctacacgttctaactatgccaaaaatggtcaattgtattggcctagtcatggtcaatcattaattaaaagaaaaaaaccatcaactaattaaacatatttggaaaattaatagatgttttcccacaaacaaaaattcgaaaatgaaccctttacgttggttggttttaattataccaatatatgtttattggtttcactttataaatttatgataacagctgtggttccaaattccattcaaagcaaacgaaatggtatataatcttttacttctgattttatataaaattgaattattgagaaatttacatacattattattttttgataaattatttttctatatatttatgtttaattttttaatatatttttacggtactcataaaaataataaaaaaaaaccacgtaaaaataataaaaaataacaaaataacaatattataatataaaaaaacattaaaaacgtattttatgtaaataaaatcttaaaaattgtaaaaaatatttaaaatttcgtacaactatatttttataatgtttttgtatttttttttaaatactcccttatttatattggtagaaaaaattcactggtatggaccctagatgagagattgaaaattagtctttttttgtaatagaatcatatttcat

SEQ ID NO: 224774 - DNA, 2284 bp, Cannabis indica
gaaaaagacacgatagtatgtgccgatttacactgttataccttgaaactcaagaaatattttctcgcaaatgagcacagggttgcgatttcgcaagcctgagccaatgagacatgcgagacacaaaagggattcattatagttctatcaatttcataaagacatagggcatacaccaaaagaatgcgttagttgaaagttgagatagagagccttatctcgcgtggttattttcaatagtatgtaagacgacaaggttatggacaaaactagccaaaatctgcctaataacctgagcaaccaaagattacaatctcctcttgtagaaggagaggacatattggtaatctcgggagggccacatctcgctggagaaagcagtaatgcccagaagagatatgttaaagaaatcaaaatgagcaatcagtttttgctccgaaatcatctacgaaattcaagactgaagaacctccaattgtattttcggagaaagacacaaagcaagtgaggtatccgcacgttgatcctctcgtgattgctattcagctcaccaacaaaggagtaaaaagggtgttggtggataacgaaagctcagtaaatattctttacaaggatacactaaggaaaattcccgccaattaaaaatacaaaaaaataaaaactttagtattcatttcaccaaagaaaatgcatacaaaaacatgttagagaaagggagagatttacttggaaagaaatgtggttgtgcttggggttgatcccagtaatcttgggcatgttgtcaggatcgtcagattggagtagatgtatcccaatgccatagttgaatagcctaataaatcacaaccagaaatgtgtaaatattacaaaaagccatgcatgattgtaataaggaaacaatagaaaacatttcctctgtttttctttttgacctttttttgatatggaattttgaattcttaccatgcaccatcaaagttaaaggaatcgggtcttctaattgggaaaaacccaagaacagacttgtaaaaatgaagggatttcttcactgatctacaaactattgaaatgtgattcaaggatttgagttgcaaaggatttcctctgctttccaccatatctctttcttggtgtctaaacaaattaaggcttaaaaagtcttctgttcagatagtaaaataagagagaccaaaagggtttgaagagcaataaatggttgtttggatgaattaatgaaaactcaaagagtgaaaggatacaaaaagattgatgagattagaattctacttgggaaaaggtattgatttgagtgtttatatagagacgagagaagtgttgacagataatctgcagtgacatttctgaattttcaagttgtttttggttttggattgtgattaattctttattacacgtaagttccacgtttgctgactcataactagattactataactatagtctatatggcggacacgttaattttcctcttccttcataattttcttttggttatcttttcctccataatttttatgagaaatggtaagccacattttataatactaaaaattagtaatattttaatattaaaactttgcatattttaaatttaataaataatataaaaacccctaattaattatagatgtgtatcttaaaacaaatttactataccctatttagaattataaaaatactaataaatttcctttattaggaaacatgaaatgtaatcagaatgcataattaattgattaaagtaccttttatagttaaattatagtaaatgttttttttttcagagaaattacaatatatgttagtcatttagacatatttttttaaggattgtaagatatattttaaaagataaagtttttattgcatatttaatttttaaaattaatataaaaataaataaaaattattaccctcaatgacattctttaacaaaatagtgggaaaagtatttcttttcttttattaacaaagttgtaatatcccgaaaaatatattgatattttaattggacatattttattaaatatgtgattaagtgggtattagagtaggattataatcctacttaaactaattacgagttgattaggaaaatatgagtaaatgaataataaagcgtaattgattaattacggagattgtattgaaatatgtgggtatcgtagataccataattcgaataaaatattttcgggcctggcaattgtggaactcgacagaatggtcagaaatgtcacgattgttgaaattgtgttatatt

SEQ ID NO: 224775 - DNA, 1503 bp, Cannabis indica
tttgatcacagttctatgtctcttattatggcacacaatcccttgaactcatttgagcagtacttaagaccattgtcagttcttagtaccttgattttgttcccagtctagttttctagtagccttctaatagcctcttccatgtgtagaaggttcctagagcctcatctttagttttcaacaaataaacccacactttcctgctgtaataatcaattatactcataaagtagtgtgctccacctttggttgtaatcctagatggcccccaaaggtcagaatggacataagctaacctctttatggtggtgtgttctgccttgttaaacttcaatctacaagccttccccaaaacacattcatcacaaaattcaattctttctgttagcttctctttgaacagtccgtgcctgttcatttcctcaagtcctctctgacttacatgccccaatctgagatgccatagccttgcttgattgtgtttaattgagtccataacaggtgttgcacaacctattattgtctttccatccaggaaatacaatcaattactcaactttcctctcaacacaatttctatgccttgtgtattacacctacctcaactttgacaacataccccaattaatcaaacatatcaacagcgagaagatttcttttgagatctggaacataccttacctgctgcaaggtcaacatgatttcatagtgattccttaacaagatttttctcacacctttgatctcacaagctttgttgttcccaagaagaaatgtgcccccatgactctctaaaagagtcataaacagtcctttgtttggtgtcttatgaaatgaacaccctgaatctagaatctaatctccacctgaatctgatctagacatcacaagtgcatcagatgacaatgtaagtgcatcagacaacccatagccatcagctacatcatcaactccatgcttcttagacttgtgatgattttccctcttcagtttagttttctaagccaaacactcatctctaaagtggcactccttcttgcaataataacattgctttcctacagctccattagagcttggctctcctgtggagtttctagaattagatcttgaatagttacttttgtagccatttgagttctgattttccttgaattctcttctggggaattttcccttaacaatgagtaatccttccccattggtctcatctttctcatctcccttcttctaaatttctttagaattcaatgaagccttaacctctatcatagtcagagcatctttgccatacaagatcgtatcaacaaagtgcacataaatcttaggaagtgaactcaacagggttatagccaggtcttcattattaattttcaccccaagattatttagattaagaatgattctgttataatcatctagatgttttctcaattcttttgactcatccattcgaagtgtatacaactttttcttgagatacaacttgtttgcaagagattt

SEQ ID NO: 224776 - DNA, 2487 bp, Cannabis indica
tctgaattacattgaaatagagttttatttagggcataaaacccaacacaggctggttagaatacgaatgtgtgtggcattgatgatggtgtttgattagatcttttcgtcaaatctttttgtacttattgtgagtatatttagcagttgtgttttttctatgattgcttcatttttagtttttgttaaaggttattacaagtttatgtggagatttttaagagtatctttcattttgattaaaactaagtataagaggttaatttttggctaattagtaatttttccctccgaactttgacatgtaccaaatcatgccccctgaacttttttggccgttaaaaatttcccctaaactattgagattgttagatttaaggacttttgtttaattttagtataaaaattctaacatgaatgaaagttcaaggggcatgatttagtacatatcaaagtttgagggacatgatttggtagatatcaaagtctggagagtatgatttagcacataaacagtcactgaaacagtaaaattgaatgaaattagacaaaagtccttaaatttaacaatctcaatagtttaaggagaatttttacggccaaaaaaattcagggagcacgatttggtacatgtcaaagttcaggggaaaaaattactaattagccttaattttttaaccatttttaataataaataatatttgttagttttttagaaactcaagattaaaaggtatttgcctaaactaaagtagctaaaaatggcaatatccatttttcattacatacacaaacaaacaatatctttttattctcatacttttttattaaaaaaattaaaacatatcgttagtgctttcccacattttttttttcaaaataaaagctcactttttaaaatatatttttttctcataaaattaacaaataaacataaaaaataaaagaaatacagttgtaccctaaacttaattactgtcctctttttctaattaccgcattcaatcttcaaatcaaaccttcaatttttattattattactatcttttttccctaaagaagaaagtatccaaacttctacttaccacttataataatctatcgtaatcaattggaaaataatatcaattgtgttatttattatttattatcatacattaatgtgatgaataattataatcctggtttgagggtctcttaaaacagtcaaaaacccctctttaagcaattacaaagcaaacttacacctctctctctctctctctcaactaccttaaccaaccgctttacacaaaaagccctacccttacccaattctccaaataccctttctctctctaaaaaagaaagaaaaggctgaagctgaggctcccaatttcttcaacccgcttttaaagctcttccctccattaccaaagccattgctttaagcgaatattaaacccaaaaataataccaaaaaccctttttttttttgttttggtttccttatcttgtcttctggaaaattctaaaattaattaaaaaagagatatttttctttgggttctgtttatttctgggtttgaatctttgggcaaatccgaatttggatccgaacccgcaaatgtggcggccgtggggcaaatcgccgactcgggttcatgacacgtcatcaccttcttccatattctcctgttcttcttttaaagacatcgagaatctctgttcttcggacgagtcgactcagtcacaccaactcgttcccgcacccaagagaacctacgtagttttccaccgagtccgagccgccaactcacttctccgcgcctggtcgactgctcgcccgccagctctacccgagcccgaaaccgatgccgcgaaacgacacgatcaatctccgccggtgatctccatccctggggcggagaagagaatagttgtgtacttcacgagcctgagggtagtacggtcgacgttcgaggattgcagggccgtccgatccatccttagagggtttcgtgtatcgatcgacgaacgagacttgtcgatggactcgagtttcttgtctgagctgcagcaaatccttggtcaaagaaagttgactctcccgagggttttcattggcgggaggtacgtgggtggggccgacgaggtgagacagcttcacgagatgggcgagctcaagaagttcgtcgaagggttgcccgcagtggaaccgggcgtgtgtgacacgtgcggcggcatctgtttcgttctgtgtgacgattgcaatggcagccataagttgtactctgagaaaggaaggactttaagaagttagtacctcctgcaatggagaacggtctcataaggtgcccttcttgtttttctccctctgattattgaaacaaaaaaaaaaagaaaaaaagttaatagaaaaaactactttctttctctttaattttgggtttttttattgggtcgatcatttttgtagattattttttaactttttttttatcttta

SEQ ID NO: 224777 - DNA, 2198 bp, Cannabis indica
ccttaaaaaaaatggggggccttgtgcaatggcccaagctgcccaatgcttgggccggccctggacactatagatgccttttaatattttttgatatattaatcataggcgaattataatttttacctcttgaactttgacatataccaaatcatgcctttgaacttttaagttcgttaaaaatgccatctgaactattgagattgttggatttaacttttaaggacttttgtctaattttattcaattttactatttcagtgattgtttttgtactaaaccatgctcctcagactttgatatctatcaaatcatgcttctcgaactttgacatgtactaaattatgtcgttagactttttttactaaaattaaaaaaagttcttaaatccaacaatctcaatagttcaagagtatttttaccgaccttaaaagttcagaggcatgatttagtacgtatcaaagtttagagacaacaattttaattaactttaataatataaattgatgatgtggcagattttaagcaatgagatgtacaagagtgtgaagcatagagtagtggtgaataagaaaagcagaagaatatcaattgtgtcggtacatggggcatctatggatacaaagattgaaccaatagaagaattgttaaaagcacatgcccaaaaaccagcatatccacccatttcaattaaggagtaccttaaatttcaacaaagctctcaagccttcctcaaaccaactcttgacttaataagactcaaataataatcataatcataatcataatcataataatattgttattcatgcccccttaacctcgtgtggttgaataaatactatatttggtgtaatgaaattctatatgaaaaagttatttattatttttgcttactagagttatgatttatgtattattgtgtttcttgaacttttcaacccgttaaaaataatcattgaactattcacaatgttaaatttaattacaacaacgaaagtttatttaagttctaataacgtttttactcgtgaactaaaaatcaaatctttttacaattataaaataaccctatttataagcaatcatgtatgttagtctagattaatgggtccaattgcaaattgagcacaattaataactaatttaatagaaaaattacaatagctaaaaatactctctcattaccaagtggcttaatggagcgcctaagataatgttgtcttgtcttatctgatgtatgatggtgacaggtttaagtaaaattatcaatagacacataaaaaaagtgattatgagagtagtgaatagactactttttatgtttatcttcacataagatcaagatctaagtaagatctatttccctcttgtccttcaacttgttcttcacattggtggtttagattccattttggtagaacataattaataaccaaacatactcatctcatacttctctttatctctatctttttactctttctacatatatttatgaaaatgaatcatcaatatatgaactatatatgaagcattttaagatggatctagagcttgagttttggaccctttctaatgtcattatcttttttggtcccaatcaaattggttgttataaagattttctacaaactatgtggtaagcactagacaaaattggatatgctttggctcttcatcaactcttctagaggacctatcctcaccttttattattatggctaagtagtttaattttatgtcttttacacaaaactagatatttttttataacatccatgatttaatatcttttgtgttttataatgaagaaatggcttaatattccatctgatgataatgtcatgcatcaaatattatttgaaaaactttgtttaattctttggtctttatttttccttcaatactacaatattggctttgcttaaaaatttaacatttttcttcaataatttaaagtgaatattttttcttcaatatttttttaaagtccttcattatattagacattaaaaatttaacatttatgtcccacaatgcaagacatttgactattgaaaatatttttactagttccctatggtgagaggctaaagagagtatctatttttaacttcatcaaatcacttatattacatttttattaattttttttacctaaaattttattatttttttaaatacattattaaaac

SEQ ID NO: 224778 - DNA, 2125 bp, Cannabis indica
agctgcaaatcactatgacaaatgagatttttgactttcaacgcctctgctattttcaagccggggatcaaggcttcatattcaacctcgttattggatgcgtcaaattggaacctcagagcatagtggaacttaaagccttctggcgttattaatattagccctgcacccgaaccttgtttgttggatgcaccctccacgtataacttccaagatcctgcgtcttactgatcaggtggaatttcttctggagttattccttctatcaagaagtcagctaaagcttgtcccttgatggatgtttgaggatggtatgttatgtcgaactgccctagttcaattgaccattttatcaatcttccagaagtatctagttttgataaaacttgtctcaagggctgatcggttagcacctttatggggtgagcctggaagtatggtcgtagtttacgagatgcatggactaggcacaacgcgagtttgtctagagggggatatctggattctgcccctagtaaccttttacttacatagtaaataggttggtggtgcttgccctcttctcgcactatagctgcactaaacgcatcttccgagatggctaaatagagaaacaacgtctctacagttattggtttcgccaaaactggaggcgttactagatgcctttttatcttctgaaaggcctcctcgcactcttttgtccacttgaactttttgttgcctcgcaatatgttgaagaacagcacacacttatcaattaacttcgaaatgagtctgttaagtgcagccattctccctgtcaaggcttgtacttccttaggctttgtcgatgatggcatgtctattaatgccttgctcttttcaggatttgcctcaatacccctcgcgttaactatgaatcccaaaaaatttcttgaggaaactccaaaggaacattttttcgggtttagtttcatgttatacttctttaatatcttaaagcattctgtgaggtctgaagtatgatacttactttttattgattttacccacatatcatcgatgtaaacttccatattccgccctgttttgtttgtgaacatttcgtttaccaatagttgatacgttgccccagcgttctttagtccgaatggcatgactttataacaatagagtcccatgttagttatgaagcttatatgttcttgatttgggacatatatttttatctggttatatccagaatatgcgtccataaatgacataagctcgtgcccagcagttgcatccactaactggtcgatcttgggaagtggaaaatagtcttttgggcacgctttattcagatcggagaagtcaagataagttctccaagttctgttggactttgggacgagaataggattggctatccacgagggattaaatacctcgcgtataaagtcattgggtaacaacttgtcaacttcctgttttagtgccccttgcctctcggaatccaagggcctcctttcctgtctcttcgctgggtagtttggaccaatatttaaatgatggcagataatattagggtcgatccctatcatatctccatggctccaggaaaattgatcttgattcgccttcacaaagcttataagctgctatttgacctgctcgtccaggttcttcccaatgtatacacactttgcgggatttcctgggtcaagaatgacctcttccaattcctcaattagttttagcaggtttttctcatcttgaactcgggggtcaagatcttcatctttctgttcaatttcttctactaagatcgccatcaactgatgactggcttttctatgctgcaactctatgcgatagcaatcgcgagccagcatttggtcgccacgcaccactcccacgccatctggtatttggaatttcaaggataggtgcttgatcgaactgactgcccctaatccgatcaatgctggacgacccaacaatatgttgtaagccaatggtaggtcgacaactaagaggtctttcatatcagcagcagataaaggtgcctcacctaaggttaattcgagctcgattatgccaaggccagtgataccgtctccggtgaatctgcaaaggtttaccatacagggcctaaatt

SEQ ID NO: 224779 - DNA, 2022 bp, Cannabis indica
tttttcccctcaatggtagttgggatacacattcttaccatgtgtacttgctgggcttattaatgcaccacaatacttagaaatgaactctgcgtcattagagaagggctgtattttggcaagtgatgttgatagtgtcatccttccaatagatgcttgtggaggagatggtgctctagcttttgctagaaacaaaagaacaaaggtaagtatcaaaaaatattttgtaatgttttttgcttcctaatggattatttttgttttatctagcatagcaatttacctgatatcatttacaaattattagagtttttgttgcagccacttataattgctgtggaggagaatgtaacagttcttgatgatacaccggataatcttgggattgaagcggtatgcaattctgcacattctatttatttattcaagcaacctatagggaaagtccatcataatagtttttcacttgttgtacaaacattacatttatttaaccttttacttgttgaaacactcttatctcgaaacacaatttgcttaaaattgtatattgtagatttaatgagacactaaaaataaattacctaataatgtaacgtggttcaaggaaaacttgcttatgtcccaagagattatcagcaagtttttcactaagaaacaatatcaaaatacacttctagtaaacctagaattattttctctgattttctttccaaaacccatgtatccaagctctccagagcttattacactagattcgtttttttgaaggtgtgtacttggtaattaggattgataggtgttattcgtattcctggacaactgatacgtggcagtcacggaaggacaccaccgagtattactcactgttgacgtgtacccttcgcttgttaggttcgcagaaggagtgttcttagagaaattggggatcctctatgttaataaggacgtggaaggctgtaaagtcccttcacaaaggaactgcaaaaaaaaatttgattttcttaatagcaagctggctatggaggatattttcaaaccaacttaagggggagtgtaggaaaattagtatatatatatatattaggaataaatcttaagttgtaatatagtaggaaagggatcattttactctttattcttgggtttgtttccttttttttagactcttatctttatatacacgatcagtatacagaaatcataattagaaaatacacctttcccatttttgactgctgatgtggcagcataggtcaaagagagaaaagaagcgagtcaacagtagtggattgggtataaatagtggttcgagcacaccatactaatcctagggtctaacggtggttcgcttgcatggaatgccccgttctatcgtttctaaccgtgacaaggtctccttgagcaaattttggtctgaacttttccgtttgcagctgaatcatagctcttcgtaccatccccaaagtaatgcccggacggagatggttaataggagcattgatgtaacgccctgatacttaggcgtgctacaatgattttctaattgatgtgcctcctttgctaatcaaagggtttttctcgaaaattgtgttaggttaaaacttttaatttaatttaaaaaacttgataaacatatattaatttatctatataaactaggattctgtatttaaacttttacaagtaatagcaaaatatttttacaacttgtcgcacaacgactacaaaatatagcccaagatgtcctgagatcgaacacttcaggtcacgccgtcttgacatgtacaatcatcgccctagctcggaactcactccaattcagcttccacctttcctttacctacacatgaaagtagaatctgtgagccaaaaacctcagtaagaaaagcatacaacaattattatattgacgacttgcatctaggcgcccatacacctatctgtaatgcttatcagatgattaagaacgttcttaacagttggtactattgaccatgatatcacccactaccagcacta

SEQ ID NO: 224780 - DNA, 1171 bp, Cannabis indica
tgtcaaattggctcaattccatagcccgtttaaggagtcttcctgacgcttctggcttctgtaagacttgccaaagtggatggtttgtaagtaccttaatgggatggccctagaagtagggtctcaacttccttgaatccattaggaggcaaagaactaacttctcaatcaaaggacaccgtatctcagcccctatcatgcgcttactaacgtatagtacaccggatgctggaccttgtcctcttcccaagacgagggctgcgctgacagcgttctcagagacagctaagtatactaacaagtcttctccgtgaactggctttgaccttttagttttttgaatgcctcctcgcattcttcaatcaattcaaatttttgacacttctttaaaatgttgaaaaaagagatacacttatcggttgatcgggaaatgaatcgacttaaggcggcaacctttccagttaagctttgcacatctttgtgcttcttgggggaaggcatgtttagtaaagcctgaattttgtctgggtttgcctctattcctctttggctgacaataaatcccaaaaaatttcttgacttgactccaaaagtacacttctttgggttaagtttcattccgtacctccggaccacctcgaagcattctgtgaggtcgtccgcatggtccatgcatgtcttggatttgactagcatgtcgtccacgtaaacctctatatttcttcccaggaggcccttaaacatcgggttcaccattctctgataagttgcaccaacgttttttaatccaaagggcataacaaagtagcagtatacccccttgtcggtcttgaagttagtgcactcttgatctgcaacatgcatcttaatttggctgtatctggagtaggcatctatgaaagacagtagcttgaacccttaggtggcgtctaccatctggtcaatccgaggtaaagggaagcgatctttcgggcaggccttattcagatcggtgaaatcgatgcacacccgccatgtcccattttgttttggcactagtaccggattagctagccattccaggtagtacacgtcccagatcaggtcgttggtcaacagcttgtctacctctttttctagggcatctacttttatcgaattaaggggacgtcgcttctactgtaatggcggc

SEQ ID NO: 224781 - DNA, 1777 bp, Cannabis indica
  modified_base (453)..(453): a, c, t, g, unknown or other
taaatttgatgctgaaggtcatttgaacaaagataacaaaaggtcagggaaagcaagtagtaggaagcataggaagcgacatcacaattatgacgacggtgcagatgaaaaacgagaacgatcagttaaagaaatcacatggttctagtagcagccacaagaaatcaagacgggtatgttgacgatgtgtagaattaatccttgttattcctttgtctcatgtgtgatccatacaaacttggaatgcttataagctctgtcttgtcctcttgtagcatacatctgcttctgaatccgatcaagaaagacaggagtagaagacataggagagatcatcggcatagttctcgtagaagtggtgatcttgaagatggagaatttggtgatggccggggagggattcataattgttttctattctggtaattgcgcttcttttgtaccttttttttnttttttttttttttttttaaaaatgctggtaagatatttgttgtttatttttacaaggatactagccaactagtgtgccttttaacaaatgtcttaccataatcctttgaatgaatatatttgctagacattatttagttggaaagataattttcatgaaatgcgttatgggttcaagatgggagttttattagttatttttggaaggttataatctcatgtatacaagcacataaatttagtatctgatcattcaattcgttagtgaactctttttccttgttatgtgggtttgagttgtggatagggtatgctagtagctactgcctaaaatctcaaagtataaatatagtttcttcatttagttagaaaatgataagcaaaaattgaacttagtgcaatgttttcatcgtactcaatttatgtaattctattataaattttctcttgtatctatgttatgctctctttctaaggtttgatatttgtaatgcacgagtgatgctgcaatgtcacttgattagttgacttaggttataatctcatgtatacatgattagtggacttagttggaaagataagtgtgtgtgcctttttaatttttacttctaaataagtaatgatccgcagataacaatatttacaataagtaacatgatgtctttttaatgaaaaagtataccattcgattgtgtggaagtttggtgtgcttttttttttttggatgatctagtagaaaaagagagtaatggagaattgctatggaatactcaggtgacgtttggttggaaggaatgaaaatataggaataagaataagaaaggaaataagaaataggaatcaaatttaaaatacagaaaattgatgaaaaaattattaatttttattctcatcttgcgcattggaatgcacaatgatttattcaaaggtgcataatggctttaacttctgaccattcactttgaaaacctttcccgtagttggactcacaacctctaccgcaccatgaggaaaaactttggtgactacaaagggtcctatccaccgagacttcaactttcctggaaagagtttgagtcgagagtgatacatcaaaactttttgaccttctacaaaattttttcgataaatgttcttgtcatgaaaggcctttgtcttgtctttgtagattctcgagctttcataggcttcagttctactaaaatgatggaaaaatcattccattagaacgacattcaaatactttaaaatgcaactaaacaaataaatggaataaaaattgtttccttttcattctattttattacctctaaccaaacaccac

SEQ ID NO: 224782 - DNA, 1609 bp, Cannabis indica
gtcgagcagcagtttctacttaggttgaccaaaatacctgaattcagaatcaaggtaacattagtataataattgcatatatttttgcatgtttagcgtgcatatttataaatatctaatagataacatatcagtaatggcggtattagtgtatataaaattgcagtgaataccaacagttttatgtttggcgtagtacagattgacactatcacatcagtacgactaaagtactgagtataggctaatattatggtcatcgtatttttgtacaaacattctagactcagtacacattggactctggataggattgtaattgggtgtatgggtgcctagttataatctagtttatgttatatatgattatgcttttcttactaactatgttgactcacatatattttttttatgtgtaggtaaagacaaagctaagactgaacagcagtgaacacgggtagatgaagattgtacatatcagggcggttagacctgaagtgttcgatctttagggtagtaggctttattttgatagtcactaggcgacaacttttgtaattaaatatgttgtaaaacagttgtaactttaaagatgggatctcggattatgtaaagtatttatgtattcaagttttaaagtttaattaagaaaattttaactactcataatttttctataatccctttgattagcaaaggagtgcacggtattaagaaatgatgataacacacctaaattagtggggtttcacaatgcacgtcgctgatgaagagcacacaagtttccagacggaccaaggtctgtattgttacaaaataatgccatttggtctgaagaagttcggggccacgcatcaacgaatgctcaacaggatgttcaagaaccagttgaggatagatatggaagtctatgatgatgacatgctggtgaattctaagacctctcgagagcacagtatgaacctcaaagaagccttcccagttctccagaggtatgggatgaagctcaatcctaaaaaatatacatttggtgtctcctctagaaagttcttgggctttatcgtcagcacccagggaatcgaagcaaacccagggaagatcaaagccttcattaacatgtcatctcttaaaaagcacaaggatgtgtaaagtgttattgaaaggattgcagccctcagtatattcattttgaaagctatagacaaatgcatcttgttcttcaacatgttgtgaggaaacaagaaatttgaatggaccgaggaatgtgaagaggccttatagaaaataaaggaatatttgacaaaagctcctatcttattgaagtcagtggaaggtaaggagttgtacctatatctagcagtgtctgatcatgccataagtgctacattattgtgagaagaaggaagggtctagctactgatatactatgccagcataataatactaggttcggagtccatatcccttgatcaataagttgaccttttgcttactagtaacctccaaaaatctcaaaccctactttcaagcccatgccatcaacgtactgacaaatcatcctctctgccatttacttcaaatgtaacgccctaatgctaaggcacgctac

SEQ ID NO: 224783 - DNA, 1021 bp, Cannabis indica
gaataagtcattctggtgggtaacagttgaactcgccaacagccaccgatctaacccgacattctcacttatatttaataccacaagtccttaagatattacctacataatctctgatggcttgcaccttcgactctattagttcagcctcgaaggtgatgttaggatcctaaggagtctttgattttcgaggcttggatgtcataatttcaaagtccaagtcacctagtttaaaagcaattgtgactctgtgtaaaaataaaggcctagccagaggaattgacgataaattagaggattcaggccaagcagcatcttgcaagaagcgacatttgccttctgtaatttcttgcaagaagcgtctgtggcaattggcaatgtcatcttaatgggtttttaccaagtgttccatttgggtcctgaaattctggatttatatgggttggcaagtttagtgggacattctgtttctaaatattttggacgtttgaaccagatttggacattgttgcaaagagaaagcaatcccaaatcctggatgaaatttatcaaaccaaaagttggtaaatttgagaaacccaaaaatctgcactgcctaaaccctaacatttacccagaaacaattcaatcctaaagttgctaaaaccaaatgagggggcaaaggtgttaactaagaaactagtgatcaaacctagaaacgcaaaatcaaaagcatgtaagaaaataaagagagatatcacttactgtttgaagttggtttttggagcaatgattggtcctgcaatcgacagaaaaatgaacaacgtgatgatccctttgaatgcttgaggtcaaaaatcaaatcggacaaaactcgcaagaagaatgttgatgaaaaagatggcatgcaaggtttcgaaacactctaggtatgggtaagaagctcaaaaaatttctagagtttttaaaataagcaaaggtaatgaaaaggtggttccttttttcgtttaatactctggggttgtatctcagtcagattaag

SEQ ID NO: 224784 - DNA, 1194 bp, Cannabis indica
atacattttcgaaattcatataaaataaaataaattaattttcaacataaatataattttcctatttaattaaatctctaaatatttaagtttctagagcataatcaacttaaatattcattttctcatttaattaaatatatctaaaaaataccaaaacgtctacctagaaaatatctatctagataattcataaactaatttctaattttctaatgaaaatatattttagtctatttattttaataaattattaatgaaaattacttgatttaagttgatctaaaattaattaaatgaattttcaactttaatctaattttcaaaattcaaaaatttcaaaatatctgcatttaaaataaataaatgcaattcaaaattatgtgggaaaattattattaaaataaaatatactctgaaaattattctaatttaagttgatctgaaattgaaaaattgctaacttaaatttaattttctaatttaattaaattaattaaaatagaaataattaagtatcttgaataaaatcaacttaattattaattctaatttaatatgtaagaaaatattcaaatttaagttggtccaaaattaattaataaattaattttcaacttaaatatattttctattaattaaattttttgaaatagaaacaaataattaagtatcttgaataaaatcaacttaattattaattctttttaagttttaagaaaaatatcctaatttaagttggtctaaaataaattaaaaaattaattttcaactgaaatatatttttctacttaattaaatattagaaaatataaattagttactagaaatgactatctagaatatttcattaaactaagtgtatttatcaaaattaattttaaaataatccaatgataaattaatttcatttattttaaaattaattatgttgctaattcaattttagttatgttaaactagtataattagcctaatacaattatttaaataaggcaaatgggctttcacaattggggttgttcatgtgagggagagctgagttcggtatgtcgtacttactactaatgaccacctaactctatcacacaaggcccaaagtagaggaatttaacctgggaaatttacacagtttactgtgttttcccattttctttcttttatactgttacactcccaaaataacttttgtac

SEQ ID NO: 224785 - DNA, 2905 bp, Cannabis indica
cataaagccttgagtaagtttaaggaatggaaagcactagagaaactcaaacgagggaagaaagttaaaagactcaggactgataatggtcttgagtactgttctgagttgtttagttctttctgcaaggaaagtggcattgctacataaagcagtgccaagaaatccacagcagaatggcctagctgaaaaactaaacagaactatcttggagagagtgagatgcatgttaatttatggtgtgcctagaaacttttgggctgaagctgttgtgactgcctgttacttgattaataggtgtccctcagctgcaatccaagccaacacaccagtagaactatggtctggacaccctgcaaactatgggaatctaaagacatttggttgcatagcctatgcacatgtcaaacaagggaaacttgatcccagggcaaagaagtgtattttttagggtatcccgaaggtttgaaagggtacaaattatggtgcattgaaactgggaatcaggacaggtacatcatcagcagggatgttgtgtttgaggaggaaaatgtgtacaaagatgtcatgaatactcaaacaaaatctaccagtgacaagtctgaggatggattggagttcgaggtggagcctgctggaaaatttcagggagataatcaggcactagtaataccagaaggaacttttgatgaagaaagtgaggaagaataacaagaagtaactgaagaaagggcagcagactctcagggatatcaattgaccagggatagacagaaaagacaaatcaaacctcctatgagatttgggtttgctgatattatacattatgctcttaacattgagcagtgtaataatgaaccaagaacctatgctgaagcaatgaagtcagttgatagagagaagtggaatgctgcaatggatgatgagattttatctcttaaaaagaataagacctggattttgatcaagaaactgctaggagaaagagtaatcgggtgcaaatgggtatacaaacacaaagatgacattctaggaggtgaaaaaggcaggtacaaggctaggttagtggcaaaggggtatacacagagggaaggggttgattacactgaaatattctctcatgtggtgaagcatacctacaataagattgatcttggccatgacagcaatttttgacttagagcttgaacaaatggatgttaagacaacctttttacatggagaattggaggaattctgatgcaacaaccagagggttatattgacaagggaatggaggatagagtgtgtttgcttaagaggtccttatatggcctcaagcaatcacctagacaatggtacaaacgttttgatgatttcatacacaaaacagggttcaaaaggagtgtgtatgacagctgtgtttatgtaaagtcatcaaaaaccaaagctactgtctatctacttttatatgaagatgacatgctaattgctagaaaagatatccaggagatcagtcaggttaagagaatgcttagtggggagtttgaaatgaaggatctaggacctactcgaaagatccttggcatggaaattctcagagataggaaattaaaaacactgaagttatctcaaactgaatacatcttcaaggtattgagcaattttagtttttctgatgccaaaccattaagtacacctattgctcaacactttaaattgtctagcaaacagtctccatccagtgaacaagaagcaaaagaaatggaaagcatcccttacacaaatctggttggaagcatcatgtacattatggtttgcaccaggcccgatttgagtcatgcagttagcattgttagcaggtatatggggaccccaagcatggagcattggaaggctgctaaatggttaatgaggtatctaaaaggcactactgatgttgggttgatatatagccctgatggaaatgaacctattgtaaatggctttgtagacactgactatgcaggtgatatcgacacaaggagatctcagtcaggctgggttttcaaagtcaataactgtactataagctggaaagcaaatatccagaccatagtggcactctcaaccacagaggcagagtatatctcttgcacagaagttgtaaaagaagtcatttggcttaagggaatcactagggaactggggataaatcaaggagccattaccatactgtgtgatagtcaaagtgcattgcacttgagtaaaaatcagatgtaccatgagagaactaaacatattgatgtaagattacatttcatcagggatgttctaccggaagaaaggagaaaattggtaaaagtaccaactgaagagaatgcctcagatatgttaaccaaggctcttccaactacaaaattcagacactgtctgaatcttctcaggattacgaattaagaacagtgatccttgtcagtgtctgtaatctagtttaatgtttttaatcagtgtctattgtttgtaatctgcattagtcttatcagaattccaaccaaggtggggattgttagatatggtcgattattctgtttaagactttccttgtacagttatgttggttagcaattaggttgacacctaggacaaagctataaatagctttgtctaattcattttgtaactagtttttcagatgagacactcattgtaaatactttacaatataatcaataaaggagcattactgctcaagcttttacttcactttctgttctagattggttggtagcgttcttggatcaatgtggttgattgcataggaatcgttcattcctaacagatttagctaaaatacataacttgattgagaccttcttgtacctatgtcaccgacataatcagaatccacgtagccaatcactttggaattctcttttcatcttcc

SEQ ID NO: 224786 - DNA, 2477 bp, Cannabis indica
ttttttttttttttaagttaattgtgtcattaaaatgatgaacttgaaattttcttcttcttatatgtgtctaatgtagacacagtctccttatatttttctcacagagagtgaattacaattgctaacttcctttatcctcttaatagttaatacataatatcctttcctctttgtttaatttcttgctctgcttttgtttataagtctttcatgatttataatgttaaacacttagcagcacatggacttttctcacacacatataaatatatattaacaaagcaaaccatatagctcttgtaatagctcttgtttgcatctcattttgtaatagctcttgtttttaaaggatttgttcatttatgggcttaatttcaatgcaaactaaaccatgtatatttatctgcatatgatacaatattaagtaagcaatagaagaaggtaattcgttggagagtagagtacaccattatatctgtgagttgtcagtaataattttaatattgtcatgatttttttcccctttctatgtgttgtttctttaaggaaaatcagttatttttttttttttttaatttaaaccagtcctgtcatcctgtttttatgtttcatgcttgcctggtttttcaaatcttgtattggcttaatatatctttcatctttattgtagattcctaagcaatacaaatcaggaagagtgaaccctgtcgagacctgttgttgttgcctaccttctgagtaagtaccccatttatatctctgcctatatgcactttgtatttgaaatttacttctttttcctttcgataattatattttgggttttggttaagtttatatttgggtttagtgtagaaattttggtgaaaagctcaaacttatgcacggatttaacatttgaaatgcttgaatttatcactatatgtgagattttatgctgatcaattgtgtaaatgggtgtctaagctttctttcaattctgttacgtttgtttccctgtgaactataagctttgcagttatttatacttaatttttgcatcatttgcaggtggcattgttggggtttggtttagtatagtgtctcttcaactttagcaatggaggttagtatttaaattagttttgagctacagaaggaatgcttgtatgatcaattggcacgtaaatatggacttgcttgagaagttttcccttttctatccatggttgtttacttaacccatttcaagcacaagatttcgaaaattaaaatgagttgaactgtgagaggggatactcaatgtttgatctgtcccatttctcttcaaatcctttcccttaagattttatatatttactttgtttattacgtaaacatgccctatttgtgttttaattatatgttggtcggtttctttttgttttagaagcgtgcaaatactgagcttgttgacgtagacaagataacagaaacaatggaagctgaaaacgccagcggaggcggtttataccttcctgggaaggatagagtggtgtttaaacctccagagaggaaatccctcttaggtatgtattgcattaacatgtttacatattattagatgtattcagtttctgccgatctcctttgatgaaagttagaaaaatggttcttgatttgtttattttttaactggtgttaatttctgatttgtgaattatagggctggatacactagccagtgcaaagaggggggagtctaaggctgatggtgggttcaaagcccctagagaaagagttgtttctgttgcagcatccatggaggaagaggagaacgctgtatctgttgtaacagatgattccggaattaatacctccactagcatgcggaatccttctaggagacaatatcgtgaagtagctgcaaatgagacaacctacagaggtatggtttcggttatattttgttatctaagaatatatttctaggatctgtatggttctcaggttcaagtttattaattctccttcttttaagtgcttgaaagaagagtagtatggctgaaaatgcattagatcaaaagggttggctttctacagatttatgtgatatatcattttacaagtaaaacaaatagattggtagtctttaattttattttccatttcttgactattaaactgttaaattctcttaatatttagttttttattttatttattgctctttaacattttcagcgcttgagtaaaatttggaattcttctactgcagaaagtacagatgatgatgcatttggctcttcaagtttcagagaacgtcaacattcagatgtaagtttatcttctgtgcaagttatttcatcactggtgttagtatcatgtgttcaggtccattactttttactccaaaggtttcttattcagttcaacttttcttttcgagttattggtcttgcttcatcttcttctagttttttttattctggcccctctctctctctttcttagtg

SEQ ID NO: 224787 - DNA, 2668 bp, Cannabis indica
ccatgcaacatagaatgcgatttttgagctttattaactagtaaatctgattatattgaaatgaattttatttaaggcacaaaacccaacactagctaactcactttctccttttcatcaacacatgattgtttcaatctctggtggaaaactgtttggaacaccaagatccccccatataaaatacttcatttggaaagccttcaatcatgtcttatcgtgtgccttgaacctctttaacaaaaatatgcttagcagccctaatcgttcatcttgtatgaataaagtggagattgtatcccatgcccttttagattgctctagagctaaatatgtgtagagaaactcttcttttaaccatttttacaatagtaattaaaaatgtgatattaaggaatttctttgaagaggctttgaccaacttagtaaagaagattttgttatttttatcagtttggtatgacggatttggtcacggaagaataatgctctttttaacaaaaaaaatattatctgtggaagcttttgtcaaaggtttgttgcatgattaccacgaaggtcaatccctcagatcggggaatactgtggaaggggacaacaactcaggttcgatctcgagcccccattaagaaggaagcccgtcgattgctcaacagttgaaggaaagagatttcaaattaaacacagatgcaacccttgatacaaaaaaatttcctactggattaggagttgtagttaggaattggagaggtcaaatcgttgcaggtttatcgatccctaaaactggagcctcctctcctatgtatgttgaggcacaagctctcgtcgaggctcttaggtggtgttcgacaatcaaccttctaatcacatatataaagtctgactgtttacatttagtttaagatcccacgtaaagggaaggacatatcaacactatctaaactagttacattaattcaagaattcttatcaaaagtttttaaatatttttctttaaaatattttgagaagtgatgatgggaatgcccataaaagatacattacaagtagataaggatttaatttagagagtttaaattctcttttctgacgttataacggtatctctgtttgtagtctttctcttgcgtttaaaaacctaaacaaatatctaaatcgtgtaaaattatgccagtttcgtccgatctctaaccgattatatagtgaatatataactgatttttatttaacggtgtctcatatacgcaatacatatccaaaaagataagtcacaaaaaaagttacatattctaaaaaactaacaattgtatgggaaggacgacagtcgataaggccgctgtgccttctgcggtccggacggatggcaacatttgtacggagattgagtccactgcgagattttggaacagcttccgatgaatcggacaccatccaaaatttggatttggcacatttcgtaaatatctcaaacctcaagtccttttctttatcctcttcacaaaagtcaagggcattcttgtatatttatccacaaccatgacccctcacgtgactgacatctgccacgtgtcaccgaaaaccctttgccctttcaaccagccgtcggggcccacctgtcatatcgctcttatcctaattacgtgctaatcgatccacttgccacgtccttacacagcccttggattcatctaacggctcacgaccattccagatcccaaaacttgctcgacctttaacgcccctaacctctcgaaattccccattaaatatctctgctactctttgtatctctctcctcaattctgggtatcactctacacagagctcgagatctctttcgggatattagccgctttttcgatctctcagtctcttcttaaaaacttactttacccatatgggcctactcgaccagctttgggatgacaccgttgccggacctcgtccggagaacggtctagcaaagcttcgaaagcattccaccttcagtttccggtctaattcgggcaagggtacggcccagttggtggcttattattagaacaaagatcttaataaataataatactctactgctactattactactactaacaattatattaaaaatgatcggacggcttagatctactgtcatctctatatatttacatatttaattttaacttaaatggaagctatatttcaagtacgaggggaattgtgttagattaataattggtgttttttaatttgattaggatctgacggtggaaacgtaagatcgtacggtgaggatcagccggaggagccgacgagagttacgcggagtattatgatagtaagaccaccagcgagcctgagcggttcgcctccggtttcgccagctggatcaactcctccagtgtcgccgttttctggtaagtttaatgaaatgacctaattgcccctgttctatttacttggaagacttgttctctccattatttaggggaatgcattatctgtgtaatcagtctctttgaacatccaggaagggtcgttttgtcattttgtgatgctgtctactatttagtggataatagtgtagtgttaggaggatgcatataataattacactcttactgaaatgatgtttttacccttttgacgtaatacactttaatactatatgcatgacaattaatat

SEQ ID NO: 224788 - DNA, 3956 bp, Cannabis indica
attttttgaatttttaaggtcgttaaaaatacctttgaactattgagattgttgaatttaaagacttttttccaatttaagtaaaaaaatctaacatgatgaaagttcagggggcataatttagtacatgtaaaaatccgaggagcataatttggtagatatcaaagtctagggaacatgatttagtacataaacgaaataataaaattgaatgaaattagacaaaagtccttaaattcaacaatctcaatagttcagagggtatttttaacgatcttaaaaatgaaaggaacataatttgtttacatgtcaaaatttaagtagcaaaaatcctaattaatttttttaactagctttaatatcttttattttttttatttttatttttttttttttgtataaatatctttattttagtgaacaattatgatttttttttttctctattctatgttagttcacatttctaaaaataaaagttggttaaagttcaccctttcctttttctgataaatagttcacgtgactgtttcatttatagaaaaaaggttgtttttttcctttttttttttttgtggtttttagttttcctttccctatttggcatgtatatacattgaataaagatattatcatcctagctaattgatatttctttctttattttttgtagtgagaagaaaggagtgtacaacaaaagataaaaagaatataaaacgaaaatggtacgctatcattattctcacgttccaaaacaaaattatacgtggttgtggatgtcccttatttgtatatatccgtataggttaattttatggcataaggttgttttaatacacattttattggtttcatattttcatcaattatttatttattttataacggtgtacattttaattattaggtattacatttacaaaatagaaaatatcagggtattttaatcacagaaatgtgcacctaaaattattagaatttgtatgcaatattgcaatctcaagccaactattaccaaatgtcactttcattactattttgtattgttgttataattattctatttttcctattataattaagtgtgtatgtgtatagttgtcattgttttgtattatttctcttattttgccgaccgactataaatgagaagttattcatcattatcttttgagttgattaaaattaatctattatttttaccaaatttaacttggtatcggagcttttcaggtcaacatcatgtttgtccctcaggattagaccagttccactcaaccaaccaatcaagatgactagactcccgcgaaacaaactaatgtactagtagcaaaaaatacattttttttatgtttatttataattttacgatctaaaattttttatttacaaaaatatgctagtaaaattttaaaattataaataaaaaaaaactataaaaattaaattttgttataaataaataaataaaaaataatatcttttttaattacgtaaaacgtataccactataatattcgacttatttaaaaagaatttatatttttaattattataaataattttatccaaaatacacttttaattttagaaaaattacataataaatacaaaaaattaaaaaaaaaatacaaaaaataaatcactattggtgcaattcattttaatttcactttaataaaaattattaaaaaacactagccatttataggggtttggtgttagatactacaagtactaaacattgctattgaatattagtggtgtttagtacattctaagataatttttaaaaattattacattaaattatataaaattcaatatttaattataacaataatcattttaaaatttagaatttcgagactggtgctgatagcaatgctccaagttatttagatagtagttgggaatgaatactaattaacaagtagttgggtatgattactcttctagtatttgtaaggcaaagggcattattgtcaatctacttgagcttttcatcagtttcactctctcactcaccttattattatttctctccgcttcatcatataacatcactcctatttacttttctttctttcaacaaactctctcatctctctttcatgtagttctttactattttaagtaaaataaatatcttcgcttctcctttctctctctctctctcgtatatatatatataataatatatataattaatccatggaagatgatcagcgtcgtatggggaagaagatgaagaccgatcatcatcaggaaaatgtgagaggcggtgatgatttcgatgaagaggaggaggaaaaagtaaagattttttgctcttattaggagcacaagagaggttcgtaatcttcttcgtaccaataatggatcacaggccgatataaatccgattagcggtgtttggaatcccacattccgaccagaggattttcttgattccgatcatcataataagaacaatacagcagccatgatggtgatgatgaagaatcctccaccacctcctcctcctcagccgtccgatcctaattttaatcttggtagtattgacggacatgatcgtggagcttgtaaacagtctctttcagttgggcctgggattgggcttgggtctgggcctgggcctgggccttctagaaccagaggaggaggtgatcaaattcatgacaatgaaagtggtagccatagtgggggaggcggtggtacgacatcaacaactgatttagacttgaaactttctctgtaagacttaatttgtttcttgttttgactataaataataaaatatatatttatatttataattatttataatgagttttcataaatgtaatgaactaaacttattattatgactatatagaaaattaacatctatttggctttacaataatgtcgtctttaagttaagttacgtcgtctttgatattagtttcaaatgcaaagtgttttttttttaatttgaagaatgataaaataatattattttgaaatatattctttttcttcttcttcgtcatgatattatggcactatattttataaaaaagtaatttattacatatatatttaaatttaacttctcatatttcaatttattttttttttagtaataatacttaaagttatatttttagaacttctattattgggttgggttgaatcggagcaatgacctgaataaaactcggttatcatgggatgaagctgccccgttgggttgggttccgacccgaccagctctgaccgttaagttaattactacaggggtggacccacataaaaatgaggtgggacaattgtctcctattaaaaaatcaaaacatatatatattttttaattagttacgacgtatatttataataaaggataacattaatgtttaatttgcttccatataggataaagcaggtcaagcttcaaattctaccaagagtattttttttttctttttaagtttacttttacccctattttaaaaaaaattacgtcctctcactttaaatcttggatccgccactgaatgattacatattggccgttaattgtcaagttaatgaccacatattatagtctttgattgatcctagtcattactttttttttatttaaaaatttttaaatatactaataaaaaaagcacgtgaatattgacttgacaatcaagtacttgaaagtttcagaatattaaaagttgctaggcatttctacaatagtaattattctaaaaatttctacacatttatagaaaaaataaataactagagaagcctcgaatatttagaagagtttagaagaaattaattaagaaaaatctagagtaattgtgaatcatatagaacaagaacaatctaaataaattgttctagccacaaatgtaggaggcatacccctcaaggttacatattgcaactaaacttgaaaaataaatcaagtcttt

SEQ ID NO: 224789 - DNA, 2562 bp, Cannabis indica
tttaatattaaaaagtaactaataaaaaataatcgatccaatttgcacttttgcggattggatttaagctattgtgcggattggattggatcgaaaatatgaaatctgcacttcgtgcagatcgaatgcactataagcaaaatagtgtggattggattggatgaacacccctaataatgacatgttgaaaaattggtataaaaagtgtttctctctaaaatttcttaattagtcgtcgtttgattttcttgcttgtccagggcttgctggttgtttctcgactgtacagtgtggctctagttgggtcttgattcccacattattttttattttactgggcttgctatctatttgcttgagtgttcttttcatctttgtcttttttttttaaaggtgtgtctaataaatttgatttgcttattggctttagattggattttcaatgttgttaatctttttagtgtgttctgagtgttctttatcttcgtcgtctttctttagaggtgtgtctcagtacatttgagttgctcactgactttagattggatcttcattgttgttaattttcttagtgtgttatttctatttgttatgtttgtttttatttgcattggagatttagcagttttttttcacttttttaatgcttcaaggctggcgacttattgatattttagttgaaggtactattaaggtttttattctatatttttttttgaaaataaggctttcaataaataaaaaaaaattagacctcgcggtcattacaaaggatagaaacaggtatgcaggacgactccataacacctgtaatgttctgggcgaaggcccatctagccacattatgggcagcaaaattacaaacacgggaaataaaagaaaagttacaacaaagaaaatacttagagagttgattacataaagatacataatgatcaatattccaaatatagtgcaaaccctttatcactttgataaccacatctgaatcactctttaccaagacattgtcgcggttcctgagtctcgccgtgtccaaagcaagataacacgccgccacctcaccaaccatagggtctctaaaattaagaatggacgtagcagcgcacacaaccgaacctgaatgatccctggctagggccgcaatgcacatggagtctccaccaaccttaacatcaccgttgattttgatccaatcatccggcggaggcatccaaacaggcgcagccacaggaagcaccggggggaacaagcaggaggcataatctctataacaatgggacatagaattaattacattcacaatattacactgagtcgagttatgtaccttattattgcgggttttccaaatcatgtccacgacgattgaagcataaagaaacagcttgtcagcatcatccccatttaactttaagttccaaaggaatttaacccaatcccagaccctaccaccagaaccgtttatcggagaaaccccccaaggggaggacctccatatgtggtaggcaaaattgcaatagaggaaaaggtggtcaatcgactccgcctcctcaccacacaacgggcaagtctcgtcatcaatatggattctcctagccagggtatttcggaccggtagagcattcgagaggatactccaccaaacgattttgtgtctcacaagaactttagagttccaaagtttgttccacaaggccggtgccaccacacaggcaggggctctctcatatgcctgtatcacataagcagacttagtagtgaatttaccgcatccccctttagtccaaatccacttatctctcccctggccgctaggtctaccccctttcaggatgttcgtaattgtgacagagtcgaacagagaccttaacaaggagatgtcccagtccccattactcaacaacagctctgataccttctctaccctcccaagacaggaatagatgggtttcgggtagaaatcatttccatgcaccacccagagatccgtccaaacgttcgtgtcttccccatttgagataagtttacaagcgccttttctgaggatagctttagtcttgaccacatttttccaaaaccaagagtcaaaattgttgtaggtagcatccaaaaaaggcttactttttaggtatttggctcttaacaccctacaacaaagcgactgatcctcagtaagaagggcccatccccactttgccaaaaaagcctggtttaattccgaagcctttcggaatccaagaccacctctagctttaggaaggcagaggtggtcccacgccttaaggtataaaccacggttactctgttcacaaccccaccaaaagtccctagccataccatcaatttttgaagaaagttttttagagagcttggtagtttgcatggtgtacactggcagagccaggcccacagacttgataagcgtggcccgaccagctttagacagcaattttaacttccaaccgtgtaacttcgatacaaggttgtccaagatgaatttgaaatctgcatccttgcggttagatctaaacagcgagagccctaagtaattgatgttcg

SEQ ID NO: 224790 - DNA, 4376 bp, Cannabis indica
ttgagatggaaccccatgattctcaacatggtattagagccatatccctaaggttacttatggtctctaaatctaacttttaataaattgaagattgaaaaacacatgcctaattcttattatatacttatatatattttaatttatggtagataatgatatgataagtaagaagattaataatttaaaagaattgagattattgttaattacttgctacaaacttcccatgtgcggacaccaacgaggcgagcatgaagagctttttggacatctcttctgttaagatacctcactatcttatcttcaacacacacatccacactcttctccctcatcatcatcatcacttgctgttgttgttggggttgagggtttaggattttggattgggacaagactgaggagatacaaacgtccagtgtaacatcatatttgtccacgaacttactggtttctgcgttgactctggtcatcacactcaaacaagatggtgaaactgcatctctgtagtactcactcacgtaccttgaatagttacacactgagctgaacatttcgtatgttgtgtctgataacagcccatgtgaccataagaactctgctcttgaattgaaatctgttgcatattcaagaacaggatttcccagctgcacatacataacatatacatatatcatatatgttacttacacttcatgagaatttgaaaacaatttttttttttttactagttaattctggtacttacagcaattcctttcagattgaaaaccttcttttttctgtttacttgaaccataagctttgccagctgaggaatatagtgacctaaatatatatataaaataataattataattactatatagtactatcttgtggtgcttagtacaatcagaaagtgtatatatgtatgtaaagtgtttagataagtacctgcataactttctcctgttaagaacaagtctgtgtttttgtagtgaggaaacttcttaaaccaacgttgtaagaacactaggttctccctggcttaacatatcaaatcaaaagtgacaaacatatgtacattaattaaataatcaagtgaaaaagatctagctaggaccctcttttctttattttcttcaaccaataataatacacataagtgaaaaagaaaagagaagaaaaaaaaaatctttaagtaaagcagtgaaacaagaaacaacaaacaacaacaataaatactgcttggtgtttcactttataaaagtctaaatatgtttagtgcaaatcaactgttgatgtccccttcttccccttagacaaactaaactataggtatgagattatacaggagaaaactaagaataaaccaaaaaggaaatacaatttaatgttaataaatatgttgaaagtgatattaaaatatatatatatattaatacctgttgcttcatcatccactgctacataagaggaagtatcagtggaataagagaagcccactccaactggtgtctccaaatacagcatatttgcttctgtcaattaccaaaaccaaataatattaacaactttatttctttttattgttttaaataccaaaaaagaaaaacattagatataaaaggaaagacctttattccagctatattcatttctaagcaagactttcccatttggtctgaaaggtccattttcagagaatgctccaaccccaagagatgaacaaccaggacctgtaatttgaattaatatattagtgtgaattgaacaacaactcaacaaataaacaaattaggcaatgagaatgagaaagttaacaaacaaaacaaatttattaacctccatttaaccaaagaaccaaaggctttgaagttggatctgtttcagcttccacaaagtaataaaacagagaaatgttcttcttatcatttactttcacataaccagaaaactgttgaaaacccacatgatcaggttgtcctggaagcttagaaatcttgtcagaattatgagatatgggagaagattcaattacattcatgggaaagaaaaccaaaaacacaagtagtaatactagtaaagacttcttttccatattggccaaaactattaggacagagacagagagagaaagaaagagagagagagagagaggaatgaaggaaggaaggaaaagacttgaaatttgatgatgatgaagtgttaatgtgaagttgtggtgtggactaaataaataaaagtccttataattgacttttgtttatttcttttattgtttcataatatgattagagtttctaacttttttttggttggagtcttggaagttggaaacggtaatgaaagagatgtgtgagagacacaatgaaatgaatagtgtgagtgagtgagtgagtttgatgttcttgtttggggtgagtcagcagataaagtatgggtctttttacactaaaaagttctgaataagcaaaaggaatctgcaggtgagtggggggttgttctacttctaagttctactacaaagggcttggattgattttcagaaattacaattttgttgtttctctttctgtttcttttattatatttttactttgcttttgtttttatgtataaatttatatagaataagcataataacaatacctgctattttcttaaagcagcaatacaatacagttttgcttgaaagtggcttttcaatgcttactactttcaatatggaattgggaaacaaaaataaaaactctgaatattacagaacccaatgtgcttctttttcttttggttaagatttatgaattcaagatagtatcatgagggtttgaggattattactttttttcctttttttttttcaagtatgatttgattaattaacgtttcttgatacgcaagtacaaacccaaattcctagttttgaaattttcagaaaatgattgttgactaatgttcaactagggagctagatttaaaattaataaatataaccattgtggaaaaaatataaaaaaggtactttgatattatttttttggttatggaaattaaactatcatggtttcatacttagagcacttaatatgagatcagatctacgtttgggtttcatcacaaacaaactaattttggtggaatttattttatggtatatgatattatacataaagtaatatgatttgtttaatatataatataaatttaacactagctactttatagtaggtaataggtatgagtagaaaccaagcataagctagctctctctttatgtatttttctgtaatgaataatttgttctcttttgaccaattgtttataaagatcatctccaatgaaaattggatacctgccttaatctatactacaaattatacaatatacatgtatataaaaaatacaatgacaatataatacacattgttttagtccacacaaacagattatatgtataaatatatataattaaatcacgtgccggggaccacagacaacacaacacatgcttcacattatagcttcaaaaacaccaataatgccttctatttgtgtctttgccctttttatagcgtttaattttctattctcactcatatattttaccactttaaaaattaaaatataaacacataaatgaatagctctatttctttcaaaaaaagaatagctctatagtacagttagtactcattaattcatggaaaaaatatctaaataccatccataagtgattattgctatcaatgactttatatatatatatttttgggttaaattatacatagtattattatccctaccatatcacatgaaagtgcgtgttatattaatctaaagttagtattgtccactgtccatcaccactataaattaataaaaatactcaaatatatcattatctatatatatactatatatataacaatttttcttttttaatatttggtttggtaaatcttatatataataatgtgtattttgatcatggtttttagctaaagctaccatgagaagattcagtgtcttgtggggcttattggctggcttaaaaaataagaagcaagaatcattatgtatcaaaaagaagaagaataagaagaagagatagcaaacaagctacaaagagacaaaaatccatgcttggtactgatttgcagctcattcaacttacaattgtaatttttttttttattttaaaaaaaaagcaaaattaaagttaccatggatgagcaggctttatgaataaggcctgcttatttcattattacactctcagagagagcccatttggccactgattttaaggaactcgtactagaaatagtagtaataatattaataactagatagaagaagaagaaagaataacctcattaaaatgtcta

SEQ ID NO: 224791 - DNA, 3749 bp, Cannabis indica
atccccctccctctgtgtaacttttgttaccgttgttatcttaacctttaccggttaccccaataaaaaaaaatggaatagtctcattccaccggaatgctattttaatgcaaccaaacaaaggaatggaataaaaattttctattccattttatttcattactactaaacaccaccttagtgtgtgttgtagttggaataaaaaagtatttagtgctaaaattatattattttgtattgttttgacactatatttaagtttgagcgctaaagatgcccttagctgatttcgtagatgttctcctgtggaagttataatcgcgtgtcgcatacgttttagattgttttttttttttttttttgtcgttttaccttttttttgttcgttttacctatttattgtcgtttttttttattatattctcctttatttaattgtaaaaccccaaagctaaatggataaacctcgtcgacttcctcactgctcacacaaacaatcagaaaccaaaccagagagctctctgaaccagaatgggagccttaaagctcattctcttaagctcaacaaccgcacccactacttccactacatctctctgtctcctttctccatgtcccaccagaccctttcctttctctctccgcgctcttacagccccatttcttcacctccgtccacctctctttctttctacatctcttcctcgctgtacttctaagctggccgccgttgagtccaacaacgacggatatgacgactcagaagaagattttgaagattttgaagaattggaagaagaagctgatggtgctgagcattctgagagtgagagtgacgccttgattgatgtcgaaagcctcgaaaaagaagctattgattttgttcgggaattttcttcctccttacctaaagagcttataattggtgcgttttgttgctctattataacattgctctgtttgtgagtccaattccctcttgcatttggtttgggattgaacttttgttatgaattggtaaattggattttttttctgaccctgttcgtaatttgacctgaaaattatgaaatatggtaaaatgttcaatctttttgggtcttttatttgcttaaccaagaaaaaactgattaggttttttggtagcttttctgcttttgggatggttttctggtggattgcctttaaatattagtgtcaacgcatgtacaatgcaatctggtggattacttggtctcttagttctaaaatctggttaagtggttgtgtttatgactatacatagattattgtgctcatttcagaagaagatgtgaaaacggacagaaagagcaggagaaggcaaaagactgtaactaaaagtgtaagcaagtgtttttcattgttgtgacgttatattttgtggcaactattgttagagtttccgagctatgaagcctgaggcttggttatttcatattgttatctttctcggcttaaaattttaattgattgctgaaaataaactattttctatggtaatatgaaattattgaagtattattttttttttgctgggagaaattatagaagtattatttggacttttttctaacaaaccagtaaacatcatgttttagcaatatttgaagcctgtttgaaatctcgcagaatgcagtgagatctcatactttcttatggtttggtcgaaccaaaagggaaggtcaaatttctatcaatccaattgttggattacaaaaggaattaagttgtctgtaatgtcattatgtttctatctctttattgtaagatagggactcttctattggattgaaaagaaatgagatagattctaggtttctattttctgaaatcgtaaatttctttcacagataccgaaccatcttcttccaaaagttgcaattgttggaaggccaaatgttggtaaatcagcattattcaatcgtcttgttggggtatttggtcatgaataagactctgcattttccttttcagtttatgtttaagtacttggaacttgccataatgtagaagtcttttttctgatagtgtacttcctttttgtcaataaggggaacagggctattgttgttgatgaacctggggttacgagagatcgtttatatggtagagctttttggggggactgtgaatttttggtcatcgacactggaggtgtgctcacagtttcaaaatcacaagctaatgttatggaagacttggatattacaacaactattggaatggatgggattccacttgcttccagggaggcagctattgccaggatgccatctatgattgaacaacaagcaactgcagcggtggaagaatcatctgtcattatatttgttgttgatggtcaggtatgaaaataaaaaagtaaaatttgatacctttcagtaaaaggatggatcaatacctcttttcacgtgtgaggatgttttaacctgatttatttttccttgattcccagtgacttcttagtaatgttttgccctgaaggaaacatattttttttctttctatttattgctagtactatattagttatctctgccattatgatttggaaagtgaataaatccactgtacaaaattggtgatactgaaatcattggcaggcaggtttaacagcagctgatgaggaaattgctgattggttacgtagacacttctctgacaagtctattatacttgctgttaacaagtgtgaatcgccccgtaaaggagcattgcaagcaatggagttttggtccttagggtgcggtgaactcttttccttttccttgaaattattttgttccaattttgattctctggtatgcaatagtatatatttgaagtgtcataaaatggttataatagtggtgtgtatccttttatttgtgtaaccaggtttacaccatatcctatatctgctgtttctggaactggcacaggagagcttctagatcttgtttgttcaggcctgataaagctaaaggttttccattccttttgattaattgcatgtctcgatttttcgtgaagtgatatgtttttctccctgcctaatatttttaatttttaatcttttatgtgatgtcgtgtgagctggaagttatttgacttcatattatgtattgatcattgttagaaagactcttaaaaagggtttcatccaagcttaatctttatctttatacactatgtatgtgctacttttttatttatttatttctaattaaaaattagaaggaatatttggctattattattaattttattttataatttcttataattaaaggattcttgtttgttcctaggatcaagaagaatatgctgaagaagaagagtatattcctgcaattgcaattgttggccgaccaaatgttggtaaaagtagtattttaaatgctttggttggagaagacaggactatcgttagcccagtcagcggcaccactcgtgatgccatagatactgaatatacaggaccgaatggcgaggtttggtttcccttcagtttatccgactgctttctgcttgttttccttttagtttgtcactgttagatattagttatatattagctgtaaaataattagatatttagtagatatttagtctcctaactttgtatataaatatgtaccattctataaaatagacacataattcgaatcactattttctacatggtattagagcattgtgatctgaaattcgaaattcgaaattaggtttcattaaaaaaaaaaaaa

SEQ ID NO: 224792 - DNA, 4058 bp, Cannabis indica
gactaataagtatccttttcaatttttgtatcctgtgctgccataaagatgacaggtaaaccttttgacatttgttttctagagaaggaaatcagaggaaacatatgctgatttttcacagaaatatctagatttcattataaatttggttctttgaaccagtatggaaaatgcagttaatgatttttgttattcattgacaaggattttagtttactcatttggaatgtggaaacaaattttccttctaattatgacatcattttccaagataagctgtttgactgtccttttagatctcacactcccttgtttttttgcctcacaaacttatgattctgttcataacttctgtaatatgattattcaagtattgagctctctaaggtagtatcaattggttggggccatggttttctccagtaaggtttggtttgaatcccaagtagttttcaccaaacgattgtagggtttagcttttgtgggatgaccattaaatacatcaaaaaatattaattgttttcgaaaaacaaatactgaaaattaattgctcaaacatattcttatgaaacttgaaaaggtagctttgcaaacttgttttcttcaatgcctactcaagaagctagtgcaaatcatttatgataggctaattaagattttttccctaaaactttgacatgtaccaaatcatgcaccctgaatttttaaggtcgttaaaaatgccccctgaactattgagattgttgaatttaaggacttttgtctaacttcattctattttactatttcagtgattgtttatgtactaaatcatgttctccagactttgataactactcaatcatgcccctcgaactttgatatgtactaaattatgccccttaaattttcattcatgttagatttttttactaaaatttagaaaaagtgtttaaatccaacaatctcaatagttcaggagacatttttaacgaccttaaaagttcaggaaacatgatttggtacatgtcatagttcaggaagtaaaaatcccaattagcctttatgatatattgccatcagttcaacggacaatgtagtctgagacatcaacattctctttaaataatctatgtcaagtaaattttgcttgaaagttatgttatttattttccctctatagtcctcattatactagtgaattaatcctaaaattgtattttcttctgttagctagctcaccaaaatgggctcttatatccatggaaaaattggatcgactctcttgtaaacaataaatattccattttagcttatattttttggaattgtacctcacctctttcgagctgttcatttactattttttctagcagtaaacgtaaaaaaagtaaaaattaacttgtgattttaataaagaaactttgatgcagattgaaagtcgtcgacgatttcgaatagtccgggcttgggatcaagatgggtaagtaattagagtattctggaagtgtcgaatacatttgttgctcatttgatatgtagcttattttgttttttatcatccctttttgtgtaattcaggtatcgtgttgctgagatcgaatggatacaggataataacccactagaagggacaccagaaagagaagaagtaagttttgccttcccatttgatacttaaacttaaacacgttactagagggatatatttttcaccatacctagtgagcttttgctctgattttatacatatctgttgcatactaatggtctaatattttttatggatatagttacttgagttgacacgtaatgcatcagagtacactcggtcgtggatgaggagggcaaaacaagcagcacaatatggtgagaattttagatatccaaatatgaaatacctcagctcaagcttagcaaaaattttaattttaaattttttctagagaaaaaggagaatcattcttgtttacaatctatctcctacatatattggttagtttatctatattccttacaccctccccttttttcattgaagatccatgaatctattacagttcacttttggtgttgtcagcatatctttattttggaaaaaaataggttctgtttgaattttggatattaattaagttatagttagtagtagtacccatctttatgaatgttgtaagagttaatataccctccccttttttcttcgtcaatgatgtttgtcatgtgtagataacgtataagaaaatagatgggaacatcggttttaattatagtgtgttggtggatgaatgggaatagagtaggattcatgaggggatcatggtgattcgtgaggggatcatgctgtagctcttgggaagagttataactcttgaatactcagggtgttttcttttggtaattaaatagaaagtctaaaatttccctttctggtttggcttgttggttatttgcttgtgagataaaactagtgagttctatcgagtggtaggagcgctttgattcaccacggagccagtggatgttggggtgttttcttgttgcaaaatggagattggaggttgataagatattcttagagaataaaattatctatccatattagtataaagaaatccctcaaagaaaacctctttattgatgttgaaataaaagaataatctagctttcaagatgttagtatctccaattacaacctttctaagaggcttctctcttagagtctattctcttctctttccaagctgctttacacaatgaatcacccccctttttataggtattggacaaataaattttagttgcgagctaggatctaaaaagaactaatacaacacaaccctccaagacaattgccaactaaataacaattagttggaatagaacataacaatcctttctttaaatgtcttgtggcctcatagtatatactaactttactggaggcttatctgtggcaagcaatgattgtgatcccaatagaccatgtcactctcaattgctgataagacccaaaccccatagctaagtaaacccaattgaacagcagccaaaataagaacaatagcaaaaaaatagaaaacttgtgtatagattgatagtagattagagaattacagagactatccctaggcaattgagaggcctaggctttacatgatgcaaatagagaaaatatacaattcatttcttaaccctccaaattcttctaatcgtgctatatatactattgtattccctcccaaatactactctttaagacaaagaatatacccttttatttgctgttctctctctctctctcaccccattaatcctggggtcaaacattaccgggcgcctgaatttcaccttgccctcaaggtgaaggacaatagcgttgtctgtaagctgctagtgaagtgcaccaagtggatgagcaatcggtgcagaaaaaaggaaaaaaatctttgtctattctatccaaaaaaaggggggaatgactatttgcttgtggagtgagcaacttggcgggtcgtgcaacagaatagacaccacttggcgagtcgacctctatcgaaaaaccaatcaaggaatgtcatttagtagccactagcttggaaactatggatttgagccacgacagaacttgaaaaggtttagcgttctgccttgatcaaaaacccaagactggacatattcctcctttgcttgcctgactaaaacgaattccagaaattcaacaagatgtggcaaaggaaaaattgagatgtaaattcttggtgtgacaactttggtgaaaccttactctcgaacttatctagatcaaaggaacgaagcccagctgacaacttttccacactgtttagtagttgagtacccattaccaataatttattcttggtgtaaaatttcaaaagagttgcatacaactgtcctcccctagttttgaacctatgcacttcatcaaccatcagatagcaacacctgatcattgaaagggctgccgtatctctcagagctacttcatatgtggtcattaattctcggcttctcgaaatgcctagaacaattacatccattgatcaaccttaataaag

SEQ ID NO: 224793 - DNA, 2206 bp, Cannabis indica
tcaatttatatatacaagaactaaattaaattttagaaggctaaaaagaaatagttgtgtaaaattgaattttttgtgtttgtaatttcagtacgtacgtaccacaatttttccagtgtcattacgaatacctgatccaccagatccatagtttacacctctagtaataagtgcagcatttccattaagaacagaggcaaatggtggtatgaatgttttaaagcctagagcttcacctgtaaaagagagcaacgcaaaatgcttcaaataaaccactcttttcattgaacctctaataaaatctataacaaaaagcaaagtaataaattaaaatgttataatgtaggcataataagccaccattttttgttgtgtaacctataattattagcttgacttatcgtgtttttcaataaatatagatactactatatatttattatgattaatagtgtgcaaattattgatggaataaaataaaagatacatgttatcatttaaaagaaattatttttattcatcccatttatttatagaatgccctacatatgcataataataatgtgaataattttgtataaagataagagtggttaaacacacatatatatatctatctattttgatgtcttcatctcctttggcctcatgcaacattatcatcatgattaatactgtaattgacataataaatattatgccctcttctcttatatttttcttcaaaacagccatgattaattaattgcagagcttcagagattaatgatataatttataaacactaaataattgtatgatgaaaataagtttaatattgtattgaagacagagaaatgttagcttagtaataacccccttcatcaattaagttgtctatttatatagaattacaatagtaaatcaaacagaacatatatatgcttttgacaactaggctaagaatttgtcaaataacgtcaacaaatttatttattaatgatcgtcgatctcaacatgtctcaatattaatcaactttttgataattgtgtgagtatatttttgcaatgtaacaaactatgtttagttttattaaagggatagaattcgttatattggtataacttgtgaacaagtttctaataataaatagaatatcccaagacacctcacacgaaacaatatttaataattatgaatttgatattagaatatttttatttaaatatgtttaatattggtacaaaattatacaaatttattttactttatttcactgacagtttattgacggtaaattatcacaaatcaaaatgtgataagagtggacattttatttatggatgtatgatgacttatttaatttaagtatatacccagtattatttctcttaaatttgtaagtggtatatatttaaattagaatgaatttaatttcatttatcttcctataaaacctttagaaaattctacaacgcaccccttaaaatgaatatattgatgcctgttttagcatccaaaataaatttttagtcaaattttttctcatggtcacgtaggttatagttatttaagacacctgcaaaaattttaagaaatttagaaaagtttaacacgccgaaaactatgttcaaacattgtattgcacgcgtgactattttattttatacgcgtgtaaaatcgactgtttgaacattgttttctatattataaattattctgaatttctcaaaattttataagatatcttaaatagctataacgtacatgaatatgaaaaaaaaaatagactaatttttttttctaaatgccgaaataagttaagggtgcatcaatacatcccttttaagggcatgcattgtagaatcacccaaaaccttttattaagcattcaatatgttttttttctttttctaaattgtttttctctctcttctgtaagcattcaatatcattttaatttattggtcactttcattccaccaaagcagtaacctcctctctaagtagtagatttaaaaaatatatatatcacatttgtataatatattcataattttcttatactatattcataattatttctttaatattaaaaaataactcttttttctttttgttttttttttaaaataaaagtttttttggtttacaccggtaattatttgagctcaaaaattatatcaccacgacctactttacaaggagatcattttaacatatggg

SEQ ID NO: 224794 - DNA, 1491 bp, Cannabis indica
gttgataagttgggcatgccttaatttagaactctaatgaataaggatgcttgcttcagtaaatagaaagaactgtgtaaacatttatggcagtggaattatatgctctacctaaatattttactatgttatatataagtatgctttaaattatctgttaatatttatgccaagattttgaatgtcaaatgttcataggagggagagtttgtaagcatttctgtgaagaaattaaggaagcgacagatgcggaattttttcctttgcctcatggtttcccaagtaaggttcaaatctacttcgatattctgagtttgtgtcttcgaattccagcaggacttttagatgtctacattctcgcaactatagtttgaaagcaaaacataatattcttcccttttatttttggcgagcagggtgttccaatgatatacatgggcgatgaatatggtcacacaaaaggcggaaacaacaatacatattgccacgataattatgtgatcctcgaaactcttctgattctctttattctagatcaagttccaattgttaatggtgatttttactaggccgcagatcaattactttcggtgggataagaaggaagagacctcgtccgacttcttcagattttgttgccttgtgaccaaattccgacagtaattaattaaaacctctaaattacaagattgtacttttatatttgctttgtggttaacctttttccgtcttatgttaaatgctatgatcttgcagggaatgtgagtcacttggcttagatgactttccgacagcagagaggctgcagtggcatggccatgctcctggagtgccagactggtccgagacaagtcgctttgtggcctttagtctggtatgttctcttcttaaaacttataatgacattcactctctgaaaataatctttagttcgttttattattagctaattaggatttttattcttgacatgtaccaaattgtgtcttctaaactattcagactattaaactattgagattgttggattcaataatttcagtctaattctgttcaattttatagactgatgcctaatgtagtgattgtccatgtatcaagttgtgtcttctaaatttccgttcaagttaggcgcatgttactaatattgaacggtattgaacgaaaattcttaaatccaacaattttaatagttcagagtgaagtatcaacggtttgaaaagttcagaagtataatttggtacacgtcaaagtttgtgggaaaaaatcctaattagtcatttctaatttgctatgaaaaattgcaatttctaaatggaaactaaagccctttaagctcgaaaagtgaatggaagcaaaaatgcattgtgaattcaccagaacatggtcaaaacttaaatctgttggcttcttccgttttaactaacattatccttttgacttgacaacgatcgcagaaagactcggcgaaaagagaaatctatgttgcct

SEQ ID NO: 224795 - DNA, 5022 bp, Cannabis indica
ctctctctctctctctcctaatagaggacaggactgcttaatctgaactggttttggaattatcatactgctttcttgatcatgatgtttaccaactcataaatatttgtcttattgaacttctgttgcagcatcaagaatatgcttatatttttcttctaatttatccagtcaattatattttgcgtgttctttatctcttacatgtctagaaccttggtgttgaacccgatatggcatcatataacatccttttgaaggcatgctgtcttgctggaagagttgattgggctcaggacatctacaaggaagttcaacatttagaatcatctggattgttgaagttggatgttttcacgtacagcactattgtaaaggtatataatacatatatatatatatatatatataaatttatataaacacatgtttgcaagtgatatctgctggtgtaatgaaatcacaagcttctatgtttgtcataagtagttaacaaagcaccaccatcccaggttcttgcagatgcaaaactatggcaaatggctttaaaagtaaaagatgacatgctatcagctggtgtaactcctaatactgttacatggtcatcgttgatcagcgcctgtgcaaatgccggtcttgtggagaaggcaatccaattatttgaagagatgcttctggacggctgcgaacccaattcacagtgctgcaatatccttctacatgcgtgtgttgaggcttcacagtatgacagagcatttcgcctttttgaatcttggaagagaaatagagtccaggacatgcctgaagatgacaaagaaaatagagctagcaatgcaagttcaggaattactactgccaggtctcgatcatctcaattatacggtttaaactttgctaaagagctttcatttatgcccacagtcgcaacatacaatattttgatgaaggcttgtggatctgattactaccatgcgaaagcattgatggatgagatgaacacaatgggtctctctcctaatcaaataacttggtctatattgattgatatatgtggaagctcaggcaatatagagggtgctttgaaggtaatataaagattaaattttgtgcatctcaactcaaatatcctcttctgcatgttctttattactcttttctaattcctatatgttgggactggtagtttgaaaatagagataaaaattaaaaaaaataaataaaaaaataaaaaaaaaaaaagaaaaatcatcacatctaagagttcacatatgccttactatttatcacggttgagtttctttgccataaagttcgttatgatgattttacttatattttcaatgcagattttgagaaccatgcgtgaagctggaattgaacccgatgtagttgcatatacaacagttataaaggtttttaagccatctattataatagttgcagtgaatactagaggttaaatttccccttttactgatgcactatatgcctttttggtgcaggtttgcgtggaaaataaatatatgaaacaagcattttcgttgttcgctgaaatgaaaagatatcagatacagccaaatctggtgggaaccattttaaatgttttttttttcctttctcaacactgaaggtgacaaatcaataggaagaaattctgaatttaaacatcagtctgtttgtcttttaggtgacctataatacacttcttagggctcgtagcagatatggttcttcacttgaagttaagcagtgccttgtggtatatcaagatatgcggagagcagggtatgttgtcacgttgtgaatttgtgcataaagattttctttgtttcaccaattatgatcaattttaagtttaaatagttcaaatgattgggcatgtgatttgcccccacccgcaaacattgtgggagcaaccacaagacccttttggcttcctagccctccaatattgtaggattaggcatgaagcattgttgaaacttgaaaattatcttgaagtttaagctttctatcacaggtataggtccaatgatttttatctcaaacaactaatcgaggagtggtgtgaaggtgttatacaatgcgacaatcagaaccaggaagagtttagttcctccatgactgacacagagagacctcaaagtttactgcttgaaaaagttgctgaacatttgcaaaagaatattgctgaaagcctaacaattgatcttcaagggcttacaaaagtatgtgtggttttggtcagtgagctttgaagtcatagcattaaaaaaaaatgtcaaaaggtgtctatgattgacctcctccgaaatttattatttgtgtcctcacttgtgccatacaaaaaccaaccgcagttacaacaccatcacaagtacataatataattttgaaatcatagttggcacatatcatgaaatggagctgttgattattaatgtcaaggcttatgagaaatttgttgtatggcaggttgaagctcgtattgttgttcttgcagttctccaagtggtcaaagagaaatactccaggggtatgaaactatgaatgtaaatgtaataattgaacatgatgttgctactaccttgtattttcataaagctgacgtaaaaaatatgtttggttacaggacacataataagcgatgacatgcttatcaccttaggaatcggtaaggtcgatacgattccagatgaactagaactgggggtgaaagatgcaataactaaacttctacaagacgaattggggcttgaggttctttcaaaaggtcttgaaatcgcatctaatacacaaatgtatttagagagtaccaaccactcaacctcaaattcggagtacttgggaagtaatgaattacccactgagagaagacctgtggtgatgcagagattaatggtcacaagaaaatcactgagacaatggctatataaaagaagctccctaagaagatgatgtattttacttttaatgtatgaatatttgtactcactattaattactacatcaatttataatgtatcatatggtagtccatttgaactatctaatgtaaatgaaagaataaaaaagcaataaaattgatactcgattaaatgttaatcttacactgactcagtcttttaataaacaaacaaacaataagcaatagaaaaaaactctaggattttggtaggttattccttaattaaaacaaagacacatgaaaagttctacattgtcattgtttaagattgtcattgttaagacaacatgaaagtacccaacatggaggtggctcaaatggtcaggcagatagattgctcccacagagtctaagattgagttctggtacttacatagcaattgatataattttgtgggatccatcaatccaacaccaccacacaagtgaaagctttattcatagccaatcttgctgctgtaacttcaatggcaggtaaacctcagacaagtactggaaaccaaacgtgctgagagcctgaatttctgccttctgcttagtcttcaccatcaaagtcagctcctcaacccagccgggattcttcttcacaaaatcctcctccaacaaatccttcccagtcttaatatcctgctcagtcatcggcagcctgcattgctccggtatcttatacttgtccaaatcgctaggcctaatccccaaccacttaatatccggtgtggtcaaattcgcactgtcataagacatgttcttggagccacacccataaactgacaatatcttcaaaccatatggatcactatccacaagagcaagcacaggtagcttcaactccatcttcatcttcctcaagaagagccttgtcgccacatcaggttgccctttcgcagtcacaatgatacatggaaaccgattataaaacctatcctcagccaatctaatgtaagcagcatccttctcaaccaagagaatgaacaatgcatcactctgcatatccccaactctgtctatattcggcggaatcgctttcccgcccatacccattttagtacagtcgatcatatctccattgtcactgaaaatgagccgacccaccaccacacctttctccgcagcgatcacgttgagactagaccgagtacagcccaacatacaactcacatcgtcgagaaccgagtcggactgagtctggtccgtaaacagctttacatcggtgtagaacaaatctctctttgtgacatggatgctcttgaggcagagctggtgaatgagctgaagaatccgagcagtaatggtggctttccgtacggtggagatgctggcgtagggacgaagcgaggttttgtctcttaaaacgattcgatcgagctccgggacatagagctggttcgcggcggaccgagaggggacgtcgaaggcgaagccgttgccggagaggatggagtgggcgatctttagggttagggattcgatggtggactggacggaggatagagagaggtcggcgacttcgcggcaggactcggagagagctaggtcggcgagggttagggctttggatgaggaggatgaggcttctgtggctgcgcggactgaatcggtgagtttctgaaggatttggaggatgactgggtcgggtttgatttggttcttgaagggttggtggctttcatcgtcagaactcgggtcaggccgtcggcgcttcttcttgtccgccatttcagtatcagtagagagagagtgtgtgagtaggcgggaagaaaatgaagcaagaaaattggagccaaggaaaggtctttattttatggtaactgatgattaggaaaacaccatcttttctcagagaatcaaaaaataccatctgtttgctgtaatttagtgaaataccaaaacattttaatctatgtttaaaagattctaatgaaattaatattatattttttttttagtttagcgtaatcaactatttactaataataaccctaaattacatgaaatatgaaaaaaatttagaaaaattatagtaaatcttaaatcataagattatgttagtaaat

SEQ ID NO: 224796 - DNA, 2506 bp, Cannabis indica
attttagttttgtttataaacattttcctattagtgacgtcctggattgcagtcaagtaaatttttgtgagctgaacatgatgttcaggactatacgaaataattcattaaagaaactgaggaaatatttttttagcactcgattgagatttgccagttgaaaaggatttaagctctaatataatacctttttttccctcctttttcattaatcgttttcctttgagcgtcatcctaacttatattatatcttaattttcataaaaaagattataatacagcaaaaattgcttcagtattagacaataacaattgtttttaatgctttacacagatggagggcatccatttccatatggccaatcggttaacagagaatgattagaggaaattcaagtgttgaaaagtgaaaacaatagtttgaacccgagactgaaatctgggaaagggcgagtagcgttgaagttgtttttggaaaattagcagggaatagataagaaattgtttataagcagcattcgactggaagtagtgatgaattaatgatgttgctaaggttatgtctattttgttccttttagctttgtagatatcatctctgatgtaatttggtgaaatcccaaattttcaattgagggctaaagatttagaagattcagtagggacttcctttttctatcaatatgtctattttaagcattttcattggcttattttgacaaaagactaattaaattgtggatgtcactttactgaaccagaaggaaatatgagaaataaaataagaaatagaattagcagataagtcagcctcaggatgactgtttcgtgtagtttacatttcttttatttgttttaaatatttttactacgtatatcctagggttcgtatttatgaataaaaaaattattttgaagggttattgggtgctaaattcaaaatttttacacgtcataactaaatctctagttttgttatgtatatgctatttttgtaatttgcaagtctttttttttttttcctcttttttgaaggaaaattgcattttattaaatttactggtagagaagaactcagaaattgagggcaagtatctatttatacacgtttttctaaactagttcagaggttgtttagtatggacagtgatatttgcagatcacaaaataacattacaaaaactactaccaactagtaaaaaatgaatgtctaaaagaatagaataaaaatagaaaaaaaaaaaaatgagatggtgaacctaaattgatgtgtaaaagttaaacttattttaatatcaagtagttctgccacattaactagaaaattgtcccaatacactgcccaggacatccaaaccacccctgctccgtcctggatcacccacccaacccaacaaatcctcgcccaacaaccactggagcatcggtcgtaagagcaaaggagtcggaatgtggtggtctctatcgtgtaggttgttggccgaccatgtttggagacgaagaccccaataagagtccccactgagtgtgctccttgaattctttatagcaaagtcgtgctctttgaattcagacaggtggttttgtgctagctctggaacaacttctattcgcgattgcatatcaccaaaaaacactgagtttctatcataccaatgttaagggtttatgccctgaaaagcctgcaaagatatttctgtttatgaatatgtttatcgagatttttgaaaaaataaattatttaatataagaactaagaaaatataatcggtagaaacaaaccaaaagagaacactcagagtttttacatggttgagacgttaaagagccttagcccacgagtcagttttattatctgttgggctagaaaagccgaaaggattacaatgagtatattttctctattctcttctcaagcttgtgagctaagatttctaaccctttgcatgaaggagttgttgtgtatttataaagtaatagaggttatatttagttaccattttctctctaatgaggtgtttacaaataatacagtacattggacttattctaaaaagcctagcccatggatagtaataacttattagaattatgaggataagataagaaattttgtggtctttatgaattgtttttatggtatctctagtgattacttaatcttaagcaagtattttacattaatattaatactagaatgctatgttgatgagttagtctagaaggaacttaacgtttccagacaaagataaaatgtcacaactagatgtccctaagtatcaatagtaagagattaaatgcacatttatgtatgcattaaactagactcctactgttgagtgggagctatctaagatgtaatcaaacaaggaatattgggaggcaatcaagaaagaatctctaaaagtgacttatatgttagatgataggggtgtatattagaatccttatatctacactaagtcagaacatattattagagaaggtggttgttggaaattatttt

SEQ ID NO: 224797 - DNA, 2055 bp, Cannabis indica
acacattgaaatataaaactaaaaatgaaaaaactctcactatataaaacatccatgaacactaactaaaactctctcaaaatctaaagatttacctcttgtagctaaggttttgggtagggttttaatggatcttttgggttgatctttctatgattttacctatgccccaagcttggtatttttctatcaaagataatgtaacaactcagaatacataagagaaaatgatgattagggtttcagccctatagatgaaaaggagaagaagaagacaacatagtcttacctcttcttaaatcttatagtaatgagcttggaaccacgaggagacctccaatggagctttttccttctagtgagaggtattgaacaaaataaatacaagaactgagtgatgatagagaatcatggttggaaaaagaaaggaaacataatagaaaattacatataacttaccctagaattcccttgatcatgttagcttatggaagcttcaatggagctttctttgaagagggatcaagagagagcttctttgactttcttggagattaatttctaaattttgaaaaaatgaagagtgaggagagagaggggggttcgggtggcctaagagagggagtgagaaagagaggtgtaggtaattatgagttaggaccatgcatgaagaggaaaataagatgaggaagtcatgcatggcttctaaattctatcattattgaaatggaccaatgagaaaccactcctatcaccggcccaaccatgagggttttaatttccctcttaaaattagataattggatatttttgccaaaaaaattagatataagtgcataaaaactcaaaaatattaactagtacttaatagcaatactatatataaaattatttaaaattagtaaaatgggaccagattttcattgaaaaggtgagatcccagatagttggacacaaaaatataaatacttggctctttgaaagtaaataataaattaatttaaaatagtgactatcatataatgtttttcttaaaatttttaaattactttaaattaatttatatttttttattgattatgtgatctgtattttttaagaagagacacgtgacgtaaagtggaagataatcacccaattaattatcgtataagcctttccgattgtagaaggacaactgagacatggaatgggtccaggcccaatgaaaactcaaggccctaccttgagacacaatttcttccaggacctggaagccttctcagccttctcagccttctgggactcaaatgagacaaagccctctaagcttacaagaagaataatgtcagatgcctatcgtgaagtggaaattggatatctcccctgacgtgtttgcctttctgacacaggatcagatattgtcccttgtgtcagaccatagtagtgcgtgcacctatactacatacacccattttgttcgatgactcctctgactactttgtctgtcaggcgtgatttccacatgacaagtgtctagtgctagagtggtctcagttgtacggaagcttcgtcccacgagagaatctcttctaatgggcagaacagtcttgtctattgtgtattttgccctaatagtgggcatgcttctacataaaacccgaacgagtcatgagtatgccaggacccaaactctaccctatataaacccccttaccactttatgcaaaggggatgaaaaccctaatcgaaactctactaaattcctttcaaaactttcttctttttcaagggaaaacctagagagattgtcgtacagccagggttagggttttcattgtaaaacttacttgtaatacatttccaaagcctaaaaggccaatatactgagtagataaggataattaacgtctgatccacgtaaatcctacatcacatttacttaatcgttatttaatttcttaagctttcatttatttagtttctgaaaatctcggtaaacaaattaaaatatatgttttgtaattttttacattttaaaatcaatataaacgggtttttttttttaaaaaaaaa

SEQ ID NO: 224798 - DNA, 3334 bp, Cannabis indica
aagtctatacaggaaagcttcaaaccatcatatttaattctgagaggtcatccattggaatttcaaggccgcccataaagtcatgatcttgtaaaccatcatcatcaatgttcaaccatgtacccaaatcctgcccttgaccatcaagatcatcaggtacacccagtacatccattcctggtatttgaaggtgagacaagtcaagaggctcatgttcatccaatacatctaagccaaagtcattcttttccttggcattgttggtcctagtcatttcgtttgaccttgacatagaaggcattgctgatttgacttgctcagatgtcctgccaaggaggccatttactgaaacagatagctgagtcattttctgcttaggctttgttttagattttctttcacccttagcattcgataaaggacgccctattttggcatttccatttctagataacacctctctattgtgcccttttccatctctatccctctcactcctttttcctttagcactgcttgatagagatgttcccatgcctggagtaatcgaagtgccaattgtatttccaagatcatctagtgataattcccgctttttcaccctgtttgaccacatatcttctttccctatagtttgttcagataagtgatttacatctgaagaaatatcgtggttatcaacattctgattgaactgtgacgggctctgatgtgaacccatggaagctgcagaagagataggggcacacaccccaaaaacaatttaagaacaaagagaaaactctccataattggccaccaatttctcataaaaagcaaaaattggacacgtgtaagataaacgagtgcatcacatgtcccacatattttttaaataacaaaattacctgaaactctgccttccaaatgccggatggaagcatatcctttgcttgattcaccctctgttgcagaatcagcttgtcgagcataattgatgttagaccccgaaagaaagatatccttaaataagggttcactaaagcagctctttcctgtctcttcatacttatgacattgttctaatgtcctcttaacaaatgctaaagcagcttgcttggccattttattacttgaactcttcccactagtattcggaccccaacaagcctaacacacaaaaaattttaagaatccaatgccatctaaggaatcaagggtaaaggataaagtacaaggtcactcaacacttgaaagaaaacaagtaatattaagtcacgataacttacttctagttgtagcttaaaatgattttacacgtttcaaactcaatgttttataataacaaaaataaggttatgataattaggaatttaagatttatcctatcaatatctgtgatattaaatttaatctctcatttttataatccattagtctactttattttctaactaacttgtcggtctccaaataagattaacaatgttaagcagtaagcactcttgtgttgatttataaactcaattattcatcagaacatctctgttgtttttctactttctttcccctgtttgtcttgcatgattgacaaactctctttctttaatctccatggttttccattgcaccaaatttgctatcatcctaaatccataactttccctttcctaattcaataacagaccctttatttgcagattacttgagtattatttacatactagaagcctcaaattgttaacacacttgtgtaaagtcaatacaaattccagcaaacaaaaaaaatgtaaaaaatatttgacaccgagtcccacagagaatacagtattaagactagtaagacaaaataaagcagtgcttcgagaaataccgtatacttttcataggccattgtgacaagtttctcaagagcgcattgttcaaactccctacaaaatagaataataaattatataatataatgtaaatagaaatattagttgatgttatggtataagaagcatttaaataagaaaataaggagatatttattacttctcttgatggtcttttgttattgaggcagacttcaacagcgaatccatcaagtctttccttttaagggcctgttgaatcagcaaacgtacacaacatcaactaacataatttgtattgactttacagccatgaaagataatcattcagtagaatgtttcagtgcagccatgaaaggacaagaatgcatttaaaatataaaaaaaaaataatcttttggaaatacctgttcatgatcttctcctcaaatttacttatctcctgactgatttcttcatcacttatatgtgatatgccaggctaacaaaacataaaaaaaaaaattaatagaaatggatgatacacaaagagaaaaaagaaaaaaagtgagattgaagcatataataaaaaccatcctctatagtcaatcaaaacacgtctgatgaccttctaagaaacaaaaaagtataaatgtaactgaaaaaagtctcccaagggttacaaatgatgaatttgaagaagctgacgtgaactatgccaccaaggaaccaatcaaatacttgcaaatggaacagttgtagagaaaagaagaaaatgcgaaacaggtttaacaagaattcttgtaaaatattgacctacccctgattctggaaaaattccaatgctttgaatctccaagaggagtttctcattcaaaggcataattccatattgaaattctgagcagggtctgttagctatcatcgcttggtcaggtagtaagccatttaatgaatgactcaagttcgagttcattgtcttgtgtggaatgtcagccatatcagtttccagctcattgtgttctgattgcacatttatcctataaccattaaatgcagccttcccagcaaactgaaagttaagtaatgattggtgatccaaactatttgatcctaactctccatccagatcaagttcaggttgatattcatcaactttcagatcttcattgccagtgctataatcctcctctgaaatcagtgcggctatgagtctttgacaaaggggaatttcagtatgatctcctgttcctgatattaattgttctgaaaggaattcatcattccttgattcagattcagttaacccaaatccattaggcacattattgcaagcatctacgcttgagggagcttgggtagcagtctgtgcagttgattcaatgtttccctgatagacataaggaaaaaaaaatttacaggggccttcctaatccttgaaattcacacacaatagctaacaatctttaacatatatgacaaaaggtatcaatagaaaaaaattcaaattggtagggata

SEQ ID NO: 224799 - DNA, 4110 bp, Cannabis indica
ctctctctctctctctctccgttaggttggctcaggctctgccgtagaaggccgccggcgactccactcctttcttcttcgccaccaaccattccaatttccaagtaagtaaccttatccaatccattgctaatcctctttaataatttctgctattacatcatgttacttgtagtttcctgtatatgcatgttacttgtagaggattgggtttcctttgtataaacatgataatttagttcttttgagttattcgatttgtgtcaagaacttatgaattgtatcacaaatgttgcttcagggtgcagtttgtttttcattctgattagttatggggagcagtccagcaccattttcggatattgggaaaagagcaagaggtaactcctatgtctaaagtttattataaacttattttactatccttataagttgaaattcaatcttaccagttgctttaaatgatgtttttgtttgctgtatgtagtattcggattgatgacttgagaacctatatgtttgatgttttcttttgtagtacagtgttttagaatgttcaagttgaatgatcgttgatagtttgttatttaaacatatgagaaccaaaatagaatctaatttagaagaggtgaaactgttgggcattctatgttgtcaatctcaataatgcaaagagaaattttaagaaaacttagtaaattgaggcatttaatctgtagtctgtttttctgaaggccatattgatacttagaaatctctacttgttgcaacacttgtgtaatgcagaggcctcctcctaagttgtaagcggtcttgcaggttttcacttttaaattttgattgcttggtttttaaccgtgtgcagacctgttgaccaaggattacaactttgatcagaagttctctttgtcagtgattggatcatcaggactggtattatctactttttctttttgagctatgttcttgggacaacattagttttcagagttatcacaaatgcattgtttgcaaactcttttagggcacgtgctaaacttggtttagagtttagaatagtgagattgaacatatcgaagaaaacagtgtcgtctgactattttaaatgtcatttcaaagttcaaaactttaaataatttatctgttgcccttcaaaaacaatgccaactctatcatttaaatatttgcggggctcttttggtatgcagagatttatcttttcaaaaaaaacaaaaaaagctgtaaaattagattcaaaacaaagacaatatcaattaatttcaatacaagagcaggaaaacagttggtgagtattgggccacagatgtaaataatttttctataaatccgaagtaaaagaatttctaatgtttttctgtatagtttctctctccctattgctgttccttcatgcatagttatgttcttaattgtgaatctttcattgtagggacttacagctacaggtttgaaaagggaccaaattttcatcggtgatctaaacaccttgtacaagagcggaaacactactgtggatgtgaagatcgatacctactctaatgtaagaacacaaaatctttggacaactctggaattactactgtggatgtgaaaattgatatcttctttaatgtaagaaataaaaaatttatctttggacaactcttgccttttcaaatgtcctttaactatataacattgtgttctcatactccatattatttgtagttttcatttcaaaagcaaaaatcttcaccttatgcttggtacctttgatgttgatatatagttggttattgtattcattttcccaagttgactcttttttgtaggtgatcacaaaagtgacagtgagtgatgtcttgccgaataccaaaacagcaatcagctttaaaataccagacaacaaatccggcaaggttagttgttgaaacttactgatctacttaaggttacttttaaaatcatgtattaattttgcaataagaattcatacacccattttgtccgaacactttaagacacttcaaatcaaataatatttactgtgttagtcactttaagtgaaacatctattgttgaaggggatgtgtggatcacagaattgttgcaccaaagttcacacatcaatcgtatgtcaccaaacatctacctcatgtttgtattaagcattgtagtagtactttcctttgagatgagtgtatatgatattatgtatttacatatattgactttcattctgtgtacaactgtagctagatgttcactacctacatcctcatgctgccattgattccagtattggtcttaatccaaatcctctcttggagatatcaactgctattggatcgaaagagctgagtttgggtggtgaagttggatttgacaccgcttctgcttcattcaccaagtacaatgctgggatcagtttgaaccagcctgattttactgctgctattttattgtaagtattgatgatactgcatttcttattttgaagaaactaatcactatagaccacaaaacaaagccaagatttagcaatgacatgcaaataattatctatgaaaaccagtataacaagtaaattaaccaggaaagttgtaacaacttgtcattgttagtttttcaagtttgaaaacaacaatttttgtattttggttactaagttctagagtgtgagttcaaacccttctcaatgttgaaattagtattgaaagaccattgtggaagtatatccttgaatcctattccatagaaatcataagatgtttttccagggatggtgaagttcattcaattctttatgcctattttatagtctaatcctatgtacttgaaataaaatcgataatgagcatatttcatagctttatttgtttttgttagaactcgaatggtttttagtgtatgattgagtttacccggatgcaggacggacaaaggacaggcactgaaagcatcatacattcattatgtcaattccaccagcggaacaacaattgctgctgagttgatccataggttttccagctatcagaacaatttcaccataggaagctctcacgcacttgatcctttcaccgtggtaaaagcgcgattctcggacaatgggaaagctgccatggtatgtcaacatgaatggagaccacgatcgataattactgtctcagctgagtttgattcgaaggctaataactcatccccgaagctaggtcttgctcttgctttaaagccttgatttgggaaaaactttttttttggtcacattttgcaacatagccattattttttttttcatccataattttaagcttcactttgattgataaaatgggaagctgagaagttggttattgattaaatgttgtatttggtggggtaattggacccatttttgaaaaaattcattgaaaatgaaaataggacattttttttgttgccaaacattgatgattatcatttggtattttatattattatttaatagacagtttttaactgaggttgattagtttcttttaagtctcaaatataaagagaataaaagtcatacaaggaaatatagacattattatgatacgttttacatgacaatttatttttattttacttaaaagaaagaaagaaaaaagttctaaacaagttaaagtaaaaaataaggtattcattgtatttttttgcaaaagttattaattgaattttttgttctattaaatgacatgatagattttatatttttttaaaataggaaaaatatgttcttgagctcaattttcaataatattttttttaatataacaaactggaaaataattcttaacatagacaaatgcagaaaatataatcagatttgtcataacacttataaatcgaattattattttgacaaaaaattcaactcagagtctaaattaacattgacactgacacatctgtatgaattattagtgcaataacatgtataactgatggtaccagaatactagatagttatattttcacatttaaatatatatatatatataaataaattatgtaggtaggtatgaatctgattttgaatattggttatattgtatttgagaattgagttttatggtttttttt

SEQ ID NO: 224800 - DNA, 2929 bp, Cannabis indica
tttaagagcactaaaaggaattacagcttataaaaatattttattatatatctacccaaattaagagtagtatgaaacttctcatgtcctggtggatggaagaattatataagtacaaatttaaatgataattataaattattaaggttattagctggcgaggcatgcagttgggttgtgaattccaagtatcctgggtttgatatttttacattgagatgtaatatgaccttgttttccattatatctaagatcaatattaacaacttcaacattttggcatggaaaaccactactgcaaataaagtttatagcatttgttgttgcagaagtaccacgaatatccttaaagctcacatcttttatttgaacttttgatggaacctaagagcaaaaacaataataatcaagttagttatgattagcttaatgattattagtactattaattataaaaataatactatatatattattagtactttcacataccgctttgttgcattgattccaaggacaatattcttggtcaatataaatagggttgcccacattttccatgataatatcctcaaaatggatattagaagctaatccaacaaatgaatttggccatgttttgattcttaatccattcattgtatttattaatgtacaatttctaacaaacactccttctacaggctgttcattcatatattttccaaggcttccaacactgataccatggccaggtccacatgtaacctttgtaatagttatttttttacttccatcaccaagagaaatacaatcatctcccgtttgaatatttacatctgttatgtttatcataaatgatcgcccaatatggattccatctgtgttaggactattaccatttgcaattacatgaacatgtaaaaaggtaacattttggcaacccaacacattcatgtgaaattgtttgctatccaatgatgttatatcttgaattaaggaattggtgatgtagtcgaatcttatattctgtttcaataaattataattataagatggcaacaataatttatccaataatagaaaataatttattatgattagaagaattaccatgggatatttactacaatatttgccttgtccacattgtttgccccaaactgatttaccttgtccatcaaaagtaccacctcccattaaggttaggtcattgatatgttcaaatataacccaaccatcttcatccttgaaaccagttagatcatttaaggccctcagtgttccttgaagttgaacctttattggagccttacatggtccttgtaatatagctcgttttaaatagaataccccacttggaataaataatacactttgagttggtgctgcacaagcacttttccatgcagttgagagagcctaaaatatttatgaaaaaatactcataaaaatttataactacaccatccaataaacataattatatttatataaattaaaaaattctacagctagctagctaccatggtatatcttttccatagcatataccatactaaaacacaatattctttaatgaaagaataatttaagattatttacacattgtctttttgctcatgtaaagcaaagtatatacatgttacctgacttatgtccgtgttaggttttgcaccatatgttcttacgtcaaaaagtgaagatttggctccaagaatgaaacctaaaattaaagacaaatatgttactgttatgtgaaatttcaaagccatcaatcttgttctttactctgtaaactttttgtatgttaataaagtggaattttttcttcttcttattagttttggtgaatcaattcatcaatatatatataataaaatataactgaaatttaccaacaacaatgttaactaattattaacaaaatagtagtgaaacaataaaaaacaaaatattactaaattgtatatgacttgttattttcttaagaaaaataaaaacaattttcttatataattcaacattagataatgataaaaaattagtatgcatgaattttatctagattatttactttatataactacataaccatatatcataattattatgttttttttatacaaaataatacatacatatttaattctttttttaacttatcttttatgtataactagtagaatatttaagtatgtaatatattttaatttttacatttataattttcgaaaatcacacatttttagatatcaatatgaaaattttcttgtaatacatacataaattttctcgaaaaataataaagatgcaagctaaactatcagcatatatacacacgtatatattgtttgtaatttattttttaccatataatacatacaatcttttattaagatatacaattatacacataactattttatttattttaagcgaacttagcatgcaataaaattttaattgttaatctgttaattttagtagagattacctcattgaggtcaatattgttatattatcaatattgttacaataatagagctataaaacaaatttttatgataaatatgagattcgttcttaactaataataacaagttcttaaccacctaatttctcaatattttttcaatcaatatattataggcacatgtcttagtaagtatatatgttaaaggtaagttgagatatattttagtgtgtgtcatatgtttaaccttcttttcaagtgaatatttgtatttgtcttctttggtctatcaaatgaaaaactaaatgaataatttttaattttattttggcttgaaattattaattattatttatgcatgtattgtaatgccctaatatatagggacgccacatgtgtgattttacaaactagtttaatactaatagattaattaattattaaaaaccgtgataatattaaaaacttgattaa

SEQ ID NO: 224801 - DNA, 8386 bp, Cannabis indica
gagggtatttagttttttttaatttttattttattaaaatttattttttttaatttttacaaattttttatttttttttatttatgatgtttaaaataattatttttttatttttttaaatatttatttatgtggacaaatcaaattgtgccacgtgtacactgtgtacacgtggacattccaccatggcagttaacagccaaaaatggatggaaagggttaactgctaacagaacttgggtttaggaaattttaccaccaaaattttagaatttggggttagttgcaaaaacctggccacttaaggaggttatgccgcaaataactcatattcttccatgaggactaaggtatttgtaacctttgtggacatcactatatccaagtatcacacattttatagaatgaaactagaatttgtgactttgatatggacgaataaagggaaaacaatatcagccaaaggttttcaaaaaagtataaattggtattttggagtaaagggtctcaaagggtgatttaccttttaggacatttatgggaagcctattaattagatgtcttgcagtctaaaatgcatcagaccagtacttaatgggcatttgagcttgagctagcagtgtgaggcccgtttccataatatatctgtgtttgcgctcaacacatccattttgttcgatgtgtaagggaaagagtgattaaagagtatgacatagttagtgccaagtggggtaaaggcttggtactctccaccccaatcagtcctaagttatttgatttttcttttaaattaattttcagctagccttttaaattgtataaaggttgcaagggcatcagacttttgttttagtggaaatagccaagtgtactgaatatagttatctaataagtggatgtaatatctaaaattagtgtgagaagttattggtgcacggtccatagatttctatgtacaacatttaagacatgactatcttgattatttgaaagtttaaaaggcagtaagtgagatttttcaaactggtaggcatcacaaaaatgcaactcttcattaacagaatgttttacattagataacttgaggacttgatttaatacattgttagagggatgacctaggcgtctataccaggtatcttttaggagaactgaaacaagattactaaactataaattagattgagttgcaactatagagaaaggtgtgttagtggttccgaatgtgttggtttctggtctaagtcaatagagtctatttttatgtgttccttacaataccaccttcccggtttgctggtccttcacaaaaaaaatcaagaaataattcaatggagacattattaccatgagttaatttagacacactgataagaattttagtaatattaggcacatggagtaaattatttaaaatcaaaggtttttgtttttggtgtaggtaaaataccattaccaatgtgcttaaacaataacttactaccatcaccaatcaccattttctctttaccaccatattctgtcatgttgctcatcttatcagtctctgtagtaaggtggtttgtagccccactatctgcataccagttatcatcttgcagagtttgtagtgaggcaatcaaggcagtcatctagtttcgcttgtcctgttttggatttcgttcattttgaggtggatgtcccatgaatgtttcatcatatcggttatagcaaactgttacattgtgaccatatttgccacacacttggtaggtaggtctagacccacctcctctgccgcttcttcctttgccttgataattattgcctccacttcttcctccatgtggtggatagtttccatgagacgagtggcctccttgaggagagtagtttcttccagctccattgttgcctccattttgattgtgaaaaccacctttggcaccaggattaaattgtttttgagtaagatcagctgaagggttgagtagcttacttgagggagacaaagctccaggttgctcgagtatgctatcaaaattgacgaagtgtgccttgcagcttctgccatgacacttattcctgagattcaaggggaatcacaatggacatgtactctatgtctaggtctgagagaacatttcctctgagtagtttttctgggtatggtttccctgcaatagccaaagtgtcagcccgaactcttttctcttcgaggtaatctgtcatcgatctgaagcctttcctcactgtttgaagctttgttctgagatcatccatgttggctcttgaatgagctccatataagtcttctagggctgtccataggacgacagcagtttggcaacccatgacctctgatgcaataccttcagtcatggagccatatagtcaactcattaggagttggtcatgagaaatccaggtctcatactctggatttttttgtagatctgagtatatctctctcttttcattggtagcttcgacttgtataaactcatgtggatatatcttgggttcattgaggtagccttctagtttatggccacaaataatagtgaacaccatagttttccacagtgggaagttgttttaatccaatttaagagaaaagggctcactcaacgtgttgctgaagggagtcactaagggagtaagaataacatccattgaagagcttgctggtggaccttttgaaccagctcttgctggtgaagcttgagcagtctgattttgtttagtcgacattggcgttggccgataatggctctgataccaagttaatttttagagaaaatgatcttgataaaactctgctcactagagtaaggttggttaacttcttatttatagcaaaggatcaatacatgaaagaaaaacagaaccactagaaggcttacacgtggcaaaactaacaaaaaagaatattgcctaaaaagtaaagaaaaagataaaacaaatcataacaaattgcagcagaaagattcttttaggattgcctcatccattaattgcctcagtgcattcttatcattagcacaattattattagtgtaatcattatatggcttgatttatttttttaactgttagtcactacttcttttttttttaatagatctttacttttcaatgatttgagatctattttaaatgataaagtaagtaatattatccaattttcttggggaattcttaatttatgtttgttgtactactaagaaattagcttataaataattgtgtgtactcttataatgaataatcacattgtctaattagaagaatcttctctatatattcaagatatactatacactcacaatttttaataaatttacttttttatttattcttttttttagaaaaaacaacctcattaataacccttccacactaataaaatgattctaaatggtggatccaaagagatttgttatttgcaattcatttcgtacaaataccaaataagaggattttaccaatcctagcattacttcattccttccccattttctcatttctctctcatatcttcataaaatattcaattttttacatgagattttttccttacacgttcttatcatttgtgatttttcattctaaaattagaatgaagaatatgagaaataaaaattgttcttgcaaattaaaaaaaaacatatacgatattggtagtagaattaatttgttattttttttcgagtaatatctttgtcattattattggtattttatatttatgaattagctaacaaattataaaaaatgtgatttaacttccaattataaataattacttaagtttaatttttgacgataataataactaaggcaatttttactaatataccaaattaacaaattaatattacacttaccgaataaaacaaaaatacattatatatgtatatttctatcgaaatttactaaaaatatttctaccgaaccagaaaaaatgggatcaaccctcatgcatattgtactgtcgaaccaagccatttgagaacaaaaaagtcaaaaagaaaccttcgactattcaaacctccacaacctgcgccatcgaagctctgcaaaaatatcgatcgaatctgcaaataaaaatcaccattaaagctcgacaaaagttttgatcaacaaaaatcaaaacaaactctacagttgctaatcaaaggtgccgagataactcatcattgaagctactcaaagccttcgatcaaaaacgtcgattgtgagattcaaaataattaccgaaaatagaaaaaaaaaaaaattaaaaaaatctcgcttcgagaaatttcagtgttatgcaagtttcaaaaaaagcaaccttttagtttcttttgatgtaaatatatattcaattagttactttttattaaaaaaatatttcaagataagttttttctcttacatatttagttgcttattttaattagttaactttaaaaatatgattttattttgttattttttaggctatattatgttattttattatttaagataccttgaggcttctttttagcaattttaaactatattttgaattgtgggaaacatatatatattttttccaagataaaaaatataaaagtaacttttcttttttttttcataaattattaacaaagaagtaactaaattttaaatttgaacaaaactagtatgccaactaattttaagggttattacaataaaatattataatattttatatataaataataaaataactattttaatatgtgataaatatatattttttagaaagaaaaaaaataccatttggatactttatatatataaaaaaaacatattaaaatagctttactaaatagatttcttcaaagtatgtcttttagtgacttttaaatatgaaataacaaaaactagtgtaatgtatgatgttggttgtcgtattgaattataagatattacgtggtttctttataagttattttagaaatttaataaaattgttataaaattagcttaggtataatataatctagaaaattttttaaatatgaaatatcaaactattttttagtaactaataaaattgattgacatattaaattttgttaactaaatagaaaagaaatttaaaagtcactttttatttcggttatattttttggtaccagtgaaaatatatatatttttcacatgtcaaaataattaccttgaaaaaaaaatagattgtaaaagtataattcttgagctcaggtgataaatagtgcggccaaatttttctttaaacctttgaagaaaaaaaaataaaaaaaaaaagaaagtgaatcctcttaaagaaagagagagagaaagagagaggattacatctaaatttattaaagaaaacaaaaactgaagagaaagtaaaatatgcctaaaagaattaaagggaatggctaataataataaacgtgattgaatagtaagaagctgggcgtttaatatcggtacacgtttcaaaactattaactgcattttcatgaataaaatttgcagcggtaagtatataaataatttaataattaggttgtgcagtgtaattttctctaatatctaagttataattctagaacttctgaaggtacgcagctgttaaatgttaagtaaattatcacgtgacaattcctaattagtttaagtcatttaatttttattatttaaaaaaatagtttaaatataccaataaaaaaatgacacgtagatataatgacttaacatttaatagttaggtaattatagaattttagaaatataacttaattaattatttatttgacaattgagagttaaatttatatatttatgccgcaaatttctcttaaatatatataaaatgtttttggtcatgtttgaaatctaaaaccaaataatgattttttttctttgactatcacaagaattgttgtaatttttatgaaagaacaaatctaaacagcttgtaatcagctttaattgcataattctgtccaagaagatcaaaagggcaattttacatctataaaaaagcttatgatcaaagtcaaagacttttacattgcatcttatattcattgtataaaataaagttttattatgtttttgtgaggctctttgagtgtgtttgctgtagagtcttttcattcttaggaaaagtgtattttctaagaaatttgagatgtgagtgagctatcttcaagaggaagatcattatttaattgggaaaagaaaaatctaatatatatgctttgaaatgagttcaatggtgaagaatcaacaagtcaaagggatctcataatagtatttttcaggaaaaagattgtgacatttttggaacaaagtgaatttcaatatgaaatatatatgattttaaaatatgattgtgacatttgtggatgacatattgcatcaacataacttaaaatttattatttttaatacacattaattaaatataactgtaaaataattttaattaataaatattatttttaaaaattaaaatactaaatataattttacataatttatcaaaattaaagttcgtaatacacataatatgacatataaaactaaatataaattaaaaggtaataaatgaaaaataaaaattaaaaatggatatagaatgtaattttttcaaaaataaaaaacaaaatttaagtccttttttactaggtaaagaccaactcatgttgaaaatacttttgtgtgttattctattttttttttttgtaacagcaattatgtacatattagatcaccttgaaaaaaaataactattgaataattaatctattttttcttaaaaaaaaatcaatatgttcaaggacttcatatttttgttccaattaagggatttaacataattgtcttgtccttgaaaatataaattacctatgttttatctaagttaagaaagtcattaattatatcgacttatataaattttcaaaataataatcattttaattttatacagaaacaagtatgtgtcctcctaactcctaagcttcaattttttttagcaatattaatattattattattattattattattatgaggaaaaagcttcaaattggcgtaccttgccttctacaaagtacatttcacaattttttattcccttttaggtttcgaatggataacatttgtcccttttttttttggataaataaaatttaccttattcttatatagaagtaaataatgagtatgaagctatgaatcattactctgtagtctctgttgtgatgaattaaattatatttatttttagtagatgaagaaaagaaaaaaagaaaaagaaaaagaagaaatccctttttttaaatatttttaaaataattaaataataataataataaaaggaaaaagcttacctggcaaaagttgggtagaatggctccactagtcacatggtccaagtaaaaatcccaatccgatttaatagtattgcttaccaaacataccctaaataagtaacaccaataattaatatttcaccattatattccaaataattttttaaaaaaaaaaccaactaagaccttcaaataaaaatacaagaccagctactcgtgtcggcgtagaacctaacatacccataactttctttcttcaacacaaaattaataataaaaattaaattgaatctattatgggagagagagtgaaaaatgctaaaaaagaaagaaaaaaactttttgtgtatgaatcaaattttatttttatttttgatttttaaaaaattatgattcaataactactaaccatatttttctccactaaaaattaaaggaaagtgttacttgaaccttttattataatctttatacttaatgtaaatattttttttttaatttttttataacggtgttcgttatacttacaatatcatctttgtaaatttttgaaaattttcgaataatttacagttacgaaaatacctttgacattttttaaactcgagtactaaagtggaatgttagaaactttgttttcgatattataaactattcgaaattttacaaaaataatactataactataacgaatactgctataaaaataaatatttcctcaaataattttgaatgtagaaatcgagtaaaaaattttaatagaagattgtaattaagattcttaaaaactaaatcactatatttttttttgaaggaaaatagttcgtggagagataaaaaattagatctcgcgattattacacaaaatgtttactaaaataaagagtacagataagtaaaccatattaattgtagataaagattcactttacaacaaaattacgtgatcaactaatacaaaaataaacaacccacgaaataagaagaaagactattataaaataaaaagtaattctcaacttcccatcaattctctt

SEQ ID NO: 224802 - DNA, 7247 bp, Cannabis indica
tggttgaaaaagaaagaacagttgtggaaaactttcactcacattttcaagaaaatttgtggtccaaaagaaagacatgaaactaaaaacgaaaaacaaaatatataaatatttattatctacattggagaaaatttctgttccttgaattaggggtaaacaatggtcttgaactgggatttcgaagctttttaagttcctctctcttgtataacagtttttattctatttgcctaattgtatcagtggaaggatcatgcatgtataacagtataatgagatttgttctaacagtgtagtgtattagcctggaagagaactggcaaaccaagaattttcttaaggagcagaatggaagttcacttcagagcttggactagcatgattttgctcgctgcggtttcgcttgagaatctgtttaatctctgcttcttttttatctacaaaatcaatcaagttcttgaaactagttgctcgaattgtccgtcttggtgttccaggcacaacctcttccgggcctacatcagcctcagggacaaattttcggtactgacaacatattctcaaggcaaatgtagtaagagcaatgaagcaggccacaccagagataagaaacaagccccagaaactagtgagagacagtcggtttgcttcttggtcttcagggttcatgctgcagtcctctgtttgcagccatttcttacgaattttctggagatcaccattctcggagagttgaagaatggcagtagataggtccactgcaagaggagagtcccttggaaatgcctgaggaaagcaaggaaactgaattagtttacaatattgaaccacattatattttacatgtattgtttttagatttagaaagtacttacaaatccccatccactttttgtgaactcctgccctacagttctgtattgacatttggtatgggacaagaaggcctccacatatggaagctcgtccacaatggcagctactccaccaggaacttttggcccaagccgaagagcattaccgtactcttcctcgtttctcaaattgacaagccttgattctgcaattttgagctcattagtgagatacttccaagcaaatgatccgtcctgaatgccaataggatcagtgcccgacatcaacgagtctatgccttcaattcttgatgtcagctgttgcactgtgaggattgatgtcaaactagctgtgtaacttgagttgataatcaacaccacaaaaagccatatgatgagtaccaaacgtcccagcgtactaacagtgttctctcctgtgtaatgtgcaagaaggggatcatgttagtgatccattatgttgttgaagagattaattattggtgtgtgaatggaagactaagaatgaagtacgtactgtgtgagaaaaacatcgttgagaaactaaacctgaaaggcaaaaacaaggtcagtaaacgtactccacaaatggcaagatatcaggtgaaagctaaaagctagattatctaactacatatgtttaaagcattttctgtgaaacttacatagtacatgttcatgcattcaactaaacttgaccagacagcttatttgaccaaagtctttctactcaagaaggtttttgtgctacacagcacgaaatagtggagaattttacagcatgatcttcaaagtgtagaagcacatatggaaaatttcacatgttactggtgattttataggcaccctagccacaaccagttccattttgcatttacatggattcaaagacatcatcggaagccttagatggaaataaaacatttttctctaatcctagaaacaaataaaggattaaaagaaggaaatatgtactgaccaaaaaatagtcatgatttgctttctcggtggaccacgaaactcgtgattagacctatgctcaagaatccagacaacagcacccacaaaaaggaagaagccaccagtaacaatccacattggcaaagtaaatggcttgaggaaagcccatggacttgtctttgcctctttgacaggagcaactacaacaagtcctgattccaagtaaggctgcgtaaaatcaaccatccttgttctatttgtagtaattgtaatatccccaacagcagcatcatatttctgttaagaaaaccaaacccaaaccaccctcatcaaattaaaagataacaaagtttagtaaatgtgaagacacactaacatatgtaggtatccgtgtaagatagtattaaaaataattactaagctaactctgctataggttggaccactgatattcaacaatttgatcaccactaagttaaaagctacattttaatgccaaatactcacattttctgcaaccaaacgtacaagttcagagaattcgggatttctctctccatctccatatagcacatattgtcgtggcacagcataaggcaatagcactacagcggattcaaagacatcgatgcaaaatcctcttacccctggagggtttttatctttagccacgatatctttgtaaccaactcgattaggcactgcaattcgcagtggcttgccattgttgggaaatatccatcctcgaggcgtcttagctgtttctcctggccatataatgctgtaaagatgttgattgctggtagaaacattgggaggctttgaatatacaatctctggaacagcaattgacagaccagaatgatttgtccaataaccaaccttacgagtaccagtcccatcaatgtttagaatatcatatgctggatgaactaagtttttatccgtatcaaattgaatcctaccactcacacctgtgaagttcgtcctaaggattgtctttagatattgtgagcctccatcaaaaatgtggagtgatgataagcgcagggagcttctgtttgtatctcgtaattgtgggtctttagagaatgatattttaccaccttcattcaaaaatacatcaagtgcacgggctgctaaccaaactgaatcataggcataaagagcataagaattgaaacctgaaataccatcatgttttagtttgtcccacctagacataaactttttcttaagatcagtatctggtgtgtaatggcgaatagcaacaaccccttgtaaaagattcattatgttaggatcaggtagtcgtaatgtatccaggtgagaaggaagccagtctgttgcaatccaaacataaccagcgcccatcatccctatagattttgcaacagagaaaatattcaagccagagtcagggttaacatgtacaacatacacccgagattccatgaggtttacacctagtaaaacgtcatggatttcacttattgaggctccaggagaaaaggcagccttgtaagagattctagcacgattctttgccaaggcatcacccaaaacagaaatcccatttctgccataatcatcatcaacaaatatggcaattacttctctccattgatgataatccaccaaatcggctactgcatacatctggaagtagtcactctgtgtagtacgaactaaatatgaatactgctgtgcagaaagagaagggtctgtcgatccaaatgacagaagaggtacatggagctcatttataacatgtgacatgacatgagatatcccagaggactgtgggccaattgcagctacaacatcatgttgaatgagctccaaagctacagggagggtaatatcattagatatcttacttcaaaacataaagagggaaagcttataatcatataagtgatccagataaatcttttccccatccacaaattgatggatattgatagttagtgagaatttttaattatcacagctcattaaaagggcatacaaacaaaattcagtttcagaaagaatattaaaagacccaaaagtcacaatgatcagatctttagagaaggcatcgatatcagatactgtatagcagtagaaattctaagtgaatcgtcaatcctattgttacatttaaaacactacagtaccaaaatgccaatatgaaacatggcaagccccaagactacattttaaaacaactacaacattgtaattttccagtatatacgaaattcagttcatatgaatatcttgtgcctatccattacaaacaacatcatatgttgaaattttaagaaggcctcttatgctcaaatgatcatacatacagaatttacattcaaatcagattctcggtaactaaatagttggtgtgggaaccaataaatatcttgtgatttttcaaggagaattcaactttccagggcaaataccttcaaatttcgacaaatttagtattgtatgcaaatatagtaaacatagcaagtatgagcaaagtactattctagcatttgaagatacaatggtagtatttgctagtatgttacacaaccaacaaataaagtaccatttttttatgcaagtttatacttagatgcctttgaaggcactatggcctggcctaaaatctgaactaccaaatgtcaaattcctttttggttgactcttactaatctaacaaatgcaattctctttcattcaagaaaaaaaaaagtaattctcttcgattaaaccaagcaagaggagttaaaggaattaccttcaatagttccaagaaattgactacaattggtatcttggaaaacaacattcaatgttgttccatgaaggatgcttttatcagaatttacatcctcaatggctgctaatatcgctggtttagcagacctcccaataaccgaattgtaagtgaacaaagctccaatattcacaacactcggtcttgaagaagaagaagaaacactggtatttccagtaccagccattgggtttgaagaagaagaagaaacactactatttccagcaacagaaatttgatttgaagaaggaacagtagaattgtgagtggcacccattacttgtacagatgcccacaaactgaaaatcagcaaaagaaatattcttttcaagcatataagagcagggccaggcctgttgaccaagaagaagaccttcatggctgaaagagtttctatattaaacctggtcgattcttcacctcaacccaacatctgttctcgactggaaatatcataaagcaatgtcagtatgaagaggagcaataggagaatgataacaaaattatgacagctaaaagggttcttcaaattcttaagaacccagatggaaatacaaagatttaagcttgaacattaacatattcatcagcaaatgtccaacccagaaaaacaaaaataaaataaaataaaataaaagggaaaaacatacacacccactaacagttaggatccaaaatcaaagatatatgcagccatggataccataaacctattggctgtgttgttaccacccacatggaaacaatatataagaaagattttcagcgagggtatctataaagaaaattctaagtgtaccatcatatactactcaagagaatgaagaccaaaacaagattataataaagcaataattatataaaattggaaaactcacatgttcagataaagaataaataataaacaattttaaatgaattagaagaatataaattttgtaaatgatgacatttctgctgggattgattgattacctcccaaggttaaagccaacttaagaactgttaaaaggtcatttgtgtttgtatatgtgtatatgaattatgatctcagaagagatttcacatcaacagtaataaactgaaaaaagcattctgaaggctgaaaacagtgttagcaagctcaagaaaagaattattctctcactttcacttcttgtgagctgtgctttgctcaactagctaagctttttcagtttgctctctaaagcctatataaatatttgaatatttaccaaaagatacactaaatattatttaatttaagtatcaaaatttaaccttttttattagtacaactagaaggggtttaaaataatggtcttgttgggtttatttccatatatggcctttgcttgtgattctctattttaaatttaaaaattacttagtttttctttgaaatataataataaaaattaaaggtataaaccttgaaaaatatagtattgattgatggagtaggccccatcaccaaaagctgtggtaaaacaagtcatgaaacatgtggccttatcttctctgccacgagtgataaaacaacatcaacaaggcagccagcagcccatccttctatttatttttttatttatttttgtctcgattaagaatagttatacaaccacgtggctagctcaagtggctatagtgggtgtgtgagtcttggaggtcttgggttcgagtcccagataaaacatgttgtaatatataaacgcttaaaattaaaaaaaaaaaaaaaattaaagaatagctatacgattatgaccccttcctttgctaaattaggaaatgacaaagggtaaaaagtatcactagtatcacgatagaataatttgcggtgaaattttttttattttttatacacttaactttttttatttttttttattggtaaaatctctttatgttttaatttttatacacttaacctccttatttttgttatttgtggcaaaatctccttaagtttatttttctttacaaatttaaagtttcaattgctgttaaatactaactggattactgctgtatcgactttaagattttactgttacatatacacaggtgtatacagttgttatccagttgatatttaacggtaatatttaactggcgtgtcaaatttgcaaagaaaaataagtataagaaagttttgccacaaaaaaaaaatattaaggaagttaaatgtataaaaattaaaatataaagagattttgccactaaaaaaaagataaagggattaaatgtataaaaattaaaacataagaagtttcgccgcaaattgctcatcacaatattattattattattaattgttatattgttgtattgtataattaaatattgagttttatatttatttaataactataatttttctctctaaattttaatatatactattttttatttaattttctcgagctattaaaaattctccttaaattattgaaattattggatataagaattttcgttcgattccatttaattttattaacaaacgcccgttagtaaaattaaacgaaaatttttgaaatctaacaatctcaataatttagagatacaattattttgtactgttgaccgaggtttttcgg

SEQ ID NO: 224803 - DNA, 19324 bp, Cannabis indica
ttttttacactatttcggaaacccaaggactcaatcgtatggatatgtaaaatacaggaggacgcttgcctagcaggaaaaggagggaaacggatactcaatttaaagtgagtaaacagaattccatacccgatctcatagatacatagagaattctgtggaaagccgtattcgatgaaagtcgtatgtacggcttggagggagatctttcatatctttcgagaggggtcaaaaagccaaaataaattattttagcccttacagaatcagcagctattgaacccctttcacttttgtaatgtacttaattaatggtcttcagtctaccattccaaggtaaatgcctggctattcaaagctagcgtggtaaggagacggtgagtgaaagtgaatcggttaacaaaactgaggaagatgcctagctagttttatcccagagcaggggagtgaaatagtgaaatcggaagaaaagccctcgattagattagcaaaaatctccagctctatctcatattgcctacgagctctctccgttctatccaataagactatttgctaaagttcaaaggccagactgcgaagtaagttaaacagccgttctaaagctttctagaggtgcctataaggaagtggaaataaataggagaaccttattccagctgtagtttattggctgttaggtcggctcgattagcctgtagctaaaggaaagtcaagccattagttcgagttcgcattccctggtaagatgtgggccggatgggacctaacaaactctctatgttcgtacctgcagctaacaagtcaggagtttcctctgagtccgagttagctgttctagttcaagacaggacagtatgggacctcttgcttagggctttggaagcgagaaaccaacccagcagaagtcaatcggaagttttctgtttgacaaagggctaagtaagagtaagtaacgggtgtagcgatagagcggtttagtttacgattctattaaaacaaacaggctattgcgcttaagccaatccggccggctgtcttatgacgagagacagaagaagtaggtgcgaagccttgactttcaaagtccaaacaagctttctttgttcgcacctttgagtctctgttacagaagtggaaggcccagttgggttggtagttttgctctagtgggtatacgcggattcgggttgtctaagtagaaggcatggaacttttgattccctttcgatcttaaagcataaaaacaaagattcaatgatgctaaatacaatcttcatctgtgcgggattgatttagctcagagggggcctctctttcacaagcgagggagtacaatacttagatcttactacttctctaaatcaaacagcacatgggcctcagtgtctttggcacagcttatgcagatcctaaaggtcccccagcttggaggttccatccactctattgagtagacatgccactactgcgctgtctacctcggctgaccgcacaggtctttctgggccctcctggatcaatagcattggatcgggaatgtggccatcaaagtaagagaatcggattgatgcccaaaaagacggggtttcctaaacttttcagtagagcgagaaacctccactttccattcccatcgggagtaccaaaacaatagaatcatgcttcgacacgtcttcgctcgtgatctttttgttcttttcttatagaacaattttgtttaattagggatcaatcagtattaatgctttattacattttcctttatgaaaatgaatcatagaccccccacatttctatatcatagatatttttttctctcaccctttcatttatctacatacttgacttttattgtttcacaactcttatttttgcttattttgatcttcgtacaaaggtttctttggatttttagtcattatgtctattcattgaataagtgatgatccaacgattcttactcaaggaatttttggacttagtttgaaaaggttttattgactctctagtatgaatctgaggattgattcaattccctgggaaatagaagatgaaagaggcctgatcaacatatagatgaatgagccgacttgagattatggcattataaccaccataataaagagttttcggattttccttctcttttcgagtgaataatacaattaggagccgtacgagatgttcatatacggttctgcttacctaaaatctatgctattcttgcttcgaagaaggtcattcaggcaattgcggatgatataactagtaaatatgtcccccctcatgtcaacatatttgattgtctaggagcttaagtacgctatgactcatccgaccctcttcaatatataatgactgaagcggttggttaatccgatcagttcatcgatggtcggcaagtatgatggtactaatgatgatcctccacttcctgtctatctgctttaccttgtgaattgcagggggctgtattgaccgcatcttttggcgtaaccgcttattccttacctcggggttattgggcagtcttgtaagaggtgtgccggaagctattcctgtaactgtaataggatcgcccttggtagagttgttgcgcggaagtgctagtgaattctttgagattatgggagtgtgtgacttgaactattgattggtctgtgcccttatctgccccatttgaattcaaaacataaatctgtctttgttccaaccaccgcaaccatacagaggttcgtttgcagagaatctttctatgatcatactcgaccatgtcatgtatgaacaggctccgtaagatccatcgaaagaataagtgatgtggctcttttctatctttcacttacttaatagtaggctgcattgacttgatttattagactatcggagtggatctaaagaagaacagcattctattagttacaagtgtatagaagcgggataaagtccaattgaaaggtatgagacgacccataaagcacttgattataagcaaccttgtaagcctacttgggtattgagcatttttctctaagaacttgattttgtgcaatgtctgattgttgaaactccgaaaaggggtcttacatagaatcattcggatagcatatcgattttcttatatgggcttcatttattcctattcctgcttcaagcttgggaaagtgtgcttacttcggggatgaagaagaaagggaggaaaaaaaagaaagaagaaaatccagagacaaaagaaattagaggctcgagagaccataggtttgttctctcagggtcagtggtgagtagagtgctccgacaattacttattttaatgctctttctgatcgacattaagctttcgcagtcaatatctgaaattgatgatgtaactaagtgggtatcacgatgccttatctatccaagacagaatgcctatgattggacaaggcagtaggaaaaccaatcccaaaaggggtaagattttttaatatctgaattcgtgtatttaagtagaagaatagtcaactagggcttgtcgagatatgaatgaaatggtgctccacaagggcgtcttcgaagtcattttcaaagcaataagaaagtctttgaatgattctcaaggactctagttcatccattgattagattttaaccatctaaataagaaaactaaggaagccagggctagattattaatcatctcagtggtctctcgagcctcaaatgtctgtctataggctgaccttttcggattagtaacgaaattcaccaatccaatcaattggattaagtcgacctatgctttccatacttacccttacccagctaccagccacttagctctagcttcggccgatccttcgtcatatgcttagtcaaaaccactcttgctacgatgctactttttggagagagtccctttttcgggataggcaggatatcctggtttgggaaaactggttaaaaagaggaatgaatgctcctccatctgtggttattgctttgggatcctataattcatcgctactaactataagaagttcctggactaagaggaggttccctttctttcaaagtggcattgcgaatcaaaggctttttcgcagtaaagccattccgaaaggggctacaaccttgacgccttaacctcaaaaaagacatcaacaataaggcaggtcttccatgaatgggaggtacgcaggctgtatgttcaatttcatagaaactgggcgtctatttgtaggtaccttctcaagtaggacgggcaacccggtctagttttcattgtatgaaatccgtgatatagccgctgatgctagtaaaaagaggtctactaaggtaaggtctctcgagcctcttttgtttggtttgctacgcccttagccccccttcatattttgctcctcagccctggattcgtgtcgaaaacgctcgaactcattgtctctggggtgaacctgcagtactcactcacctgtttaggcacttctcttcgtctacccttgcccttttccctttttgttctcagacccttagtataatggatccaatatcctaggctaggcatgtaaggaagattctcccgcttttgttaactgggtttcattaggtggttcggactatccttcttgtatcaatttttctaccgtcctcttgctcaagatggaatagctattaaatgagattagttagcagtcagtattcgtaaataaataagtagacgtaacgtatagagggatccccctcgtgtaggtgggtaggtcgaacttctctatttccctgctagtgcactacttccttttctctgtttaatttagggagaagggcttagtcatgtgctcgtgtgttcttgttatcaaggattggcatcaccaggttgagtctctctctttgtcctcatagtaggatatttatttccggatgttttgtgttgtaagcacctttccgctctttgatatcagactgctctcgaatccgctgtgccaatccgctctttggctgttgtgctcgaatcggttgttacaaaatctgcttcaactgtctcaaatgggggaatagatgccacccgctgaaagaaagtattcaaagtcagagaagtggacaaatgctgctagtcttttcgacatcacttgttggaggaataagcgctgtagggactaatccgtatagttgaaaggatgctatagactgaagctgcacatgaatcagcaacttttgaatcaaagcgcttttcccttgggcttttcttcggccttgggctatgtaaacccaggttaactaaaaaaaagttcagtcctttgccggggttttctatctatctatcgatgaggccctggagagtagcccgcccaactccacttactcccataatctcggttccattctctgaaacccatctttcgaaagccggcccctccaatcttactttgcatcataggtaaggcaaagcgctttcttttaagaatgcatctggttccatctttctttagttaacccacctttctctacaagtgcttgtagtaattctgggaaaaagtctttattaattatttattctattagcatagcattaagtagtaaacattttacactaggggttttcccatactatacatgcaaacataacaaataaaacaaaacaaagatagttagcatagataggagtctatctccagtaggcaccggagtagatctacactaaaaaaagacaaagaacaccagacatgaaaacaaatgtctccagacacttatttaattaataaaccttctaaaactcaaaagagtcgacggactcttctattctagtctccccggtgaccgcgggtgacagcacgcacaattaggtcttcctgctccgcccgcagcgcttgctgcctctcctccaaaccctctatgcgctctctggtagcgcgaatgcgcgcttctttccttgcaggatccattgttctaacacttatcaaaaggtgcgatagctacggtgctcttgaatttgattttgcagttgccccatttcggcagcaattgcagaaagcctgtttgtagcctccatagccatacgtgctagtactcaatttcttggatttgaatttgatgaagtgaagacacttatcgagcctccatttatagagtggtagagtaatatcgccatgcagtacgaattgcatggcaggcacaattcttactagttctccgcgctacttttctgcagttgaagactatcatgcctttttaatgaaaaactggctggctctggctaccttgcggagcaaacaaaatctccccaaatcacactgcctgtatgaacaaacaaactttgtacaaccagcttacgtggaaaagattccatattctatgccaatagactcgtgacatccatgtactgagtcgtcaaatgagccacgttaagaaagcccaagcttatacgcattggcccacagggtgcccatcttcaagaaggcccgaatgaaagacccaagcctacatgaaccatcacaaagaaagtcctacaaatgaagactcgggcctgtttcgatgaaacctcgatgaaagcccacagaagggccaaagcacaacaagcctacccatcatcaaagcaagcccaagcccatgcaagaatgacctcattgtcatggctcttcaagaccttactcctcaatatagtctaggataacgtttttctgaccaactctcatggctttaggaatgggcccctaagctagcgcctaatctaatttcttttttttgtaacctcgtgcgagtctagctcttacaggtctaggattcccgttatcactagtctgagtgccccgagatccagtgcccgtaatgtaatatgtctagtctcctagtgccctttgggaggtcttgaagagccagctttttcttttaagtaagcggtatctcacacggggtcaaaagcatatattattttctttcaggattcactacggaagaggcactcacagggacatcatcgagaagaagaagccaagattactctcgaataaagaaggaaagagggttgtgactcaaatggatcgttgaaagactgagtctaggacttggttgaagacttgcgggggaaataagtatgcgggaggaagtagctccagataatgagcagtaggaggaaagtcaagtattggagcgcatgtatgtgcccatagcaagatgcccttaacacttaagcattcccaaaatgtaattcatgcactaatccacttaaaattcttggatcgcacattttttagagaactgtacacttcgatgaagaaggacccacagacattccttattgttcatctccacagagcaggatttttttcattggatagtggtgctacatggagttaggaaaaataggatctcatgtggaagaagggctagactgatagaagatctaaagaagtgtcatagccgcttctaccaagcccacaagcttgagtcttcaaccaagactcgttgttcacttgccaattgcatcaccaactggtcaagtgctcagcccgtcaaggtctctgccagaagcgaaagtttcaaccgaaaatggcttatcaaactcaggcaacttcagcaccggctcaatcaccatcgccatcttcaaaccgtcaaaagccttttgacaagcttcagactagttctaaccccgatccatcaccagagtcaattcgtacacaaaattgttagtatagttaaaaggtgtcgcttcagacacccccttcccaacatgaaaagcccccattcgagtagtctcataggtctgaccaggggctcggttccaaccattctttctaaggacaacctcgctcctagcgaaagatcaaaggccagggtctgaaagagttcacgatccaattcattccctcaaatcggatgacacaaggcgaactagaataggctgattgatccaggcagcgacaggctccaatcgaaaggaaccgcgcgtacgctagaaagacgtataggcaagcccttctttatgatcatatggatcgcttttcgtgacttttctttccataggcatacattgcagtctaacctgctttctaactttaggggaccgagaatcagtcttttgatcctcctggagcctactctcgtctttcgaatgttgcttccgatttagttggtgcagacgctgaaggatcagctgacaccagataggaaagggtttcttctttcagaaccttcttctcgttctcgccgtcccggcatgttaccttccatgagcacgagttcttctactcccccttattttagtaggcgcctattggatcagcatcttctggatcttcttcacctgtggtttttcctgcgcctcccgtgcatcagggggagtcaaagtcccaaggaaatcagggtcgcagccctctattgagcagccagcacttgcacctcgctcttctaataataaagagcagcctgcatctttatcatcttctagtaacgaccagttgcctacggattatccttcatcctctatcgcagcagagccatctccatctctgcgcttgaatggttctccccggccctgcagcaaaggaaaagttatttctctaaatcgggcccgggacattcgacgaaaaaggatgacccgatgaaaaaaaagccctttttccccccctatttatttataggaaaatctgccctgtcatagaaacgctatgtgaatagggtctttaagccctcacccagcatctagttcaatcaacatacgtttcaaaaagaatttggaagcctatagccatttcagccttactccctattctctcttaaataaagcggatgagtataatggtaatgtggaatgacttttcccattcctgtgagctgtagagttagttatcccaactcatccctggtattcctcctctctatgagatgtgggatcgaccccgcgagcccttcctgtttctacatccttttggatgatacggcaggcctatccatgttttatccagcctttgctccactatcaaccaccggaatggttattttgcctgccccgctttcctctcccgcggcaagagctcgttcgccaagtccgaactcccactttatcgtcgatgacggctctcttcgatgctagcaaccgcgtttgacccttttccgcgcttctttcaatttccaaccattctagctgaaggagatactttacctttacttagagaggggcagcaatactacgctcttccgtgctcgtaggttgacttcccttatgcatccagccgcttcactaatgtgaataggttatacagaagggtggttggttatatactcttatgcgcgttccttcttcgaaccttttggtatgtattgccccctaactatagatcagatccaccagacgagaaactcaattccgcactgctgctgagtcgtcggacttatccaccaagggattcgtggaatttctgtggattgcgttggaggaaatctaccaaagctaggcagatagatagactcctttcccgctgctaagggagagcaagaaacaaaatcaaatgattcttttttaatcagcgcccccttttgggtatgcaggtactaagagtcctctcactaccaaccagcagacatcatctggctgggtcttgccggtatcaacaacaagaaaaaaacaaccaaatggaaacagcaactaactatggctcttggcccagacaacgtcctaggcgtaggggagatcggagcaacagggaacgcctagacgacgtttttattcctgggctgcaggaagtagatcgagaggtcgttccgccccttgtccccgaatatgggtaataaaaatgttctcaaaaaaggttgctccaatctgacctagctggcgagcgatcccagttcgcggcagagaacaagacagcaagcgagcgtacctttgttcgcttcttctccaccaagcacggaagtttaaggataactgttggtcggtggctacctaaggaaactccgattcgatccgccccccccggctgggaggcatctacctcatcccgatcacaaggagaggttcaccatgatgggggtacttccgttttttccattccggaaataatgaaagacataggggaccatccttttgttgcggcatgctcctcagatttacggattcgcagggggcctcaggccctacttagttgactgacaatgacaaaagcttgcgaaactaagtagggccttttgaattgaatcttaagtagtctatcagtggtgcgaagcggccttgccccttttcagtaggggagcgaaaggttagaccttagaaagtcagcgaacagcggttcttctatgtaggtatggcgttccccccttgactctcctaacgtcgagctaagtgacttcgtaacctttgcgtagcgtagtagaatgaaggctacgcaccgacgctctcttatctattagcctaagcgtcttcgctaactcgctcgcctactatacaatacattagtagggtaggctaactcagccgcttacttctactaatgtagggctaagtagcgccttttctttttttaagaacccattctcattatctttcataagtaaagtaggcgaacctataggtccttagtaggcgttgacaaagaagaacagccggttaaaagacagcgaatctttttatttatatattttataataatatttaaataaaaagatataaataaatatatatccagcttgacaagctacccttcctcttgatctgaggtgcgaagagaaacatctcttttttatgacttccacttatcgatcccggcccggaaaagtgaccgaccagggccctattgatgaatgaaagaaagggtttatgagccctagccctgtaagcccacacctgtgtagagtagatcgttcaacacctgcggcacaaacccatttttgacctattggtcctagtatcataggcgaccgaacggccgccccctaattactagaccaaccagctataataattccataaacacctagcgaagatatggcaaacaaataaagtagccctatgttcgaatctgacaataccataccataatcaaaaggtacaacggcccaagcaaccagacttaacataaatgtagtcactggagccattctaaaaagggagaaattagcactacttggtgaaataggttcttttagaatcaattttaaaccatctgctagaggttgtaacaatccgaatgatcccactacatcaggaccctttcgacgttgcacaaaagccattactttacgttcagctagcactaaaaaggctactcctagtagaagtggtagaattattccaagtatttcagctggaacagctatgtacgttttcgattttctattcactcatgatctggcctggtcgacccgatcatgatatttcactcatgatctggcctggtcgacccaatcatgatattgaaggatgggaccttttctcgaaaaactccggatccagagaagagttgaagatggtgcaacatcgaatcctgttacgttacttcgaatggaatcttagcccgcctcacttgctttctttactgcataagggccataagggcataagcgaagtcaagagatttccttctaactagtggctgagagtaagcaagctaccttcattcaacagatttgtggttgagtcaataacatgctctgggtcgggaatctttgctcttctctgcacgctgcctgcgttcttcttcgtgtccgtccgtatcgcaaagctggtcgacgccagctgtaatggttgaaaatagggggccaaccaagacccctaataaagctttgttcgataaagcaaacgttccgacaacttcggaccagattaacccttttgaattagccgatcttacaaaatcgatcgggcgggctggttgggaaggggtgattagcggagaaaagaatcgctgagagatagattctactctactatttagtcaggacgaatgagtggctgtgcagcatgctccggaggagattgacccttccccgagtcagtccagtcagaaaggggacggcccgctgtctagactgcatttcgggagtttgaacaccatcccatttcaaccaaaaatacaaccctgtcaaaggtatctaaccttccttccttatgagtggaaatcaaatcccgttttgtcttttttgcataaaaaccagccagccggtaatatatatatatatatttctatattttaaacccgttcttccgaccatttttgaaaagcgcatagtttctcctccaaaaaggacctctccagtcggggaacgcatgagatatttacctaaaccaagtaggtccttgagcggatcccacgttagccccaagacgttggtctctaactagaaaagtaaatgcttgagcttgagtgagaagggcctcctccccccgcaggtattttgcctgtatggtgtttaccgggtgggaccctcgatccagaaggtatgccactctactatctatacatgtctgcctcccttgaaagctcttggtgctgcgactatcaccggtaagttgcgtcggatcaacatcgggattagaatcaactgcaaaagcaactaagtcaacgcctatttgctctggatctactggcccggacgcttgaatctattccaccgcaaacaaccgaatatactactgcaggatcttccgctgcttctgttgttattgctcccacctgtcactacgccacctcagcagctgggactggaactgcttccgcatctggtacttcccaactttttctatctatccttagaagtagggcgagtgtctaaagaccgggttatctctctgaatcgggttattcactgggctgttaagccatcgagtcttctagggcgacccgtttcaagaggattcatccaagactctagatctcgttaattctaaggaggagcccattctataaggaaggcaggcttttaggcatatatagttggctggttatttgtctttcccatccctgctgctactgcgggtgcccggaattcatggattctctggtagaggggagtcgaggtggaattttttttttggctggcaacaaataaaagaagcccccaattgcagtaggagtagctacttgtttcatggctttaatttgagctcttcagatccggaatctccataaatgggtatgactggttaaggtgaccagctttgtgcggcaaccgcaagttaaggtactctggatttgttatagcgccaccatttcacaatatacattgtccggtttttgtattgctgttttatcccactgacgctcttctatgaaagttgaggctttactttaactgttcatttctcaagggtctcctttcgctcctctcacattcgttcgaataaaaacctgccttttttgaatatccatagctcggagggttactcgaatcttttgtttttgtactctactcgttccttgaaggtccaattaattaatagttattggaggacggttagtgtctgttctgcatgactctggaacgttatagctaaggagcggatttcagggtcccttgacttgccaaacggtttccagtatgcctatacagtaagtctttacacacatgatagtggcagccaggttatcgacgattctacaataggcggccgctggaaaacccgacttagcgaatcacttccaggcgggcattaaatctatctcgtgccagtggctcttgtgcgcctcatttatgctggtggcataccgtaccgtattgtgcggaacactcacaaaagccgtggccttccgctatgttagaccctcccctagaagtataatggttggtccctccggaagtggtaatctccgtttgacttgaaaggagccttgttcagcaggtttttaaagtattctttcacaagtttgacgcaagtcgtacctcccagcccccttagctacttgtactaaaaaactagggcgctatacggaagttcgtgcctgcttatcccggctacaataactatcgaacagcgtctgaagaatggcgctcgtatatccctaggcgtgggtctgtactttcccctattagagaagggcggggtttggaaccctcaagcaagacatgatctacataataagacatcataacgcctagagatacaggtacggttcatcgcgttacttatccaagctgccggatagtcggatatgccgtactctgattttaatgaggttaggaaccatttgctgttaccagcattgctcattattaggtaacgcattcccgtttatcgattttaaggttagggtgacacgttgtcgctttcgctttaataatgaaagatatggagtcatgcaaggagcgcgctttactaatataatagaaaggggctttcaccatccatctatttttgttttgcccgaactcttccggagtttccctcctagcgaacggggaaagcttatccctcactcgcattcgcctaatcgagcagaacgccactcggctcctacaactggtctcgcctatagttatagtgtcgaacacacataagtataggttttgttgtccttacgacggttgtcaaagaccggatctttgcacttcgcgaccctatccgagtatatgcttagtgcaacgcctcatagaacaatgaagtaatgtatccatacgagctccggccctcagcagctcgaataaaaaatcaactgttcatttatgttacctgttgtggaccttcaacgtttcacctttcatagatctgggaaaggcggttttggtttgggaagtgacgttgaggctgggcacgtgcgagttgtaataaagaaagcaaagggaaatcggaggagttagagcagggctaaaagcgcctgcctggaaaacaaacagtagagtgacgcgaaggacctctagcaactctactaccgcctttcctaccaaaaagctaacccaaccgaaggaaattacataaggtctggaaagggctgtaaagaatagaattccttcctccctttcttcccctgttccggagatagatatagccctctcgaaacctagctgttagagtttcattttgggctaataaaaaaaggaatccccgaatggttttttccttctcctgcaaggtatagaacaactaagggtactggtcctgctcgctttgattctgctcctgtggtgaccaagaagcaggagcttgagctcaaccagccattgataatcactacttttttggttcccaatcgggatggagattccggtccggtgtaggggacaccttcttcatgatctaggggtcaaatgtagcctgcgctaagcagggagagctcctctttggttccatctgtccatattcttcttcccttccatccagggtaattcgggcttgattgttccgtgtagtcgattcgctcagcaccctccatgaacagagtccatgagctcgggaagagaagtggggccttcggtcaaccaagagaggtccagcccttcctgatcattcagaattcgttgcgttcttctttcgagccgatcagtcagcttccagccacccaaccaatcctgttgatcctgggggtgaatgaggtaagagaagccctcgtccgtgtttcggtgaccaggagagtcagccggagataggtctgtgctttcgtcagggggtagctcgtcagtaccaggtgttgatcagtcatccaaaagagaggggctctgaggaccagtttgacatctcattcaagagagagtgagtcatccatccaattcctatgttgaggggccagagtgagtgaaaatgatgcactacacggacgccatttggaccctacgaaagcaagccccgagctggtccgtaccaaccaagaagattggcttcatttgccatgttgagggctcagaagaagctcatgttggaaagcaagcatgtgcaagaacccatcaggtcttatatataaacctgacctacgactgatttactcaggccctttctcactgacttcttccttcattcggagaagtcatcaggaatggaaccagtggaaagtcgtatgcagaagatgctgggcaaagacgaagactttggaagcggaagatgcaccgattgatgctcttccagcccagctgctgtttattgagctcaaagtggatgagagagaggcttttctatgctctctatgctatggtcttctcaattgcctagtctcggttcaaagacagtggaaggatccatccatcagcctttctatctcttcgatcctgcactttccacctagttcaccgacctcacgagtctgatttggctctatattgtccaccaaggaaactccaaacaactccactgcgactgagcgatctcatcgatctgaccttcctactcggtatggaaggactcttgactgactctgagactcagtcttctgacttggattggcatactggggtcaattccaccctatcctcttgattccatctcctttacgtacagctaaggttttcattcctaactcatcaaatcaagtagacagacttctaggtgacgtggccctttcctgacatcatcacaccggcgctttcaaaaacaaaaaagaaaggaaatagaagctctcatctttttgtcgaaatctctatgagctgaatgatgtcactcgagtgttgagctttcaaaggctttttcaagaccatccaaccaaggctttccattctgcaaggcgtatagagcccgcttttcttcttcgatgagcaagctctggtggatttccacgcctttcaaaggaagaattcccacttcaaagaggctcttcaagaccttcctcacccgggtggtgagctaggagggaaggaacattccatgcatggaatgatagaacagaacggccgacagctacttgggttaggcggctcagtgagacagggaagggcgaacgaagtggtagtcaacttctatgtgcttagagcgggcatggaacacaggattggccgccaagtgtgtagcgctagcattataacagtgcaggatcgaagagatagcgaaatggcaccgctagatcgcgtagcaagtaagaaagccataacagttcagaggtagtaagggcgagtgccttgtactctgcttcggcactagacctggaaagagtcggttactttttggaaacccaagtcagtaggtttttccgagaaatacgcagaagcctgtagtggaccgtctgctatcggggcagccagcccagtcggcatcggagaatgcaaagaaggtggttaacggtcccggagtgatggttaggccaaggccaagagaacccttcagataccgtaagatgctacagcctggagatgtacggtggtgagagcgtgcatgaactgacaaacttgattgacggcatagcaaatgtcaggtctggtgagagggaggtactgaagggcgccaacaatactacgatattctgttgcatcagagagaggagcaccatcgtatgcagagagctttgagccagacgcaaggggtgtgggacacggcttggagtcttgcatatgagtgcgagtaagcagatccaaggtttatttagtctgagtcaagactagagcagtgtacgtttggcttcgattcccaagaagaaatgaagatcaccaagatctttcatggcgacccagtcgctgaatgaaagaaaggagacgagaggagactgaggtctgcaagcctgagaaagatcctgctgcgaactgctctgtggctggacaggagagaggtcaacagcggcaaggataggagactgacccatatacgtgcgaggtttggaacccctcactgaagaaatgatttaaaaagagcctgaactcgtccatcacctttcgtagtgagggaactcctctgtttttagcttgacgagctactttagtttccgaaaaatgcataaaccccgggattttcgtaaaagagggacgagtggtaggagccgacaaatagtagtgccggttcagtgaagtcaagtctttacgtctataggggctccctgacgatcccgaaccttccaaaagtgaggggtatgtgttgtttcttggcactctctttctttgttatgccaacctaaaaagagatagggatacggggcttgacttgaaaacaactggcccccctcaacaaggcagataggtctctcgagcctccaacacttaagtccaggatacgaaaaaaattcctccccactaaaaaaagcgattgagagttgatttcaggttcgatagtgtcgagaaggtattagccaccggtgaccgtactttcgtaaaagcaccattgggggggtggttcctctcttttctcttgaacctcgaacaaaaaatcgatctcgccatcagctcgactaagagttccgaatcgaaaaagccttcgtcttaagtcaagttcagaaggaaccgagtgccgaaaaaaaaccggttaaggcttcaaactactagtcattaagactactatgaaagaaaagtaaggaagtccttttcttgacttggcctgcgtgcattatacctaaaccctttttaaagaacttgatttcaatctcaacaaagaaatgaagaactctttgcttgttgtcctcttactcttttagcctgcctgccttgtggaggtctctcgggtgtctacggcagatccgatcagtctcgtgatgaagagaaagattttccgatcttccactaagaaagggatcgtcacgacaactaaatttgcccggtaaacaactccggggctccccatggtttagtaaaagggaggggagattttatcttcatcagggggggtcatttcattcattatgaactaaaaagtgtaaggctgattagtgaggtcttaaaaacttcatacaatgaatgatcggccattctatttgtgctttcagcaagttggcgacgcgaatctatggtttctatgtttcaatcggataccaattgcttggatgcgtttgaaagcctcgagatgacttgcagaaaatttcttttttttttctaggttttttcttgtgtctccgtaacaaatggtccatttattgatgggcgaacgacggggattgaacccgcgcgtggtggattcacaatccactgccttgatccacttggctacatccgcccctacccccgcacaggttgaagtctctatctacgatcagatcttttctgaacccccctatgaccgctatcaaagataagctttttcctatacaacctatagtataaagaaagtctattgttgtgttttggaattaggggcttcaaagcttcaacaagtagaagcttcctggcaaagcttcaaacaaagaggttgggctgttcacttcattgatttgacttcactttacttaagattaaagataggggccgggcgggcagtgaaggctcgtttagtagacagcaagctacggctttgacg

SEQ ID NO: 224804 - DNA, 5119 bp, Cannabis indica
ggttgtgccacatgactcatgatagcctaaaatgcttgttaacaattcactatgcattcaaacttttgtctttagaaaatggatcaaagtaaacgtgtaatatgtacacataatatagtgagacagacaatattttagatttgtgaacagaagtaaaatttagtagattttacctttagaaaataaaaactaagagtttaagtactacaaaatataaagaatatgaaagttttgagaccaataaccctttgaataaataaatatactgggtaaagatttgtgtaaattttgagtaaatatatcttcttataataagagaatttatagtagtaagactttcttgaacagttactattttggtgtatatttttcatcaattttgaatagaatttgttattttttgtgcaacaactttaataattcaataccaaatataatatcaagtaaaaatattttgtttagaaaatcttacattttatattatttataatattaaatatgtatattttcaacaaataattaacatatattttaaaatatattaataagaagttagaaagcaaagaaaaattatgcaccaatttaacataataattcaatactagataaccagagtgtattttggtgtataatttagagtcttcttaaagttaagaaatagtgtaaaaacctcacaccaatctagtaaaatggtactctaatgctcgtgtgtagcaagcagcaacaaaataaattttttcttattccaaaaagaaacaaaaaaacaaaataaatctatcattttataccatatagataccttaaattacaccagaagtgaagatagccaagctaaccaatattacaattactgttagaccgtttactttttgtaatattgtcataaaaaaccacgtgtaagcagcataactcaaacattaaacaacgaggcctattaaattttcacaatgcgcaaacatcaaacatcataaaactcttctgaaatgttggtcttacgttatgttgcctggaaaactgtctctatccacataactaaaatacagcgaatccacctacaaaaaataacactaaacttttgcctacaatttagttataaacaatacaatgtcacctcctcactcacagagttccccaaaagccagcattgaccagtcagagattattacaaacaaaaaaaattgctgaacaacatgaggctgtgtttttttcaacaggttggacaaggtttcatgaataaagagcatctctataaggtttcttcaatttcaatggccctcttccctgacaacgttgcagaggaacaaatgggggcatttcagtttgcttgcaccttggcatttcaaatcattagtttaaaagctattttaacccagacccagagttatggttaaaccccccccgaacaaacaccggaagttggtttgagttggaatcccgtttgattctagactcattgaagaagttcgttcccaccctttcttgtccttctcttgagccagaccccttttcatttttaggaccatccctgaacgggacactcaagagcggacccccgaagaatatcgaatctcctgtgtacgttagtttctctgttgcttgtaatggaggccttactgcagaagacgaagactcttgtggaggtggaacaactggcttcctgctataactgctagcttcagcattagagttgctgactcctatttgtaaggatggtctcgtccgagcatctgaagctgccacaggaactgagacatatctccctgcttcttggtcccaaacaacagatgtcctcctaacatctcggagaagtgacgtagctggtgctgaaagcaatattggatcactactaccacccttttgcattatcttctcatcaaatccaagaggttgagatgtttgtagtttaacatttggaaaaattgcctttgcaatcgaagaacgatcaggaatcaagccaggtatggacggcgctggaacagaacgacccaaaccaggacgctgtggaagagggctaagagtgactgcttcatggacatggcttggactgctgaagctactcatgctttgagtaccagtttcatactcatcccggctaccttgactcagagcaaaagaatttcccaatggagataacctgaagtcacctttcaactctttattcactcctgtatcagtgcttacactactcctaacactcatgttgctgctggagctgtattcaggatcaggtagctgacgactatcaactggccgcaaaacagaggatgatgccctggctttggctgcggctctcttggcctcatttctatccagctttgcaaggtcccatgcactgatacgaacaggcttttttggaaccctctgctccctttctgcaattccagttgcatctggatcgactgttgatggtaccattcctggctccaactggggcaggacttcatcctaatgtaagaaaatatgaaagtagatgccttcaattggctttgaaattttataaaaacttctaatcaaattaggaacaataaatgcatttattacatatcttccacggtaggccattttgtaaccatttacacatctattgttcatatttcataataaaaataatagtagggagttatagcctaaagaggtggaccaggtaaaataaataacgggaaacatttacattatatgacagataaaaatactgccatttctctgaaatagataacagttaaagcccaattgaattgagtattaattaagcaaacaaatccatcttaattcattacttctgtcactgatttaaattaccagattgatattggcatcgttgagaaattgctacttttttcttttccctaacatagataataacagctccaagtccaatggagttaagacttataagagaatattatatataaaacaatttttgagtaataaacaagagtcttttctacaactaaataaaaggtttttctacagctagacttacagaaagataaggcctgtatgagattgagatggtctgatcttattaaaatatgaattctacagctagatgctaaataattgcgattgtggaaagtaattgcatcaaagccaaacaaaattgagttgaagaaaatatgattttgttgaggcatttttttgaggaataatcatacactaagattacctgataatccacaaatacccttggaggagtacaaaatgctcccttgtagtgcagactcaaagaactcccaccactcaagcctgtggtggcagatcctgtaggagagtacagaatatttgcaaattcctcgtccaaatttgctgcaccaggtgtctcactcatggctctcattgccacaacatattcatatgttgtaataccctaattcaacatgaaattgagaaggaatgaattcacaacaatcatccaatataaattactttttgctaaatctgatcatttctaattaattagtgatgaatggggtagcatttctaaatagcaaccaactacattcattctatggtttcaaaaaaccaagcacattccatctaacttcctttgagactaaccatatgcctatagaaattgaaattaattatccctagtttctcagccactgaccttgcgtataagtatcatgtggaagaagaaaagttcacccaaaggtatgcatgcaagcatggaaactgcagtacacacagcctacagataatgaggcacaactttaaagagcattcttttgaaatcgatattggaaaatgaggtgtcagattcagtaataaagtgtgtcaaatgtaacatgtaccacaactgttgcaaatgggggacgagtaaagccatttccaagtctctcaataatttcagtctccatattttcttattaacaaagcaaagcaccaagacagcaattccaactccagcttcaataacaagctgaatgacgggccaatagcagcattagtaaccaaaaatattatgattaggatataaatgagatgttaaacatacccaaacaagactaatggaccattagacaaataaaagttgcataattcttgcgccccacacaattgttaagccactgcagccacagaatatattcaggaagttactttctagaaaaggaaaatatcaatgaaaactttaaattagctgggaactttgggaaatgtgcttgtaagatatacccgacaatggtgatcaaaaccatccacacacttatcacaacttctacagtgtttgctgaatttgcagacctgcaacatgagaagcattcatgcttacagaaaaaaaaaaatagaatcaatacatccttcagaaatctaaatacttgcacttttgagaaataaacaagtgttttggcagcatatcatctcaccaatgtcacagccataatataggaaagcagaataattctcaacaggcaaggccaacctaaaatatattctaaagatcattcactgtagtagtataaaagggtggttagtactagcttgatagtatagttatagacagcaaggactacattataggaccaaaactttagataatatggacaagctaaatgccagcattgataataaaagagactccctcgccaaccagcatggtttaaccagctgggaagcatgatacaaaaattgacaaccaagtggcctggagcatggaattaaaagcattcataaacattcaaatcccaccccccaacccccccccccccccaaaaaaaaaaaatcgtaataaagcgaaagaaaaactttccacttgaaagaagaacaagatggatatagcttcatgcattttcaaaatgtgccacatattgaagtaggctatatatcttatatacacgtacaaaaatctccaatgattataggatatctgtattgatgatgtatccaacataccggtcaagacactgtaatacctgagcattgcagagtgtgcagaacaaagcttcttcacccccttgctgctcagtagccgcatattgttttcggcaatcttcatgaacaaacactgcacagaggacttcaccgccaatacaacaggacgttctctttgtaggttccacttgattatctacacttcctagttctccaaatgaacctttcttactggaattatcccctc

SEQ ID NO: 224805 - DNA, 4420 bp, Cannabis indica
aaagtttaaaacctaaccacacctttttcctaaactaatagattagtgataataagtttgtaaaagcacacatgtggcttccctgaaagtcagagcgttacaatatggtatcagagctaccaaggtttaaagatcatgaagactggcatgctatgtgcattgtctgtgaagactcattcgactcattgtttagtaagtgctaattgttagattatttgttaattgcctgtttatctgaattatgttagttatggaaaagtacagtaaggtttaaagagtatgtgtatataaggaaatgcttattaggattgctcatgatttgagctgtactaaacggtgaaatagttaggattgcaggtgtgttagagtaagcacccggggtggtctggtaggggtaattgcgagcttttcgggcataaggctcacagtttagaaagaaaagtttgtttgtgtttaagagtggtgtagatccactcaaggcggagtaatggacgagcatgataataccgatttcttgatttcatgggggttaagagtaatggttgggttagatgagtcgttcacatgatgtgtagagatgattccatctggtgggatagtatacccttgggatatgacttgaatagcataacctgtgatgctttccaaattttgttctatgaaaatgttgcaacaaatttgcttaagcaactaaggcagaaagattgatacgactaacatagggtaatgaggcggtgatagagtatgtcactaaatttgatcggttaaccaagactgcattagatgaatggccactgagactattagagaggggcaaagtttatttgaatattgaaagataaattgtatgaggagatactcattgaagaaaacgtctggtgttggacctgataagggtgctgaccctagtgactgtaagaaaaaggtctgatgatttatcagctactgaaccgaataagaaatttcaaagtaaccaaggattttaacgtggaggaaaaaaattggcatatttatctaaaatgccgaagtgcaagggatgacggcactttagttcttgttcaggtgtttgctttgacccaggcagaggctgatgttaatttgataagtttaacttgtattgatggtattttgttggtagttttaatttatttcggtgcaatgtatttctatatttcgagaagggtgatttgacacctgtataaacttagtgatgtgttaatgagtagttctggtgcctttcagcaaactggagaactagctattttccagcatgtaatttaattacttttcgagttgtaggaaaagggaatggttggttattttagttaagctaaatataaagaattttgatgttattctacagttgaactaatttgcaaggtataatgcaaccatcgattgagaaagaaagatggtaaccctagaatcagaaaatgaggactcattcatgttcttgggcaaggttcaagggtcttgaaatccatcaatcccgacattttgggaagaaggtatgttatgagatggatgtatcaatcttttagcggtatggtgagagatagaagaggaatatcagtggaactagagctcgatcttgtggtccaagagtttctatatctttctagaggagctaccaggattaccactgaagaggaagattgattttgatactggaagtataaacttacacttaaaattctgtattgaacagtaaccagagaattcaagggttgaaagttcagttataggggatgcggggcttaacatttctagaccgagtacctcatttttgagtacactgatgttggtttgtgaagaagaaggatgaaactttatgagtgccaactgaccattaggagtttaataaaataacgatgaagaatgagtatcctttattaaggatagatgctatattgatcgattatgggaaagggtcgtcttctctaagatcagtcttccatctggttattaccagttgaagactcgaaagaaggatattcccaaatagcttctcgtacccgatgattttatagttgtcttcattaatgatatttcagtcatgatattgaattgacagtaattgttttgtactgaaagttgggcacattatttgtatggtgaaaatatgaagtctatacagaacacaaaagcctcaaataccgtttcttttaggaaaatttagataggaggaagtggtgacagttagagttgatttaaattctaacggtgtgattttctaccactctgggaagtaaattattagtgaatactttaaaccaaagagatcttaccaaaggttactggaaaggtaatcagaacaaggattgagatcatgattggagaacttgttaatattacattgtagttcaatttattggaaaggaataaaatagcccagcagagtgactctgaactttagaagtacaaggacatgtttggaactggatagacataggacttttgattttgtttgaaggaaaatttatgacataaaccagattagtgtatcagttagataaggatgtagaatggaaggttctcaataagttacatactacaccatattctttatactcgggagtaacaaagatgtataatatcagttattagagtactgttaatgtggtagtgatggagtttaaagattcaagttcttatattatttataaaatggatggaagagctatgcttattcaaagtgtagagatattaaattccaagttaagaattttatctttcttcaggtggttccaatataaaggggaaattcagagatagattagaaagaggagttaagtgccaggataatcggtccgtttgagtttttgaaaagggtaggtcaggtagcttatcagctagccatactccctattttatctagattttacaatgtatacttcaatgttttcgaagtatgaggtagaagcgacccatatacagagttacgaaaatatcaaatttagaacagacttgacatatgaggaacaatcggtacagattttgaacagaaaaaaagagaaagtgttagttatagtgctgtgaaagaacaacaagattgaaaggcattttgaaagttaaagtcattgttgcgggagatgtatcccgagttgttgaataaatttcgaggacgaaatttcaataaggaggggatagttgtaatatcccagaaaatatagtgatattttaattggacatatttttattaaatatgtgattaagtggatattagagtaggattataatcctacttaaactacacacgagtcaattagggaaataagaataaataaagcgtaatttattaattacgggattattatagaatatgtggatatcgtagatactataatttgaataaaataattttgggcttagcaactgtagaacttgacggggaggtctgaaatgtcacgacaataaagataaattgaattggattcttataccaagattagtcttgagttttaggttgtcggtggttgattacctaaaattacttaaatgcccctaaatttgtaaatggaataagtttagttaagaagggtaaaatgatcacttcttgggttaatttattttttcttttagtgtttaataagtttagaatatttgatttaaaagtaaagtttggctgaatagtgttggctgctatatttattttaaaaacaacttggaaattaagagtgaaagcaaagaaaatgaagcttttatccctctttccttcgagcaacctaggagctacccaaaaccagaagtttttcatcaattctctgtggtttttagcaggtttcttccattcaagttcaacctacgaggattaaggtaagtccttgccatggaactaagaattttcaagttttaagatgattttgagttagggtttttgagattttgtggctgtgggattaaactggttagggattgtgttataaacctaattttgaatgtgttaaagtttatgttgattgatattcatggctgtttgattttgaagttggaattttgttgatttaagagcttggacttggttctaatatggtaaaatgaattggagattaaattgatacgtttagtgctttggatatgttgtattgatgatattgtactattctagaacttttgggttgctttggtggtgtttgggattgattttggaagaaggaaattcgaagtttttagccctgccagaaccggtcaaccggtttgttctggtgcaacagaatcggtcgactggtttgctacaggggaaaattttcagtgtttccttagggccagttttagggctaggggtgattttcgtgtctgatataaattgtttagaagatgtaaaacctattttgcatctaatgaaagataaggtttacgaggtatgggaattaggtttattcttggaatgattgatttaagttatttattaaatgttgtt

SEQ ID NO: 224806 - DNA, 9600 bp, Cannabis indica
aatctaatacatactagacttaaaatattggatggatccgatccgaaactaaaaaataaaaaatctaaaatattgaataaattcaaattaaaccaataaatatatatgaaatacatccaacggatagaaccgatatcgattagatgactgaaattaattgaatcagatcggatgataaaatctaacattcaatatataattggatcggatctgaataagcctaaaaatattagatgtggtccaataaacacccataaaaattatgtttcaaatatgctaaatacgtatcaatttcatataaatggcaaagaaaataatcatatattaaaaagtaaacaaataatatttaaattaaataaaattataaataaattattaatattatacatgtgatatgatcttcaaaaggatctctttaattttttatggtacgtgacacaatactaacattgcttatattttattattgtaaatattttgcattaatgcaataatcaatatattttaggttattatatgtatatgttttttccatttttggatgcctagtgtgggcagtattggttttgtatggccagtataatcagttttggttttgtatgccagtaagtcagtcttcgtcttcaggtttaattttgtatggccaatatggtaagttttgatttgttaggccaatatgatctaaaaaatatcagatataatggagacacttgaagtattggagacaagcacagcacaagtaagtcctagtctttacattatagaattaagtgtgacgatatttatttaaattttatacttattaaaatttgacactaattaactttgttctttattttgtaggtgttttattggtagggtggattgtcgaaattagaggttttcctttccttccttatattaaggttttgttgtaaaactaagatatctctgcatgcccttagatagacaatggactactttagatggaaaaaaaatcttctacttattgcgtaaagtagttacttttgttattttaatctttattgattactctgacacaatactaacataaaccttatattagacaatattgtatataagtaaaatgaggttactgacttgacttgatgttgcataccaaaaaaaaacatagcatatatgtctagtttttcaagtaaaatcctcaatactatgtcaggaaaaaactgataaatgaccccatatcgatatccctactaattgatagatcagaattctaccatttggtaacttctcaaagaacaaactagcagctcatctcttcaatccaaattaaatcctagcatgtgacactttctcaaattacaaaatagtagttaatggaataatgcattgcgaatatcctgtatattggctgctattgtagtgagtagtagatgagctggaatatagtacttactgtagcaagtaactctaccactctacctattttatttcttgttgattcattatggagtgaacattggtcggattgcaacatatactattcaacccaatataattgtcgggttgtagaaatttaattgtaatccacctaattaaaaagaaaaaaaaattaacttgccagataattttgtcggtttatttgggttaaccagtcctaattgttataatttttcttttattattattgctagtttttagtatccaaaatcattagatttagaattaatagaagtataatatttatattcaagcttaaaactataatagtctaaattattgttcaaaactaaaaaaaaaatagaaacattaattgaattagtgttaagcattaaacaaacattaatccttaagaaattaaaataatatatatatgtaaattaaaatagtctaacttctaaagttcaatttcaaatattcaaatactatcaatatcattatgacattatctataaatctaaatatcaaataaaacatcaaaaaatttaaattttaaataaaaataataaaattatttaacataatttatataatatattatataattttttttactaagaaattgtaaatcgatttattcgagttatattggtaagaatggaatatttattgggtagtttggattttcgttggattatttgagttgcatattttgtcgatttattcagtttggtttggttggtttacttggaatgggcgtttttctgaaatttttgaacacctatagttgtgagctatgaacatacagggtttttttttttttttgtactaaaacgaatcaacaagtttctgtcaacgtggttcagcaaagatttataatgtgaaaattaacaaacagagagggaaaaaaaggcgtacagcagacacatgtaagtgtgatgccaaaaggaactaaattaaatgattggaatacacaactcaaacagtacagaatggtgattcatgctataaacgaaaccacaaaggagaattcaatgagagagaaagagatttgggtgcacctcaaatgttagatagtgtagaaggctgttaataaatttaagcatgctgcgacagagcaatgatgatctgggaatggcggttccacgcattttaagactacgaactccctgcagtcattaaattagaagagaaaaaagggaaagtactaattgtctttagaaataacagttgatagagaagtagatcatacttgatgaacttgccaagccccacaaagctgacgatcaacatgtttgcagtggaaaagaaagcggaaaatcaattgatacttggttagggcttttttagagataactattgacaatggccatcgaacctgaaaaagagtgagacaatgttcatagtgagctcaatcagttgcatattcgtatggatatggccacatttgagaagggttataccccaaaaattaaccacattccaaaaacaaaattgatacaagcaatataatttatagagccagtaaactatgtcattcagcagtctagcattgaatgagggtatgtatgaatccttcatcaggaactctgtgcagcggaaaatcctgaatttgagactttctaccaaaaacattctcttaaacccgtaatcatgatttctcactgcaaggtgcactctcagcagtcactttagaccagcaactgcaacgtactatgttttgaatatttttttatacattttggggtcttgagccccaccactcacccaaccacttgagctaggctaatgcggccagacagtcttttggtagtagaaacatccaaaactttaactagaaaacaagggtaacctcatattgctttttcaacttagttacataaaatgataatttgatgaaagaagatgcctactcgaaacagaccttgtaactcaatgaaagcgtctcaagaccagttacattaactggctcccctaggtcattatcgtgagtatttctgctattttcatcatctttgagagtccctagtctttggagcaaagaacatgtttcctgaaacaaaagaaaaaaagaaaacaaatagatgcagatttatgaaaggtaacaaacaagtttctcagttgcagacaagagaatgagctgtttaccacacaacatgttaagtcctcatggcaaggatcagctgcagctgctgtagtacgcaaagcaaggtctagcagtgacttcagcaaaaaaaaccagtcattaagccttaatattctatgagatttacattttatgtgaaatatccatgaaaggtaaggaccaaacctgcagcttttcaacagaaatctcatcaagcttttttgtcaactcatccttagctatatccataaaatggaccaggaaatcaccctgtaatacatatcaccattttagaacttcatttatgggtaaataaaagattagcaatacacaggtacaacacacttccagaagaaaaatgaaaatgccgctatcgcacacccaaattgaaacatgcacaggcctgctgtaatcaattctctataattcagcgaagctttttgtagaggaaacaatcatatcaaggagatctacttcctgattcttatagagatgtggctttatattttagtaaatataagggatattctcggattcccaaaactcaagggttgtatagtgttgtacttcacaggtgtagccctaatccctttcttatataggttgccgctgtaccttgtctataaaagggagagtagttctgcctctctctttttttttttttatgaatataaatacaatatactttcacctgattatagtgttctatttatcatttattttatttttctggtatactatacagcagactacaataatatagatagattttcagttatccttttcagaataactgaattaataattgctcaattctactgtgtcaataaccatatttgattatttaacggaaacaaataattttttctaagcgaaataaatttccctacagcataatagttcgtttacacatagaatataataacatatttatcataagcctaatgtttgtaaatataaaagaaaatggtgaatgacagtttctgttttgttaataaagcatcataagttttttatatacctggtcaagcaaaagatagtgctttatagatcgcagttttcccataagatcatactgcaataaaaatagcataatgatcatgtaataatgtaaatacagtgccatttagataatactgcatggataaaatattctctcagaatttcaaatataacaagatacaagacaacacatttcagaaataaattgagcttcaccttttctttgatgagattaaggagctctccactggcaaagtcataggctgattttatacattcaagataatgatgatttgtgccaaaactcatcaattttgagttttctgatacaggaacctagacatacactccaattagtcaaatctacaatgcaactacaaggaggacaagggaaattactattactatctttaattttccctccctaacaataaatgttaaaataatcttaatgaatgaaagcaacaatataaactataatagaacctgaacactgtgcccacattccctcatgacatttagatattttcctgttgtcaaaattgtcccagcggtatttgcaaggaagctggggatcccatctttaagactatagcgttgcctccaatacttagcatcataatcttgtgttaggctctcctgtagaattctaaaactgtaaatatcataagacaacttgcacctgcactaattctgaaagaagacaatgtaccttctgaagagttttgttctcagcaatgaaaaattcaccgtaaggatcatcaattaccccttcgtagacccacctgaggtgttataattaccatagaagaagcaaaataaattagagcgaactgctaattataatgcaaaagatgacagtagaaaatgctcagagctgagagtgtttcgcataaaagaagcaaaataaaacatgatgagaacctgctccaaatgatattaaaccagccgctaaccagagaaaccagagttggataatagcagatatcaatggaacagtaaagaaaaactgaaaatggcgagttgttatttagtaaagtagaaaaaggaagactaaagtctcttacagcagagagagagagctgagctctagtgatattgagaacacttaattctagcttattccttcccacagacaagcacgctctatatgagcactcaccactagaaaattactaaaacacccctccactcactcacagccaactagcaaacactctcactgtctattacccctccttgtttacgcatattcaactaaaaaaatagatttaaaacaagaataatcaattcaatccaaaatagaaaaaaaagaaggggcaaaaacagtataaaaacatgatatagagatatactattattgccatagtgctatcttgagcctcaaaggataattatttataaaagactaaaatgaagtccaacataaaaggattaaagggaaaataataaaaatttaaaaatacatcatgtcgtagatattttagatcctttccaagaatttacacgaacatgtgcaccagatagaacattttaaaagtaaagtccaaagtccagaatcaagtgaacatttttaaagtgaattgaggaaatttcaccgtgaacaacaaagtaatattgagagatgtgcagtatgtacctctctaatatgctaaggtatgcattgcttgcacattgtgccatcttttctagcaaagatcttacagcattatcaccagccattgccttggcctaaatattgcaagagtaaatcaatttgaataacaggacatttagcctacagctgatgagtgaagccacagcgtaatgacattttttgttccagcaaactttagtcttatgtacgagatgtaacctggctttgcaagaggttcagaactgcagagcctgcataattgttagctgaagccttctgtatgacagatgataatgcctgcatggaccccatcattggctgcaacataccattttgagaatcctgagtaaacaacctaatgacctcaatgcaaataagaaagttctaagagaagccaaacctgacagtaaaaccacaacccttgtagtgagagtcttccaagccgaaattgatgttcaagctgggccaccatggcatggtaatcctagaaataaaaaacaaaaagacacattcagtgaggtgaggcatattaattgtattagcaaattcagtaatacatagattagcaaccaaaacatcaaagcatatttgatttgaagaggaaattgccacatgattaagatagatttgaatttgaatgttccaaaaaactaaaaaagtaatacaataagacctcgtcatgttcatctttactaaaaagtaatacaataagacctcgtcaagtttaatggaattggtgcagcttttggaacatgtgaacatagctcattcatcgattgatggtaggggttggaagccagaatatggaggctctttttcttgcaaatctgccttcctttggtttacctcaagtcacggatcgagggacttaatgtggaccaaaactctatggaaatgttgcgttccagtaaaagtaaaagtttttggttggttggtggctctaaggaaagcaaatgttcatgaagtaatacaaaagagaagaccatacatggccatttctccgggatggtgtatctgttgcaagaccagtaatgaaatgatcgagcatctgttccttcattgcacatacactcaaaaaatatggacattactttatcaagaacttaggttggaatgggttttgccatgtttggtgacacaagccctactaagtaaaccggtggtaagcaaaagaaaagttaagctttggaggactacaatgttagcactactttgggctgtgtggaatgagagaaatagtagaattattgaaggacaagagggattagcaacctttgtttgggagagaaaaaaattttggactgccacatggatctttaaaaccgaacactttgaggccttttctttcctagacttatgcagggattggagtgcttcgatgtaaaacttgggatttctttctttttgtttgcttggtcattcaatgtgctaactcattatattgttataattttatgtaccatggttttcctccgccacaagtgaggctttaataatatcgggggagccttgccaagtgggctccttctcttttttcaaaaaaccatcctatacaaaaaatgaaaaaatttcaagagaagctcatagagcggatccgctatcttcggagaacggatggaatgcgtatctcggccaaaaagcgcatggagcgcttggtcgacatgatcgcgggggaaagcaaaatattccaaatgaatctccagttttgactttctttttcttacaattcaactttaacataaaagaattgagttcagccaaatcgacactactttagttcattctactagttaagaaaatccaaatcacagggtttgacagatacagtagagcactgcagttattttactgattaggcatattacacagcaaattaacatcaatctgaactaaaaactagaaaaaatcaatgacttgcagtgaagaaaacctactagaagcagtgcccgtagtgcagcagcaaaagcatggttgaccaggccattcttgaattgtgaccttgattcaacaaatcggttgatcaacatgaagctttcacacaacggaaaaatccgcttagctaattcctgaagcagtatgttttaaccagcatagacaacttaagtaataaagctagaatcagctgtacagagaaaaaaaatatgatgattttacttctttaaatgaaataattgagcaaaaccacatgctattagtgtcccattttgagaaaatttaaaaaaaaaaaaacgaatcattgtttccctcttattttttggtctggtaaagcttatttcaatagccatatagtccagaaatcagaagtaataaagccacattacatttaaagcacatggcaaaacgtattcaattatacaacagctaaaagcatgcactaaaccgcacctgtattgctaaatccatggacgcatccatctggaaagtaaaatcatcctccattccacggacccttttaatggaaatgtatcttccttcaattccaaccaatgcagaaagtaggtcatcaataagaataagttcctgcataatcaaacaacatcaaaataagaactaattttcatttatttccagttcacaaaatgaagttacaaaaacgaatcacagaatatctcaatcgaggaatataaatgctacctgaaccgcagcattgtaacacccaataggattgtccgatcccaggctgcagaattcaaaaaataaataaatgtgttcagtttttgcttcagtgttacctaaacttattactgaatcgatacctgaaggaatcaacggaatgactcttcgtttcggcgaagcgggaggcagtcttaacttcctgagtagaatagaatcgaataaaatccccaatcgaggaacaatgtgaaaatcatggaatgaagaaaaataggtaagaaagggaagaggtgagagtgacctggtgaaagcgaccagtgagaaatggcctgtctgagttccatggaggggttgaaggagacgatagcgtggaagaagatgtgtccatgaatacggacagtgggagagagtaaagtaaacacagcactgaaactcaaatcaaatttgtaaatcaaactaagtttattttacattattattattatttttaagaaatacaaaagatatattattttctttgattttggatttgtttcccgctgcccttgtcacccaaaccttgctcttccgggactcacaataactaatattattcaatcaattagcttttctcaacataatcaataataataataataatactcattcaaaaaagaaaaaataaggctaaatttggattttttactttgaacttttgacatgtaccaaattatgtcctctgattttttttagaccgttaaaattctcctgaactattgagtatgttaatttaagacttttatctaatttcatttaattttattgtttctattgattattt

SEQ ID NO: 224807 - DNA, 3116 bp, Cannabis indica
atagccttgatctttctatcaaattggttctcaactaaagttttgaattgcagaaatccgacagagctttattcttggttctgagtgggtaaatctaagtgtgtctattgtgatcatccacaaaatggatgtagaacttgtagttcaagtttgatgtaatgggagctggtccccaaacatcagtatggattaagtctaaaggatttttagcatgattagtagaatttatagtaaaaggcaaggcatgagactttccatgttggcatgctttacaaaaagtttcttttccattcatagtagattttacattaacatgactcaagacaagactcaacacacgattggatggatgacctaaacagttatgccatctatctcttaggaaaacagacttgaatatagcaacatgcttatcctttgattttgacacaacaccagtaaaatggtgaaaactgggaccgactgaattaaagattgaacttgaacaggtggaaagacttggttgatctgaaagttgttataatctatctctaagtttcccttggagaagaaccttctttgtgtccacatccttcacaaaacaagattgagaaaaaaattctacaaaaacattattattagttgtcaactttgaaatgctcaataaattcttagtgattctaggaatatgtaggacattatgaagacccagagagtgtttatttgtacgatttaaccagctagtaccaacatgagtaatttcaagcttattaccattaccaacagttaaggtttcctcaccactataatcagctttctgggtcatgttatttgcatcggttgtgatatggttgctagcacccaagtccacataccaagcagtatcttctaccattttaggagtggcaacaaaggttgaggctcttccaccattattgttaccaaattgagggcccttattggtagagttggatccaaatgggtccgaacccatgtatgactcgtcatacctgttgtagcagtatgcaacactgtgaccatatctctcgcacacctgacacgcaggtttggagttgttctggttcttaccacctcttctacctctgaatcgaccagggactctacctcctctctgttgaacaatgtttccatgatttctaggcccatactgtcctatatgagcacctctattccttagaaaatgtggtggcctagttgtagcaacatttgcagagggattagtgaggcttgtgtttttcattgcaccagagagagtggtcaacctatccaacttattgtcaaaacttaaaagtatatcctgcaactcctgcgacgatgtgaaggttctagcttcaatttgaagcactatgggcaaatattcattgtcaagaccagttaacacatttgacaccaactatttctctgggtaggggtcaccagtgagagttaaaaacattaggccactgctatttttgacgaagatagtctgccatggtcatcgcccctttcttggatgtctggattttaggtcgatactcatccattttgatgcgagaatgagcaccaaacataatttctaaagcttgccgcaaactaaagaagagtcacgatccatgacttctgtggctatgctttcggtcatggatccatacaaccaaccaagaagaagttggtcatggactatccatgttttgaactctagattcacatcagtagaatctccacctaagatttttggaggcaaaaactcaataggtttcacctttgcaccattcaagtagccatccaaacgatgaccacggactatagttgacaccatcgtcttccacaaggtatagttgtttctatccagttttaaagtgaatggttgagtcagtgtgcctccaacttatggaccagggacagttgttgatggagttaagggttgagcaacagtgctggaggcacttcttccagctgaaccaacttgttcaccatgaatagagggcgtagatggatcgaccatggagaagatgggttaatgaagaacaccacctgtgtagagaaaggctctgataccaacttagaaaaatatcaaatggagaaaatgaaaagctcatctcatttgaacatgaggctggccaattgtatttatagaccaatgattacaactgaatacaatgtataatcattacaaattaattaaatcttttacacaaaaaaaggaatatcctaacggtacaaaaaaggacaaagtttgttaaacaatttggggaccaccaaaggttagtatgccatctcattatatctaaccaaatatagagagaaaattatttcacagctgccattcgttcaaccaattcgagctagtttgttggtgtacgtgcaccttatttgggtatccacttttgtagaagagagaggagtcatacaaaagctcacctgaacacctcgccgtcatccgtttaaccgatctgagctagtttgctccaaagggtacccacttttgtagaagagagaggagtcacataaagactcacctaaacaccacacgcgcacgctgctgccatctatttaaccgatacaaactagtttgctggtgtggtgtgcaccttatttatttaattaattaatacaattttaaacgtgtttaactaaatggtaaacaagagatattttctcctcaactttttgagtcatgatctaacgcactctcccacattcagaaacaaaaaagactttcttactgtttgatttctctgagcattccctatttagcgcatcagaaccaacgggagcaagacatccctttttacaaacaattttcccattcgatataattttttagcagtaatatttttagatggtgcattcgacaattcgctacaatgcagtgatgttctgataaagtgtatgacatggttgttttatccacagaacgacaaataatttttcgactacttacacattcttgggcaatgccgtgaacgtcttaaagagaatgatctagtttgcgactcaacccaaaaatttcattcagtaatattgttctttttttttcagtaactgtgtttataacccaatctagtagggtgcaaaattcaataagaaaaattgctatttattctttttaaatataacctatttttgactttttt

SEQ ID NO: 224808 - DNA, 4529 bp, Cannabis indica
cttctgaagttgtgtttgatagcttgagatatttgccaaacttctaatttcttttggcattgtaggtgaagagttttccaggatctctatcaaatatggcttttgcggtggttgaagctctagaagggaaggttagtggtaacttgttgaaaacaatgttctgttaaacaaattattatcacaaaagcaattatttaattcctatattctgattttacaaggacataaatatagggttataagttttttttaatatataatacatattcttcctcactaatcactatgaatttatgttacaaccattaatatagtcaattttgaacttatatacatatttatataagaatcaatacttcattttattctaaagtagtaaactaagtagtcaatcatcgtaaaaagaacagaaaacatcattttattcagttccttctgaataaattggaacttcaaaagttattcttacatttactgcttattctatgacaaattgtcaacaaatttaaaattttaatgttctttgtgattgcagcgggtggacacattcatgactgcgctaagagctcttgcagaagagaggtagtgttgtgctctatttcaccacatgattgatgcttttacgactttggagcagtattgtttactcaaactataaatttatgatccatgtatgtattccagcggattaaacttaagaaagcttgacaagaaattggaaagaacacttctgcattcatatcgcaaggtatgctcacctgctctaggcagtatcacaattatttgtcctatatatgactcacctagtaactcttttgtgtctttgtagtggaaaatgatcgtgctggttaaaagtagactgaggcagtttctttgtttattcatataattacatcaaacatagcatttgtccaattaccaaaatagaaaaagtattaccatgatatctgtttttttccgctaacaattttttttgttcaatttccaatcaaataaaaggtttatttatttttatttttcatttcaacaggaatcttttattttgtatataaataattaaagaattcttactgttcattttgaaaccatttatggatttcatagtagttgaaaacgtaccatgcttgcatttggactttaaacagtttagctttagccttgttactggtctgttatttttgcttttgtaaacttctgcagggatccacttgctcttcttcccaccccttttcagtcttttttcttgttgctctaatcatgatagaaactgtgattcgtgtattgagaatcgaagaataaattgttttggagatttcaatggtgctttgcatttgttaattcctttcttatattaatcttaggatttgatatctcaagtgtcggcagaaacggatccagtttctcttctaccgaaagttgtttccctactttatatacaggtccttgattttaattttgtttttgccggttcgattaatgtttgagagacatgtaacatcaattttccagtcaatttactaacatgaatttcttgtcaatagcttcatcataaagcccttcaagctcctggaagggcaattcttgttgctattactcgtttgaaggtacatttatacatttccccaaaactttattattttgtgctagtttatttaggaaagtgaggaaatatataatgatgctttcgtatttagtacttgctagcactcttggcatccttgaagtaattacacaaattaactacacacaaaatagagagtaatattgccaaattaaggtttctagctaagctaaatgattgagataaggttttttaagttgtagataaaataagagattgaggagttgacattttgggagcctaaatgagtggagtcaaaagtatagtaagaagggtatggtatgcagtcattctggttttcactgacacgagatggtttgtcatacatgcttgtcatttgcgagatgtgttttcatagtttataccacagaaggaaagaggagaagttactctatttgtctgtaacattattaatgattactcgtcttgaaaacagaaaaatgtaataagttaacttttagtggagcgagagatgaatttgtcagactccttgggttcatcaagtatcaaccatccatattctgtgtgcattattttacagcatatagttatatccatcaaagttatggttaaagaagatggtggcttcttacaagaaaaagatatagagttttcaaagctgttagttttggagggataaggacgttcaagctttacagtcattctagtcccgggcctgggatgagaaggttatctgcatgtagattagagttattgcgacttataggccgccgtatcttcccagtttgcatgtttttgtggattttcgtatgatttttgtcaaaagtataaaagaagagtgtggtatttgcaggataaattagatgattcagcctacaagatcctgaccgagtaccaagcagcaaccgtaacccttttagcgttaatatctgcttcaactggcgatgtaagtaaatatatatattatttctttcttgtcaaccttttttatattgaaaaaattcctttacacccttagtcctttacctggtataattctcgtatgccatagtggttgtatcgatgcattaggtgaaactagatctttgttaattagaatcatcatataatattttcattagatgttgttcttatgggttttgattctcatgacattattgggaacggtattggacgaaaacaacaagttataagaagttgtcggtttttttgttatggtgcctagcactacctacaggtgtcatatagttattggtgtaattaaatatcggaaaccactagtgccttgtagcagaggttaaatcatgattcgataaaacatttatatttttcaggaagaggactgtacttctgatagaattttgagcaaacgggagcttctggagagcctaatgccagcactgaagggcctagttttaagtgcttctcaatcctaataacctcagcagatatcatatgtctaaggtcgaaaacccactaatctaatactgagtattgagggaatagcaagaaatgcacttctgtttttcttttctttttttttttgggttggaaggtgcaattctgttgggttgattgtttattccaacaacccataaatgtaggagtaatacagtacatatgaacaatactgtagatactaaaaagtttcaagtaatagtttccttttgagatgtttctcagccttagattttgcttgaatctattctcatgtgcttacttatttaggaaacgtttcagaatttgtttatatcaaataataagctaaaaataactaaatactattccttcatcaaataatttttctctcatctttctattattttcatttaattacctttttactatttaaaatgatataggaaaagaaaaattgtattgtaaaagggtgaagtaaaatataaaaaaaaaaaaaatggtgaggtattttgattattatagtagaaaagttgtgattgtgctctaaaaataccaagattaagcatgcaatttcacagaaccgatctactaagccaagtaccaagtgttttgatgggatcagagtattttaaatttttatttaaatttatgatttttatcaataaaaaaattgatacctgatatttatttgtgtttaacagatcagttagaaaaagaactaacaaacttacagaaaatatgatcttaaaaattattactgttaatttttaaagttagagatttatctacttcaaacataaattttttattttaaaacttttacgtaattttaaaaagaaaaagaaaagtaattaatggcctatgccttgaattagggcggggacttcatagatatgatattatatatattgttaataagctaataaataaagacaagttagcaacattgtaaatgataccaattttaatgctattttaacaaattacaaatgtatcgatcaattcatatataattatgtgataataacaagagacttgaaagactacatattctaattgagatcatcaaaccaatattattaattttatttatcattattattagaatggaaaatttatcgataatgatgttggttttgctgttggtagtgttattacagcatagctttcaagtatattccgatggtaggttataactgcatagctttcaattgcctctagcttgttcattttttctttctaagagttgtaataacaacattttgtataactatactttacttataggtatagtggaaacattgtattattcattaatggtcatttcaatgatcatattcattataatatagtcatgattccaaacagaaataggcttaagaaaaaataattttttggttcttatttttaaaattattaaaaaaaattaagaaaattatttcatatacaattttttaacatttttttaaaatacagtttggattgcttcagtgatttttatgtatattttcgtaaaaataaaaaaaaa

SEQ ID NO: 224809 - DNA, 3577 bp, Cannabis indica
atataatttagaaaaaattactggacttaaaatcagaatttcatgacatcacgtggctttagtgatcttataaaaaaatgtgactaaagtgacgcgttagagttgggacacgctagcgtgactctatagatgagtgttttaatttttttttttttttcaaaaaaaaacaaaatattatagatattattttttagtgaccgctcatatttttattaaattatattgtaggaaactaacactgattatttagaatctaattacgtaggctactaaaagttactcctaactatttagtaacccacactttttatatggtcattaaatagtgttactaaaaggtgaaattatagtagtgatttaaaaaaacaaaataagcatgcatataaatggatgtaccaggtgattccagtcggccctgtccctgggagggtggcttctttcatctttaacagcatgacttgggacctccatagtcttcataatagctacccccacatattgttcaagatattctttccatttccctccagattcaccccattgatgacgatctaatttggaaactcacaaagtctggaatttactcggtcaaaactggataccatctcagtttttcttctacctcccctcccgatattccctcatcctcctctccttctccttggtggaaaaacctttggcatctccacattctgcctaagatgaaacattttgcttattgtgcctccacctctaccctccctaccaataggaaccttgcttctaggaaaattatccaatgcccggtttgtgatcgttgtggaaaccaggaggaatctgtttctcatgccctgttcttttgcaagagcattcgaagcgtctggaaaggtatagttttttacccatattttctctacttctaattacactgtttctttccatgatattgtacacataatttatactactttaaccaaggaagaggtcgaatgcttcctttttgttgcttggtttatttggcataacaggaatagagctcttaggaatcaagcgcaagaccagaaccatgccatattcaacctggccaatggctttctggcagaatacaagtcatcatctcaagctcgctagcactcggttcagtggttcagtcaccaacagcctcaaactggtctcccccgcctcagggtcatctcaagctgaacactgacgctgcaatcccaaagagaaattcaaaagtgggtttcggaggagtcatccataacactgaaggtcaagtggtagctgttgttgcttcttcccacttaggaggaggagatgtggccacgcttgaagcaaaatctctcctcacctcgctcctctggtgtatcgaagagagtttccctatccaccaggtggaaacggattgcaaatctattactgacgccttggcgaatcccaaagaagaccttttcgcttttcggtgatatcattaagcaaattaaggcagctttgtctcttctccccgatgctcgtgtctctcacattaggcggtctacaaatatcttcgctcataaattagctaattgggctttggggttagatgaagtagcggtttggattggtgatgacccatgtaatctatttcttttctttttctttaagggcatccctctcttcaaaaaaaatatacaaatagatgtgtattctttatgtcatatatatatacataaatatcaaatatgacatatatactgtacacagagccggcccaagtattttgggggccttgtgcaaaattttaaaattgggctctttaagaaaaaaaaaaaaaaccgtgtacattaaaactacaattctattactagcatttttttttaagattcatttataaattttcaattataaattttttatttatgttatataataggaaaaaaaaagaaaatacaggccttttctttttttttttaaaaaaaaaatgagccttaaaaaaaatgagggccttgtgcaatggcctaagctgcccaatacttaggccgaccctgactgtatacacccacttaatagagaacaaagatataagtatttaaggttttaagtggcataattcttatatttattttagcaggtatttaatgtttgtaaaagtataatttttctctaattttgtcagtacactttgttattgtcttaaacatgacacatataaggctcaaattcaaaatcattgagtctagacaaaaacatgtatgtagtatcaattatttttaaatgttcttttaataaatttaaattggagtatgcacaaacgaaaataaagaaaaattacagttttacaaatattgagtacttatgccactaaaaataaacattaagtttatgtcatttacaaacttaaaactttaagtacttatgtcactatttaccttataatatataaaagttgaataaaaaacgtttactgtgattgtgatcaaaaaatcacacatatatcccttacataatgcacgatcaacttttgaaaaattcaacttatgtctttggagtcgtgaggtttggatgtctagttgggtctcaaatctcaatggtcgtcttacaatgaggccaggattcactctttaaatctgaattcattttgttaagtagaatttttacacaaaaaaaaaaaattataacacgtaaataatggtatacatgattatctacaaaagcacaattttaccatataattaacaatttatgttttatgcaaaaacaatccatatatattatatattcatatatgtcatacatatctattctatataaagtatgcctatataataaaattcttggtttatgagaaatttatgggtgactttttatttatattaaaaataaaatagtttatgagaaattcattgatcactttttatttatatataataaaataaataaaataaatctcagtaaatcaaaaaaataatacaattgaccctttaagttatgattttggcatatatatatatatatgtgtgtgtgtatgatcatggaacattagtgttttaaccacttgaggctagctcaagtggccataggtgggtgtgtgaatcttggaggtcctgggttcgagtcccagataaaacatgttgtaatatataaacgcttaaataaaaaaaatggaacattagtgttttagtttaattgacattttacagaaacaaaatgatctattgaagtcgaacaatgattcttcaatgtttttaaaattcttatgcttacctctttgtgtttcagttatttgcaatcttttatttcttataatctcaataaatacctaatattgagattaatattttgattgttttgaaactctaaaaattagtggattatgataaatgattcagtttaatgctttcagatttgagttttttgagagaaacatttatgtaggtaatctatgtgtgttctataggaatggttctggaacattgacattccaatatggctattgggttttaatgaataaaaaaacaattgtgatcattattgtatttattgactcattgtcaaagaaggttctgattgtagtaccttatcatgttcctttttactcaacaatacaatacaatagttg

SEQ ID NO: 224810 - DNA, 7878 bp, Cannabis indica
aacaggttgacgaatacatgaacagttgcaaaacacaaattttaacgctcttctcatagagtgcgaaagaaacggtgcaattcatcttttctttcttttttcagaaaagagtacaatttaattactcatacttacaagatcaaaaatagaaaatgtattgtcataaaacagcacagcgatgcgccctctagttcggtctccagctacaacaggggagaatttgatccttcggattccttctctatgagtgttgaatgaagacgactgtccagttgttacatcccaccagcgaatgtttcccgacctgtctcccataacctgaaaaaacaattctataaatttagaaacaatcggatacacatactaaatatttgaacaacatgatggatatggtacatactacgtgaggcaagcggtaggccatggctgttattagtccgtcagatgaaacaaatgaagaagaaggccatttcggcctacaaatagaaaaaaaaataaccctttcagagagctgaactgaaacaaaattaatttgttaagaaaaataagcgcaattaaaagaaactaaatatctaaaaacactgaacagattagtttgcttatggaattaaatgaagtaataacagaaatgaataaacttgaggggctattagaagtaaaataggtgccacatcacagaaggaaaattaataaccaccgaaatttcaagttattcaaaagtagtgttttcaaattattacccttgggcaaccaaaggatgagaactttaagagctaaacactaacaaatggacaattcatgagcaaaaacttatgaaacaatgctagcctagtatatgagttttaagaagtaggaactcagcaccatgtttcaatgtcataacatagtcatatccacacagcatcctattacgtagaaataaaacaatacctgaagtcacggatccttctcccatgaacctcaaaaactccaagagcaccatttactagagcaaatgcaaagctctcagaagtctcttcttgagatccatctgagctctctgcattgagaaacttacattcaataattcaagtagaaaatccaaatagcatcatgtcatatgggtacgcaatcagtctaaagtatacaagcatgtcaagtaaactagctcactggaatcacttgaagaagcctttgttgggcaagatgctccatctggttctccagatgcacgatctttgggggataatgacgatggcttagcagatccagtttgcccaggccgaggagctgttgggagggtccattccaacaccgtaaatggaagtgctaatgatctaagctacatgagatataagcataataaacacccataataaaatagtaaagtataaataatgaatataaaagtgtaccgatttaccataataggacttttagtcattgcccaaacttctaccggtgcatcgcgaaacaagattagaaggtatctgcaaattgttaacattataagtactatatgttatatcttgtatacatcgcaaacatgcaacaatgaaattaaagccaagctcagaagagtatcacataaacttttgcaatgatggtgaactgaagaaaggatggactagatataagttgatctaagtagaataatcctgctatatttgcaagttgggagaaataaatgcagaacaacatgactcgtgacatttatgtaaagtccttatataagatcactacacatttagtaaatatgtaaaccaaaggtccaaaggcaaatttaaatttgtccctgaacgttgttggaaacaggtatgaaattctgtccaaagcccttcaaacattatctctaacatatttattttgttattatttgtctccccatttggtggtcatcggttgaatattttcagataaaacaaaaccagaaatatcaagtatcaaaaagttacattctcctcatacacatcactatgttaaaattaccttatttaactccactctccacttcaagagtcagtcaaatcttaaagctaaggagtattgaaagaaacaggctcaatagtttctactagcaatgtttaaataaatggatatcttattttcagaggaaaaagttaatggtaccaagtgtcctcaaacttaagaacttctcaagtaacagaatttaaagtcttaaaacgaactactgtaagcatagtgcatacaaatgaaatttgagaatgtccaagctgcaccaataccattgcaaacagcaagtgtataatatgttgaatttgtattttaagaattacacgagaaagctaaacattctgaaggagcattcacaaacacaaataaaacaatattatgaaatacagcttaaagaaatcaatgaatgaggaaaaatgacacctagaagcttttgaaattaacctgccagaggaagaggcccttagagctcttatgggtgcacgttctggcttttgtagtatccggaatggtctattaaggccacttctcagacaggtcacaacaagtttgttgatataacctccagatttctcattcgcctaatccaacaaaatttacagaacatgtcactatcaagtaaaataaattgattcaaggtcgatcgttcaccttgcaaacaaggtaaaatgcattcaagtagctgatgacattcaattcaaagtgatatacctggctaaatgaaaatgaaacaacccttgaatttccaagccatcgtaatcccctaaccataccattatggacagagaaacttgcagcaagagcattagctgaaacatcaacgacatcaattgtcccattttgagttcccaaagctaccaatggaacagctacagcaggatatgttcctccaccttcacattaatcaagttacaccgtgttacaatttccaacaaaactactgaaaagttctaatgctttaacaaaagaatactgataattaagaaaaaaaaatcaacttgtaaaacagattggcaagaagatgaactaacgagccaaggtagctgttaaagaaggcgatggtacagccagcatcgtcacttgtgaagaaagaagctgaagctgaccaactaagctaatctgcattattatttggcaggtaagtatgcataaatagcctgcgcaaagggatataatgctaaatggtggtctcacagttcaagacaaatcactaacacagaaagtgagtgttaagcagtatctattcaatagaaactacttttttaattaaaaaaaaaggaacaatctactttgttccatctcttttgcttatattaaaacccaatataagtaagataacaagcccacatttggaatttcgaaaaactttattacgatagtgataacattgcaatcaggtaaagggctatactaagcattattttttttttgaaacctcacttgtggcggaggaaaatcgtggtaaacaaaacctaaaaagtctctcagcaaacataaataaaagcatgagaaaaaacagaaaacaacttctgttagtacatcaaaaatttcaactctctgcataaatataggaaagaaaattcctcaaacagtttggtcttatataaccaggtagctgtccaaagcattgtaattcctgaataattattagtgtattaacttcaggcttctccttagttgattttgtatcataagtataatttttttcgaaaatcaaatgtgacaaagtattttccagacataccttaaatgacatatctatttgcttgctggtagacttagcatggcggcttctgctaccaggcacatactccttttgcttcccttcttccctagcaggtcctttgacagaagaaactgtttcattactattatcccctaagataggcacctcacttacatcagcaaccaagcccacactactattttccttctgagcgtcttccactccttcaacagtcagtaaccagttccatatttttccatcatcaaaaatagagaccaaacaggtcttcgaaacaagtggaggttcatcacaaaaatcaaacgggctatcaaaatcctgagaattaggtgtttcagaataaagtttcccaactttttggagggtggaatctgaatggcagatgatggcagcaagaagtgaaggagaagggacagatgtgcctaatgacggcatcaactcttccattgcgcacattgtgtgaacctgttcttctctgtaaaatgtctgttttaataattttcttcaggaaagaattaaaaactttataacgagaaaagccagtagaatatgtaagagacattaaacttgaaacttcaataattgcagaaaaccttagcaaatactgaccagaagtaagctcaattcagagcacattccaaatacttggtttttttttttttggctaacaaaaaggagaggagaaggctaccaagtgttgctcccctctctgggcattaccgagatgttcaccaggaccctactcagggtcgcccccacctacaacggggtgtgtcattggccccatccgaacaactagtaatgagtggcatcctgaggtagaggataaggcaatgggctggcaagaatcaagccttcacattttaagactcgtaagagaactaaccatgctcaaacccttgacctccagccccaggatagcaaagcactatcattaggccacttgtttgcttgttgttactaacactaaaggtgtgtctgaacattttctattatggtaaatgagtttccatgtcaaaaatcaacccgaacaagctacctatagttattgaattgtaaagcatacatgaaatattttaatatggtttgactgactgattaagaagttaaattgaagagaacatttccagttctaactccacactagaactaatcgtcaagctcatatactacaaatttagttccaggctcgaggagcatttcttatatcacaaaactaagaagtaaaatcaattctattagcaattatggcttactcttttcgccgccaggtactgagcttcccatcaaggtgagcacaatagagaaatccattattcggatcgggcaacacatccagaaacttgccacaaccacgaggtaacgcagttgaaaatagcacagtctcgtactgcaaatcaaatactaccaactcttttggaaacgtcacgaatacaatgtgcctacattgaggcgaaaaggcaaacttcaccatatacaatgggaaaatagccgatgccggcgacgtagacgtcgtccccccattggccgcatccctctccagcttctgcaactccgtgcaatcagtccgaatctgaaattcctttataacgacatcgttttcagtctccccaagaactttgaccgacaagaggaaccctttgagtccaataacgcaaaaacggcgagcatcaaaaggatcacggcgaatgcaggacaggaattcagggctagcatcgtacttccagacgcaacgaccggtagtggtactgtaaagagagagagacgatggaccagagatagcagcgaggagatacgagtcgggccgtgcctgaacccaacatagatcctggacactaagccgggctgcgtccgattcaaaccagagaaccggcgacctgagtcgaagatcgatgagagcaattcggccttggcgatcagcagcggcgaggagaaggtgagaactggagggctcagtagtgagaaggtcgcggcgaagagggagtggggtccatcgtaaggaagtgacgaacggagagagcgaagaagaagaattagaagccggaggcggcattgggacagtggcaacaagctgcatggatcgagagtcaacgacggagatagagcttccagcagcgaaagcaatgagaccggaagagctcaaatcagcggatccaaagttgcttcggctcggtggaccgggaagcatacagtcccaggaatcatgaggaagtggcggtgctgccgtggccaccgccgtcgtcgtgggcgacgtcgccggtctcggagtcgccattagagatctgaaagctcagaggattcgtttttggttaattatttatgtgtttttattttgatatgtctaagattttatttaattaactaattttaatatttttaatgtcgcttaatttctttcttcttctgccgcgaaactctggcgcggaagtaagatccgtaaacaagaggaacggtacggtttttttttcggtgaagttgaaaaatcggcccgaatatttgtctagaccgggccaataacttcggtagcttgttctaaaacttgagatgtttttgtttggtactttttttatttaaaataaaaaacggaagatgacttcatacattaatcaacattacaaggaggcaagtcacacaccattacgtgaccagcacaagggaaatcaactccaattttcatagtactaacattcatagacaatgcataattagctaaacaatttgtcacttgatttgcatccttaccaatatgaactaaatcagtgactctcgtttcctgcaacaactggcgaatttcttgcgctgtctctgcagttttcctccactgtggaaatgagtttcgcagcttcaaggcaatctgtctccactttgaactgcaacaattgacgttgtattcctaccagtatctcatcacgaataccctcaagttcagcaaccaatgaggaagggccaccagtacaaaccttagttgctgcaaacgtaacagctccttcttaatcacgaaccaccacacctccaacatatctcaaagcttgatactgaatcttctggacagctaccctatcatctggcaactctctagaatctaggaacttgtgtatgtggcctatccaggaagttgaatgatcaatgacgcttaccccagggctattgtgcttagaacaacaatattggcgatgagaactagttcacacttctctatttctatatttgttgttagttttgctaacatataagtattttggtcccgagggactttcttgactgtatatcttttgaaactttggagcaactcgtgagattttgatacataactagccattttctcaccatttgtttggtattcgctggatatctggtttactaccagttgagagtcactatagagtttgatgttctgggctacaacttctttggctaattacaagcctgcaatcattgcttcgtattctgctttgatgttgggggcaaggaattcaaaccagagagcactttgaagttgatgcttttgcagagagatcagaatgattccggctccataacttttttcatttgatgctccacctacataaaccttctagacttccagttccagagttggttcttccagattgttgttaattcttgtgcattatacaatgaagtctgctaaagcttagctcttgattgaaactcttggttgatagtgaatattgaactggctgagctttgttacccacttcagtattcttccgaatggctctggtttctataacacttggcggagagggtgatttgttagtacctttatggcatgagcctgaaagtatggcattagcttccgtgaggcaattagcaagcaataggaaagtttttcaatcattgtatatatggactctacacccaagaatcccttaattacgtaatacaccataagttgtatcattccttctgttggataatatttcattaagacttagatttactaacaagtatgtttattaacatcctaaatatgaatttctaaaataatgaaatttaaacacatataaagtttgagtaaccttacattgattgtagtgaaatataatgactgctcccactcagatctctaacccttattcctttatgtcgcaaagtattataaatatttaagcccgattctccttctgttgttaggattcttcacagtcttacacactatg

SEQ ID NO: 224811 - DNA, 10450 bp, Cannabis indica
ctcagttcatttaaaaatagaatgaaaacagattattaaaagaaatctagcatgctatacttatgcagcacagactgtgttataaaggaaaatatactagatctcccgtgcagggaaaggtttctcaggcaaaaccaccccactgctgagatatcttaatacttggtacctatataaaacttggacttgagtgaaatgacagattaagaaaagaccaaggcatacctaatataaactcaaggttagtatatcgtcttattttctacctatatatttttgttttggctttcatgaagatattactaatttataaaaagatcaaatcatgtaccagatgaagatattactaatttaattgacttattctttttccacaataacaattttcttcttttgcaaccaagaagcaaaagagctattaacaaatcaagagtctatcgattaatttggctaaagccaaaagaaataaattgacgaaaattgtatcatttagtttgggcaattgcatccctcgttatatccaattcactagtgtacttttatccatgaaaatttcctttagttacaagtggacacaagtcctcacaggactatctcatccatgcagttgatatacatggttggacaaacacacaaaatattgtcaagttctacgaaaagataaaagttacatgattgaaatatgagagcttatgaatgcaagataaaaaggcaatggaaggaggaaaataaccaagacagtacccaaatggctttactagcttaccttcccttcaataagcatattaagttcttctttaagctttaaaaagcactcagctaaactaggatccatgaaaaagtcaacgtaaccatccaatattttcaaatgaccagcctagaagaccattgaaaatataaagttagtatagattcacagcaattcaatttttttacaagatgtagatttatataccatcagaaacactacctgcactccttgatgtaaagcaccaccaaaaagaatcagtattgaatcagagacaccagtagaatcacgtatgaaaacagtattgacctttactttttcaccgaaaaccaaccatgggtagggaattgtttggtaacgtgcattaacagaattctgaaataaataaaataccagtatcagttaatgactgtgcttcaatatcagaactagtcagtcaagctttagtaacttatagaaaaatcatggatacaattaaaaagaggcaaatataaaatcatttataaaagatcacacattataacaattcccaagatgaactttcacgagttctcaacaaaagtaatatcaaagcacagtattaaaactacaagtaacagagttattaaattagacttttgaccttggaagtgaaaggagaacctgataaaatattctatacatagaagtttcaacttagagacttcagatcatgcctcaaacaactgtcaaatctcgtggatggagagattgtgctagatctagctcgagtctcatttatccttatataatttaccaacattctacttgcatttaagtattagtcaaacgatcttctctcctaagaattgagtatacggggatatgaaagtattcttacaaagtatgacaactattcaatttatgtatcctctcttcacaatgatgccatcctaccatctagttgctctagtagagtccttttcttttcttcataaaattctctttggtaattccattttcctttagagatatcttattgagtagtaagtacaacaattttttgtttccatctccctacaaattaccttccccatctttccaattctctgctttcattattaattaatttacattttctctggtctaacttgctagtcaaattccaaacaatctgagacatgataagggctgtgaggaaccaagtgacagaaaatgagttcataaaattgtagtgtttagggattggcactcacagcgtatagtaaaacctgaccatctcccattgttttgaaagacatagatgtctcacggtgctgcacagatggtgaaaaaataaaagtcagcaaaattttaagttccagaaagagtaatatgagaaccatcactaagtagcaagctatttaccactacagacgctatgccaggaaaaaggccagaacaaattattgcacggactaatgattggttgtgacttagtcggttattattgcttgcatcaacgtctatcaacccagcatctctgagaatgaagctaaattgcttccgcagagaatggatagcttgaagtgtttgggctgagaggaaattcctccagcagtactcatacgccgacccttctctttctgcatctttccatccttcgtatgcacgaacaagagccatatgatcactgtaatccttagctgaaaatctagactttgccgttcctgccaactgaatacaaacaaagaatagcaagtgatgtttggtcaaagtagaagtagtacttataatgtaaatgggttttcaaatattatccccttgaaacttaatccttctgcactttccgcatccaaatttaatcttctgaggacaaaaatatatgtatattttacagcactgtaggtactaggtagtacttggattctgtacttacatctttcttatcttgaggcaataagaaaggatccctcacactgagtcctgatactattgtaagaacaggatcaaaacaatgaaagacggcacccatgatcagcattttccctagtttaggatccaccgggagcattgataaaaactttcctggaaaaacaaaaaggacaatagctaagatgcaaccataaaaaataattaatttactttctcataagagtattacagactaaccaagaggtgttaaattttcattttcgtcaagtgccccgatcatcttcagaaagccaatagcattttggacctgttgattcattcaatttaaatatgtacaatccacagaatttttaatttgcttaaaaaaaaagattgttaaattaaccaccacataaaattatcagaaaattgcacaatatataatcagtggatccatgtcctataattaagcagtcaaagacattactctttacatgaatgacattccttgaaatagaatgagcagagaaaaagataagttcattgggtttagactggtgcattaggaatcggagaaacaagtatatcctctataaatcttatcatacaaatttatacaacaaaaatatagagctgctgcatttggttttctgagaaaattatgcatgacacggatatggacccaaaatgggattgaaaacagcaacacaatgtaactaagcaacatcacttacagcaagtggttctggtggctgcagggcagatgacaagaattctcctatacttccaacctgcaggctttttatttgcaagcatagagagtttaaaggagtcctcaggagttctggaagctgatattctgcaaaagcttcataaacacacttcggatacaggtggtaacattctcccggctgcacacggccagccctaccttttctctgtagcaaaataaaataacataatttatattaggtgagggagaatttccgtaatacagaaatgtaaagtaaagatgccaagggcatcataatggcctcaaataaagtgtgccaccatctattgtatctaaggctatccaaagaaatacaaatctaaggccaccaaacattacaaagaactcaaaaacatatttggaggagaaaaaaacaaagatgtatgtacaaataggccaacaatcaaattgcatagaaggtataattatgtgatttaagtaaaaactaataatgaaaagtaagcaagttttgatcgttcaaaagacaatgtacatattctagggtaagtggaacaactagcctagaacctagaggcaagaacttacttgccgagcagatgcttgtgatatccaggaaggtagaagacaaggggtattattcaaagcatcatatgtcgtctcttttgccttcccacaatcaaccacaaaaactatatcattaattgtaatgcttgcctctgccatatttgtagccagaatgactttccgaacattaggaggtggtctgtcgaatataagtttctgcaggaagtgacaacaacaacacagtagataatgaataatcgtgcacttatatgtcaatttagcctttgacaacagtttatgaacacgcaagtagatataccatctttgatttgaaaaattatgccacactcataattgtttacacatgatctctggtttgaagaaagaaaagaacaataaaaatgtaattaagttaaaacacaccgaactttattggagtttatttggttagttcaacacaactactagaaatcacatgctatgttagaatctattgaagagtccgttttgccacataatgataacaaataatgctatgtcaagatcttgtttggtaacaacattgattatgcattagctcattgacagcattcaaggacaacataccataccactttttagtcaggaaaatataaacaggaccactcaaattaatctacacacaaatcttatggaagattgaatatgaaaacttaacaaacctgttcagaagtcgccattgaaccatggcaggttagaagtaaaactctattaggatcacccaaaaggggatgggctttaagttgatccctcaagcagctgatatcctcccacccagtcataaacactagaacagcgcctggtctttcctttctacagatatggcataaaactgcctcaattagattgaaccctatggaatcaggcacccaagatgccaacgagtcacgtgaccttgggctataagtctcaaatgttgccttattaagagcgtcctgttcaaaagaaacaagataggcaactctcagcagcttattacagaagattgcttacatctgccgcttctatcaagctaatttacaatttatgttactttcaatcaaaacggacaccagatagaccctaaacaaaaagttaagttagaagagactatagttgttgcacaacatttcaaatgccaagaaaaaaatgcttaattattatataagttaaagttatattgttccagaagcagaatataacataaatatgagccataaaatacattctgttaaattttgattttttttttaaaaaaatctgtatatccgaatattaaagaaaatttacaattacattatttgttgttgaataatttcaaaaggaaaacaaaactctaatttaattatcttaccaaattaacccgtgcatgtacaaacaattagaaagaaaacttcggatttacatttataaacaacactttacatttacattcagaaaaaaaaattctttaacaaaattaaataaatatattttgttttaatttaagtttttttaaaaaaatctttaaaatgttctcgaatctaagtgcttaagatactcaattttttgtcataattcagcaaaatataaggttttctatagtaatttatttcttccattttttaatatattgttcttatcttttatctacaaaattgtctatcacttccaacagaagtcacatgatcagccattgcaaacaaatgtaaagagatgcaagaaacaactaatattgtatttttagcactcaaacttcacctaacccatgcttttaaggaaaaggtaagcacaacacacctcaacaagagtagtgatcaggtttttccttttccggggaactagctgcttctgtgttttccacagcttctcttggccgtaatcatcgacttgattgaatgaactcaacttatatccagtcatttctagtacatcttcaagaaaatgtgcttttactgggtaagtaaaaccctgaataacagaccctaaaaaatgtcagcttcaatatttatatcaatatattattttttaagaaacataaactattattctttacctttaaacaaaacaacactacagagtcgtgtaagacccaaaataaaaaaaaaaaaaaaaaggaaaaataaaaacaagaactatttattttgaattgtttagcacagatggtgccaccactacctaaataactaccccttacccctcccctcccctccctcacaactaagctagcttcagtggcttaaacaagtatttattaatgtagaacaaaccaaaagataagatatgatcctaagttaaaagaaagaaccccaccttctaactaaatctgaaaacaaatggtgagtttttcaaatcataaaccaatgtagcaacccaatacataaccctgtcccaaactgcatctgaatctctcaccacatcttggaagattcttccattcctttccaactaaatcgaccacaaaatagccatataaagaccttaaatacagtaatgatttccaaagaaaaactgatctgtacaatacaatatgttatgacaactattcagtggtttccgcatttggtataattgaactccacttgctgaacactcttcaacactcagtgcacaaacagtaatatccatgttggaaactgcaaggtacccaggaattactacttacatgaagttgactttcctaatttacttgactgcatttaatgttttagctgaacaaatgtacttctagaaatcagctctatatcgcaaatagaatagtattctagctagaatagctgacagtctctctttattgccgcagcaagcaaacaaatacagagaacaagtacgagccagcttcagtcagagctcatgaagtctaatataaattataaataaataaaagtaaacaggataaaaaattagggttcagcttactggaatatgaattgttggtgccccttcataaaaattagaaaatagatcagcatttagtgtagcactcattaaaactaatctcagatctcgacggcgaggaagtaaatccttcaacacgatcaataggaagtctgaaaagttatacaaaatcaaaaatttagaactatataacctgctttagcaaaaatggctactgaactgaaactttcaggaagcacaccttcattcattcctcgctcatgaatctcatcaacaaaaacatgggttatgccatttaggttgcgatcgctcagcaaacgccgaagtaaaataccacttgtacagaaaagcaagtgggtgttctttcctctcattccctctaatcgaactttatagccaacctaccaaaaaatatctgttgtggtatcatcatgcataaagaatccttaaatttgaaacactacttattttctttttctttttttgcttcataattataataattattttatttattttttcagaaaagggggaactgaatttgcagcttcttgtgtgcttgagggagatatgactcactgtttcaccaagaggttctcctctctctgtagacactctttctgcaacagtcatagcagaaattcttcgaggctgcgtacagatgatgctacagaatgctcctcgtccagattcaatctctgactccagcacatactgaggaagttgagtggtcttcccacacccagtctcaccagatataactatcacctatcattgttacaatttaatcagattgtgatcaggagtgtaagagtaattaactcgtttaataatgttataataaaaacagaagaatatcagagagcccatgtccatcacaaggttcagaataataccagaatcaaatatgaagcccaataaagtattatttaaaatagggcactggatgaaatacttgaatattgtgatgaaaatagaagcatcaaatgatacaaaaagtcctagatacacaatagcactccttgaaagagtaaccatatgtttggctaaataccatctgaaaagatacttgaacaaaatgaaaataatgcacatcttatatagctaatttaaacaatgattctaatatttcagaagcacgatttaaaaatctatgctgagttcgcgattccatattaatgcacgtcaatttgctgcacattaatcaaaaaaggaaacttaatatccatagtccagttaatctgaaagaagaagctgtccttagcaaaaacagaggaaaaaatagaccataagtctctgactaagcttgacatcagatgacagcttgtcctttattttatattttaaaaaaagagacaggggtcacttgtcttctgtcaataaagattataatcaaaggagtcttgcaggaagcagtaagtaaatcaacgagatacttctttatccaaaattatgattaagtttaagttagaagtgtgaaaggcccacaactacacatctaagtttaaagaaaactgcttcaaacaaaaaataagaagtgtaacttgaaaagaacaacaaaaagaaatgacaaaaactttctactcaaagaaaaactagtttgattaatatgctatgaatttacaaagcaaaaaccttgatttctatctgaatttagatgagccattttcgaaaaaggaacaatgcacaactataatgcctatagtgatttcagaacatgtaaacaaaaatttcatgtaaaaataaggcggttgcataaccttataaatagccaatttaataaccccaaaaagattatttggggagcataagagatagtagagtgaataaatataaaacaaaatttgtaattatttaaaatataaagatacatttttttttcctttcttaagtcctgtttacaggttttaacaaatgcaatgaattgatctgcaagggccacatttaacacaatttaactcaatcattaaaaaatccaatgcaatagcttggaccaacctaaaaatgaactatgagaattaatcattttacctccaacccaccccctacttcccttcaccaaaaaaaaaaacaattatggcaaataatagcagtaatagaattctagaatacaattcataagaggatagcatagaaacacacagtgtagatgaagtgaaggaaaaagaaaaggaaaaaaaaaatcaaaaagcttaatgatataaacctgattttgtgcaattgcctgaagcaacctatccttctccttgaaagaaggcagtgatttccgaaattccaacaacttcttgccttcaggtgattccttttgcaaaagagaatataataagaaaacagagatgataatagtctgtgtatcctctactctatggaagaataatagaattagaagaaaaagttcgacagcatataagaaagcttgtctgcgttaaataaacttcataataaacgataccatccaagttctttgcatattacgcattcgcaaactcttcctctgaagaaccttttccatgacagagcgatcaaggaaagagtcggcattctcatccaaaatcacatcttcaacctgatttataggcttatcatcacccaaactgttagtgacctttccagaatttagctcacatcgatctaggtgttcctgtagcaaaccttccaccctcctctgcaaacctagtggtataactacctgcaagagtagtgcatcaaagtttcaaccctccataatactagacttgaccattatataaattaagtaaatatgaatcagaaattcaagaaatgactacctccctttgtggccgcttgtcatccaaatctggcctgtaattaggaagagggaccttgctggcaaccaccactttcccataaagttcactgaatacaaagagcacacatgttagttgaaccaatgtagatgataaccaaaattatgataatggtcaataatcctccacctataaagtcccatccttttggcaagattagatatctgctcatagtctcttctatctctcttatctctggaaacaatctcttgttccttttcattccgtaatagaaggctgagtttccatttccattcatcaatgttggcaactgaagatgatgcctatataaccatgacattgacttagaattgaacattctcgtaaaagatttactcagatatccacaaatttaatttgatcataggaagttgtgactatagaaatttaaaaatgtaaattgttaggctttatagatatacatatcctgagagcatagaaaaacaaatgtaccaaacctacttgaagagagattaaatataacaataatgaacatttccaatcatagaaaccatcagggtaacaatcacatgaaactaccaactcaacaatcaatgatcaaaataagcagaattcttcaacttcattcaatgctcttactttcacgcatataataataataaaaactttgaaattaaataagaaagagaatagtaaccgagtggctctcaaaatcgcagtcgtactcgtcatcggagaactgctcagcggcgtacccgcgatagctacgcaacgggactagaaaactaccatatgaaacggcggaagaagaagaagaagaatgtggcgggagcagagagagcagattacttgttgccctagaaatgcaaa

SEQ ID NO: 224812 - DNA, 6018 bp, Cannabis indica
tttttttttttgaaatggaaatcttatattaaaggacaaacattacacaggattcggctcatcaagcaagactgcttgccgagcacaaggaggtataaccccaatccacatagcactaactttgtgtaccaaagcataattggctacagcatgagcggctcgattagcctctcgaaaaacaaaggagatatcaacacaactatcatgagaaaataaagctctaatttggtctaacagtccatcaacgtcacggcagccattctccttattttggattaacttaacagcttgtagacagtcggtttcgacattaaacctccgtagtctcctctgtagtccggcctgcagtcccttcttgatagccatgagctccaattgcagtggaggaagctcttgttgtagcactgtagcagcagcacaaagaactgcaccagccgaatctctcattacataccccaggccagagtgcaatcctcctggtttaaccccagcatccacatttattgtcacttgatccaccacaggaggcacccatctccgatcctccaccatcgctgaattgctcctgctgcccgcctcgcctctaaactcatcaaggtacctgccacaccattcaatcatatcttctggtttcggatgataaccaccatgaaccacactattcctcacattccaaacattccatgataccagtaaaaagaattccagcttctctttttcccattcagccgccatgcgcatcagtaaagagaggttatcagttcccaacatctttttaaactcatcatatacaccacttacaacccaataacctttgctggccttgcattcccacaaagcatgggcaatagactcatcaacatgactggatcatcgagaacagataacacccgaattaatacctcgcttagccaaattgacattcgtgggcagccaattatgtgcgactttccatacaaaatgcttcaccttaggagggattttgagtcgccacagtttcttccaccactgaaccaaagagtgatcactggactgatgatgttcagtaatcaaggaactagccattcgatacccactcttcaccgtatactcgccatttttgctgtaatgccaaaggattttgtcttcgaagtcccaatccgaacaaggaatggctaatatcaactcagcatctatagtattaaaaacggatcgaatgaaactttcatcccattgtccatctgcccgcttcaaatcagtgacataaagattttcaggaagtgtaggttgatcatacaccttgaaagtgagaggacgtgggagccaaggatcttccaacacccgaacactctcgccattaccaactcgccatcgatagcctttcaaaattagtttctttccccaaataaggcttcgccaaacaaaggatgcattggccccacatccagcctccaaaaaccccttgcgtggaaagtatgaagcttttaagactcggctacacaactgttgtggatgtcgtatacaccgccaaatttgtttcgcaagaagagcttgattgaacatccccaagtcccgaaaacccaagcctcctttatcttttggccgacacaagtatcgccatttgcaccaatgaattttcttctccttatccgatgaaccacaccaaaaatgtgatgccatccgatgaagacttgagatagtttttttgggcagcttaaaacatgtcatggtgtaagtaggaatcgcttgaacaatggctttaattaagacttccttcctcgccacagaaaacatagagtttttccaacccttcatctttcccaacaccttattcttgatctcatcaagaaattccttcttgttccttcccacaaaagagggcaaacccagatatttaccatggttgtcaacctcccgaacccccatcattccagtcagctgggatcgggtttcagcagacacattgcacccaaaacaagcttctgacttatgataattcacaatctgtccagaggcagttgtatacttagtcaatatctgttgaaattgtagacaactatccatatcagcatcaataaagacaagactatcatctgcaaagaacagatgagaaaccgagactcccagtcgaccaaaccgaatccctcgaagcctacctgcactctcctcttgctaaattagactagataatgcttctgcacagaacagaaatagaaagggggagagggggtccccttgtctcaaatcccgctcaggtatcaacttccctttaatttccccattaatcaaaaaagagaaacttgttgaagtcacacatcgcatgatcttgtcaacccaacattgagcaaatcccaaccggctcatcaccgcactgagaaacgaccattccactctatcatatgctttcgccatatcaagttttagggccattttgcccccgttctgaaatcaattcttcctcatacagtggagactttcataccctatgatagcattatcatgaataagcctatccttaatgaaagcactctgcgtatccgagataatcaaatccatcacaccactcaaccgggcaactagacatttcgaaactatcttgtatatcacattacataggctgatgggacgaaactcttccacttttttcggcttctctaccttcgggataagcgcaattatagtttcatttaagcattccaaattagcaccatgatttagaaccttcaaacacatgccaatcacgtcctgcttcaagttactccaaaacttctgataaaagagagctgggagaccatcacaccctggtgctttagtgggattcatatccttaactgccttaacaatttcctcagcagtaaagtcttcaagtagcatttcattcatatcatccgtgactttcggaggaatcacatttatcacctcttcaaacacatcatgcggcatagaggaagagcaaaaaatattctgaaaataattttccacaagccgctgaaccatgcccgcctcactgtgccatacccccatgtcatccatcaaccctttgatcgcattttttttccggcgagtcgatgccttacgatgaaagaacttcgtattcaagtcaccccattttaaccataaagccctactacgttggcgccaatacttctcatccttttctaaaactgcatttaattgcttctcaattttcttcacctccacccaagcccctggatctgaactggaagataattcaatcaaagttgttttcagctttttaatcttctgattaagaactttcttctttttccggttccaactatcaagagctcttcccacttccccagttttacgtttgtaatcaccaccggaaataactacatcccactctcgccaattcttttccactatttctttacattgatcctcttcacaccaagcctcctcaaagtggaaccgaccttttttggtgttcttagcctccccattctcatcattaaccaaaggcatgtcaacaaccagtggcttatggtcagactcccaccaatccagcacttggatatctgccccatcaaaactcaacaaccattcttcattgcataaacctctatccaggcgctccataactgtgttggattcatgtccattgcaccacgtaagatcagatttgttagagctaaaataaatcaatcgacaatcatcaatgacctcccgaaactcttccatagccccagcactacgcacccggccccaaccttctcagccaaactaacaatttcgttaaaatctcccacacacaaccaaggcccatgaatttcccgcttaatgtttcgtaataattcccaagaaaaccgtctttgtgaagcatccgaattaccgtaaaaacaagttaaagaccaagggagaaaattattacctgctaccctcgcaagaatatgtcccacagaactcgagtccactctaatctgaattccttccttccacatcaacaatagacccccactcagtcccactctatccaccgaatagaaattctctccaaactgcaatgttgcacataaacgttgagcttgataattagtaagtttactctcagcaagaaaaacaatacttggatcaaactctttgatatggaattgtaaagctctcaatgtccaagggttcctaattccttggacattccagcgtaagagtttcattgcgctcggcggccttgctgcacaaggctcgccgcttcagtatgagtagatggagatgggaaatcaagcttgctagaaatacccgcccccgacacagtaaacgcaacttcctcctccccgtacctgatctggctcgaaactttatcaacatattgatcctccaaagaccgcccatccccacaaacaccactatcaacaatcaaaggcttcacagataatcccgttacaccccctcggttcccccccttcgcatgagctttagatttaatggaaagcttcttacgctggctctgtttacttgaattaccccggttcaccacttccgtccccccaaatgtaaaattgtcaataccttcaatctctatagatacttgttggacttgcttccccttgctcagcatacattggagagcttcagattccaaagaaatatcagataccccattctttctctttttcttctcatggtcagagctctcattttccttggaaatattctgtgaagtgccttgaattgggcctactgctttaatctcccccattagctttattaagtcttggtccagcttcatggactctcaaatcaggcccaatcgtattatgtaagcccaaccccacattagtaccttgtccttctttttgttgcacgtgcatcatagaccccccacaacccataacttttgtaacttccatatccacgatctttccacccatgtcctccctttctctgctaactgccacttcctcattggcaaccgctccagctccggtatcgccaaccgactgaccatagcataaagtttcaaccatagcaaatacctttttaaaagaaaaatttataactttatctactttataatacttaattacattatatgtgcataaaaatttatttacaatttattatatattttattaactatgagaaacatattcttaattttatatataaagtatgtatgataaaaataaataataaatatataaacatatataaaaataaataataaacatattcttaattttattacggcaaattgcagttgttaccaatttcattttggctactgctctgtatggaatttggagaaataggagtagatgtgtgttcaaaaactatgctcaatcagcggccagcattgttgctgaaataaagagactgcttctgtatagattacatagcttttctaagagaaagatgagctctaatgatcaattttatttacacaaattatttaggatgttgagaaactgatagcaggagtgtgtttgctcttttgccttttgtttttgttgtattttgtgttcagtgattaatgaaagtttctttcttgaataaaaaaaaattaatgctaactgcctaatctataacttaaacatgtagtcattacaaacctagtcttttgaactttcaagagtaatgtgtaattattaattttattaattaaaatttatattgtttcggaagaatgtatatgtgtatacatgtattgtattgtatcttaataaattaattaattataattattattttttagagctattatacattattttgtaatttgtaattgtatacatatgttaagaagttttaaaaattacaatgaaataaaaatagataatatagaatgtagaatataagaatattagaaatcattgttgatcctaaactatgtatgtaaatatataattataaactatatatataaataatgtgtcaaataatattattttttccattagttatgtgtaaatattaagtatttggggctttttcatttttacactttaaaatatattttttttttttgtcatttttacggaattctacatagaaactcctattgcaactagcgctaca

SEQ ID NO: 224813 - DNA, 2598 bp, Cannabis indica
tatttccgctgaaattacaacatgattccaactttaattttatacacaattctatcactaattttcatcactctattccaaaatttgttgttttggttggtcaaaatgtagtacaccaaagctgccacagaagctgaaataaccttgctccaatccaccttagttggattgttatgcaacacttgatacccgtgagcaatcttgtagttgttggttagctgacttgtgtctattaaatttttcattgtctcctttatcatcactagctttctccaacactagctagcttgggatgtaggtttatagctccaccattccccattcttcacatacacattatggacctattttacccacaaattgtattcttccttttttgcaattgcccatacgtacttgagcattgctgcaatgttctaattcgtaatacacctaaatcccagtgcacctgaggattttgagagacaaactgaactccaagaaactgtaataggtcctgttaaagtataatggccattccacaaaaaaactacgacaaatggcttcgatttcacttacaattttccttggcagcaccataacttggcacctgtagaagtgtattgccatcaatacttaattaatgagaacaataggaccagcaaacgaaagattctgagtgctccaagctctaatccgacccatcattttttccacctatacattgcactcttttgaggagattcttttaggacaaatagaaacaccaaggtatttaaaggggagctcttgtctctgaaaaaccaaatgcatcaaacaccctttgaacatctgcatctaacatgttgctacaatagagagcaaatttcgagggattaggtaaccagcctgatgtgtgagcaaaaaaggtttagaccttgcagcatgtagtagatactcttaaagtctccattgcagaacaacactacatcatctgcaaaacttaagtgatttagctcaagatccccacatctctcatgaaacttgaattcttgctttttcccaatcttcttcataattcttgagatgtattccatgcctaagataagagaagcagagacattggattctcttgtctcaaccctctcttggcctcaaaaaatccatgtaaggagccattgatcatcagagaaaatctttgagtttgaacacaagtcattacttggttaatgaacttgagagggaacttgaatgcatgtagcatctcttctatgaagtcccattcgatggtatcatacgccttttaaagagccaacttaatcatacagttggaattacttgtcttccttccattgtgcctaataagatcttgatagatcataatattgtggccaataaatcttccatgtacaaagcctccttagttttgtgcaacaaaattagaaagaatcaacttaatccttgagcagattaatttagtagctggtttgtataacacattacagtaagcaatgagtgtatagtcagtcattgtgttcagacacatggtttttgggacaagagtcaacaaagtagagttaagctcctttagcagttgcccaatatgcaaaaaggaagtgatagcctcaaaaatatcatgaccgattacctcccaattgtcctggaaaaagaaacttccatagccatccgggcctagtgctttgttccctggaatatcaaaaatttatttcttaacttcttgaacagaaaaatcagaaacaactgcatcaacttgagcctttgaaaccacaggaccctaattgatgacactagccaaaactaatttcttgtctaaaaatttactacccaacagcttctgataaaaaaataggaaagcatcattaatatgttctggtttctccactcttattccttccaagtttgtgatggagagaaccctgttttgtgttcttctagctctaattaaagagtgaaaaaaaccagaattaatatcccattcctttagccattgcaagttactcttatggtgcatagaagagtgataattgttcaaagcctcaacataagcattccttgcagtcagttcttattgttgcaaatcatcattcaaaggatcatttctcagattatcttgacaataatccagtaggtcttttgttttcactgcaacactaggaatatcagtaaaatactgctagtttagagccttaaaagccaactttagcttccttagtttcgacacaacctggagcatttttatacatttcacctgttgagaccacacttcaaatactatttcatcatacttaggatgattagaccacatcctaaagtatctaaaaggccttttgctcccaaaattcatattgtatactgttaaaatagtaggggaatgattgaaagtaccttcatttttgaaataaacttctgcagtaggaaaactatccatccagatctgatttgctaacactcaatcaatgttggagtatatcctatcttccccttgttttttattactccatgtaatgaattttcctgtgaattggatatcttccaactgacatgtttctacacactcattaaagtcaatagacaccttgtatcgagctctattaccaattctttcttccttgttgagga

SEQ ID NO: 224814 - DNA, 14921 bp, Cannabis indica
  modified_base (14791)..(14791): a, c, t, g, unknown or other
atcaaacaatcgattctaagtggattgcacatacggcttagatcttatttacataatataatttttatttactattttcttaaatatgatctcatttattttacaactgattatggataattccaaatatttgtagaaaataaaccaaataagaagacataaaataaaatttgtaaattatacaaaaaggatatgccgtcacagtaaattagtcatatttcaaataaaaccaaaggaaaatgccaagaagtaaagcaaaggaagaataaagagcagaacatgcaatggaattggacggcaaccaacaaaggagacggcaaaaactgcaccatacgtgtgtatgtatgtatgtgtgtgtgtgtttgtgtacattacatatactatatatgtatagtttggtgccatatagagaagtgttggatattcattcaagatgtgtttcagtgtcagaagagaactaactaaagaagaacttaaggagaaagcaaagagagagaaaacaaagcaaaaggagaaagagaagaaggaagaagaaaagaaagccaaggagagagagaagaggaaaaggaagaaagagaaagagaaagagaaagagaagaagaagaagctccaagagaaacaaaaatccaagcacaagatgaagaaataatgtcaatataccaacaaaactacacaacaaataaacaatatgctcctttttcaagtttatgtcttggagcttttgctcagtttgtcaactttcatgtaggcttggtttttcattttcaatgaaataatagtcacagataattgcatggcatctaatcaatttgaactcactgacatgaaacaataatcatcgattatcaaagtgtattataaatatgagtagattaattaaataatctacattcttattcaaaaaataatatttgtttcagttctaagaaatgataaagcttttgcagggaactgaaagagatagggccctgctataaatagagctagtcttgttcctgttacacgttatccgttcccttatttgaactctaaaactaaaataaataagaaaagagagaaaaagatatacactttggggagagatgagtacaggttcccaaaagatcacttccaagaggccataatgttataacatcttgtaaaatgatcgagaacaagttcatcgatttctcccgctaaccgagcaccttgcggagttcttctattagcactttacggcttgtgggatccacctgtatttgggcacaaacagttttatgatacaaattcatattcagataggcatatgaaaatggatatgactaaactacaagaaaagggtttttaccttgcttagaagggtggcaagaccttgaggtagaacttggagatctgaagttgaattgccaatgtttgataattggagaaatatcttctgcacccgcagctcctttagtttggcctcgtaattctgtggatcatccttccatttaaagaaagcttcatcatccgaccaagcattttgtctgctttttgaaatgtcagaatctgaaaaccaggtgacaatcaagtccctcgcagatttatatggcagctggtccccagcggcttctattacagtcttgatcagtgattcctctgcaattctccgccacagtctcttgtaaaagaaagaccgagacttggtccactccaaaacttctctcacaactcctttcgcagccatccttagggaagtgtcatgcaattctgcaaatttagtagctatctgagtgtataaaggcaaaagttgcttctcccgagttcttatctgttgttgaatggattcaaccagcccatgtgtgccactgcttttggcttcctgaagttttgtcttcagatgtattagttgttgatcaagccttcccatgcactccagcagctcctttgttctaaatttgatctcaattgtcccttctggctcaagtacattacctctagctgtttcatccgcatacatttcaatatggtctgagttaatttgactatccacaaccacccatgccccaccacggagctcgcccatcattgggatgtacacaaaaactggctgcttgtatgttctaaggttttctacaatggttgaaccagcctgaagaatcccttcgaaaaggtccctctgcccacctgagaaacctctccaattggcaagaataaagagtggaagctcttctcgattgaaatctaacaatgcttgtgctgtcttagttgcagaatcaggaaaccatacttgtccagcctgaggaacaaccctctcatgggaatcaagttggcctggatcagcaggtataacttgcattacagtttgtgtttccacagccactatacctacaggaattcctccaagctttgcccttcctgtgacaacagtccttgcccaaccttctagagtctccacaaagctatttttatcgaaaatgcctcccatccacttgctttgaccatccaaaacaccacaaatggcagcacgaggatcgcacgaattttcagggaagtattcaacaagcctctctggaggatctaatgaaggtgaaatgggaagaggaccacctacatatggtggaacatagcttagccattttagaatagcagatattccttcaaggtcatctgagactgtcagatgaacaaccccattagttgccataattttcggcccaccaagttgcatgtgtgagctgtaaacctctcgaccaagaagtttgttcaatgcagagaaaccggttaaaatgatgggttgatcaagcctctgtatgcatcgcatccctaggcgagcaaggtaagcacctattccaactgttctaccagtcacataagtcaaggtaaatgtctccttgtatgctcttgaatacgcactagcgatagccccactgccagacaaattctcaacccccaaccatcttcttttccaacaattgtatctataacccatctggtttctccacttggtagctttaactcgtgtgctatcacagatgatccaatgcgagcatagtcatcagaggttaaatatacatactgaaaaccacgctcagggcttaaatcatcagaccaaccaactttgaagcaagattttatttcttcagctacaccaagacgggcgccagagtttgctgccaagtatattaaaggtagtttcttggcacaagcaagatcagtcacagcaaggaagaatgcgtcctctcttcggccaaaagaccctgctttaaatgtcacatcatttgcaactatcaagattttccttccagaaggaaactctggagttgacatctccatagaccaagctaccatgccaacatcattaagcccagatggacgtgaagcaggaacaagaggggtaccccagctaccattctggtcagcaaactggagctcagttacgttgagaatagctttatctgttggttttttgatactggaagattgagatgcccatgactgctccaatgccgtctcaaatgcctaatcacaacaattagatgtgagtgtgtgtagggtagagagagagagaaagaaagagaccacagtgttaagcatagtgtttaccagtggaaaatcataacagtaagtcgtgttgcttctcctggccaaaaggcgtttccgatcaagaactcctaaaggttgatactgcgcattcactggaactctatgcagaggacctaccctagaaattgaactgtacaccactttgtgttcgttgttgtcctcaaattctcgataaacctgaattttacaaagcaattatatagtatattagaatgcatctaggagaatatgatatcataattgcttaggcattatactaatgtctagagtatgacacaactaactggtactcatctatggcttctctatcttcctccttcgtccttgggccagttccaaaagtaacatcactcatgttaggttctagaactaattatttgttgctaataaatcagcttttcaatgtggctagtttgcttcttatgactagcatggtagtctataatcactttcttaccacaacacatgtaaatgatcaacataatgttcacacacttgtgtattgtattaattggaagcataaaataacctattaaacttttaaattgcaagatagtgtaaatatttcctttcatgaatataaatcacataaaaacttacatgtacagtgcaagtatgaccagtcacatttgttactacaacccgccaagcaccatttgcctgtccggaagatgatatccaaagtttcacttcccattcccaaacacctaatctatgcattcttacaccaacagatacatgtatgttacgtgccagctcttctaagattgcctcaacaacagtttcttctacactaccatctacatcaactctcctgccacaacattccaaatgtaagattaactaacagaacatatcaaattttgtctaaggagttgaacaaatatataaacatatttacctagggtaaggcacaagatcctctagttgttgctcccgtaagatataaaggtacatatgagcatggtcagatttgagagtcgtgttgtgtgcattaagttccaactcgtccattgctgtcactaaggacctccaaattcccctggaagtaaatggcatacgggttgtttccacatctagtccttgatatccggtaaaccctccatttgttgtgggctgccttacaagtgttctgagaaacatcctttgcattggtacacgtctgtctacaacagtgtataagtgccattgacgatcccttgattgagtatactgtacgttctcgtatcctttaagcttgtcctgataatatttaaaaatatgtcaacattcaacgaacttcagatcatggaaaacattatttatttatttatttttggcttagaatgactaaccaattcaagatagatggacaaaggaggttccagatgacgtaatagaggttcttcataatagagcttttctgatgaccagtgaaaggagtgcctcataggagcccgtccttcatccctttgtatgatacaactaatcactccaactcctgcgctgcgcagactcgaggctactccttgctctttaagtatttttgctaacttgttgattctttcttgagcctgatcttcatcaccactgcaaagcatcaagttaagtacagggtaagacttatgtttcatatattttaaacaatttgcaaaaacagattaagaaagctccttctgctgtagataggaatccaagtaattatgaagcattgctatctatgaaatagagagtttgtacaaattgatgtagactcgtcataatcaaagtgagagcaaatgagatacctatcctggagtaaactcatctgattgttaataccaactaatgcaatatgcatcatattcccatggctatcaggctcaggagatccaattggagttgcatcatggagattatgggttgcttcccttactgcagcactaattattgctggcaaaaattggagagtttttattatcaccatgactccccatttcttctcgctgtgtttttcaactaatggtttatcatttacttcggcctcttcttttctcttaatatgctcttcaaagaactcccatgaagcaatgagcccagatctgtgccactgcatcctcacactccccttcacaagatagggctgatggcatagacaaagttaacacatgagaactgtctgcaagtaataagcagaaaactacaacaattcaaatctcagtacctggtataatcgacgaacataagtctccatcactcgcctttgaagggtgtgatcactatgatcaaacagacctaccagggcatcctcaactgccaaaggagcactcacaagatcctccattcgttcatttatggcacttttcctcttgggagtatccatgttttcaccatcctccgtaaacatttccaactctgagagacttctcgcaatgttggaacggagttcactcaatttggtttgctccagcaactgacttgcttttagtgccaactgcataaatacattgacagcagaacttcatttataacattgatcaacaaactgaagttattgcttcaagaaaacatgaaaagatgatacaaaacttagaactgttaagagctgatcatccatgccggagaaaataaacattgagagatgtttgagaaactaaacgaaaaaaaaaaacatacaaaggatttttctttccatcataatttactagcttagtgcaacagccaaacctcagaatagtttgtatggttgagcgtggagaatctaattagtttttccctgtatgcagcggggttaggataaacaagctgttccatgagtcttagtataagcttattcttactcttgacaccctgcaaaccgaaaacggacagagtaaaaacgtaaactattccaatagtaaataaaaagaccctcaaaactggctgggctcatcaaaatattacctgatgagaaagtacaatgtcgacaatcttcaagagatcttttttatactgaagtctgagacgctcaattacatcagcctggacaaaacagagtacttcaatgaagattttaaaaagaaaaagatgaacaataaaagcatttcaagtaaaaggcttaatcacctggattttggctattaaaatggacgacacaaaaaaccaagttggataatgtagaaaagtcttcagtcagattttttagtattattataagttaattactttcaatatcattttctcaaaaagtagaaaacgaagttgtctaaatatgatacaaatgaggctaaattttacaaatgaatggaccaaaatacgtaaaaagagagaacgaaaagtaaaattaatttcatgttcttaagaaactattggatgtaaaatgataattaggactcagaacatttttcttttctttttctttttactccaaacattttcattgtttgcttatttgttaacaagtttatgattaatctatcacaagcagagtgaaaaccagaactcattcagtagagttaattaagaaacaaacagttaggctgtacaaacacaatgggcataaaagtaaagtgaataaaagaaataataatattaccctcattaccatgtcagtttaaagaattttatttcacaaggaacacttacttgaatattgtcactaaataattcttcaactgtcaagtattcttcaaatagggactgaacaataatgcgagcatggctttccctgccaccctcataagactttgcaaggctcaataaaggttcaataagcctctccagggctcctctttctttatcagaacaggacaataggtgggcctacagaaaaatatgcgttccttcactatgaatcataaggagagggcggaacccaaatgaaaaataactgcacttacttcaagaatattccgcaatagtttagcagggaaatcaacattctgagtgctaggaattgcatcgaactctttatattttgattctaactgatgaaaacataaacatcggataaaatgtgagcatcaaccactattcaagcatataattgcaggggaagggggagataaagttttatttacctcatttttaagatctttgggaaggcgggttgcaagaacagccatgcattcttgccattgaagataagggagttcaggactgtcaaggcaatggagcaagttttgcactacctggagggtagatgcatgaaaatctcttcattaaaagtttaatctcataacatcattatttattacattattagctaaaatcatagatttttttcaacggtgaaacagaattagatactcacttcatcaatgttgtgttcataacctgcaagaatcattcgtgctgcatttatacttgcagcacatttctgatgaactttatcagaaattgcagttggaggtcccaagataggaaaagtcccagtgaaaggttctgcctttctcacagctgaagggtcatctaaatcaagtcttgctataagctcaccggcctacaaagatagtaactgtttaacttctatgcaagttatgaatatccagatctttatttggaacataattacctgcattgcttgaccttcagacattttaaattgaataattccagaagcaggtgaaagtagaggcatacacatcttcataacctcgacctcagcataaggtgtatcagcatcaacatgactaccatcagaaaccaaatacctcatcagtttgcatggtgtctccgctatgagcttagatgggtcatgatcattctagatgcaacaaaatattttacagttaactctatcttgttcaagaagtatttcttaagaaaacaaaatggtttggaagaagtgaatgatgggacacctgaagcaagcatgtccttccatcaatgagaagccgagttccagctgcttcttcctcagcatatatcacatgactgtttccatccaactgtaaagaaaatacatattgaagatttcagttaaaattccaaaatacaaaatggacaaagacattctatttacaaactgaggaagcttttcctctcgcaattttacataaagttgaatttgggagtcaagtattctcgtattctaagagggttaccccacttcaggggaacggagaaacacttgagtttgcatgtgtcgtgtaatgaaaataacaaactgtttaatagttgcaacttgattttttttttttaatatttgctatcaggcaaacaagaaagtggatagtgtaaaatatgatgagttttagaacaaaagatttagagaatacacttgcctgcatcaataaacctccatcacgtaaagtatgtatctctgcttcaatctctgactcattcattctcagtctataacttcccggtccacctcttaccatgtcgatctaaaaacattttccatattttggagaatgtatgtcaatagacaatgagaagcaacaaatatccacaaaaacaaagatttacaacgtcatcgtttaaacacatactgtgtatttgcttccttcgatgttcaaggccacttgtgagtgtacaagcgatatatgctgcaatgaggataagcatgaattaattacatgagatacatcatggaacttcaataagtacttttaaccaaaataccttgggtggtatttgccccttttcaagataacccacgtaatctgaaaccattgcggcactacttgcagatgctttctaaattgaccaaaaatatagggaagtgatgaattttagacatatgatacatcgaataataaactatttctaacatatgtgcttacaaataaagctcctccaacaacagacagataccaagggggcctttctgctctcactcgcatagctattctactatccaaccagcctgtgtggattttattctctctgtaatctaaagcctgtgaaacatttatttatgcgttagttggagttttgattagattctaccaagtctagaaagggaaaatgaaaaaagaaaccattaatttgtgagaagtttacatgtaagagatcaatcgtgtagtcaacattagttcgaatttctccacgaatttgaatttccttcagcccaagaaccatatttgcaatagccaaggctctagactcgccaaatgcaaaaacatgtcctgaggtgtgatcaaagacttagcaacacatacttataaaacaaaaaaccaattgtttgtgaagatttttctcaagacacaaaaaccacttctagcttgtacagtatcaatgtaaagaatgattagtcacaacacatgttgatattggatgattcactttaacacctacgtttcagattatcgaagttcggccatatgattagctagaaaattcaaacggcatacaacattagtagtcagcacttaccaaattgagaatcagagaattcatgaatccctcctccagactgcaaaagaataaatggtgattagaatttaatgaatgaactcaaggtattcaatactttttccattttcattttggaaagagaatttgaatagaattccatagacataacaccagcataaagttaccttgacagaaaagtatgcccacacatttggcttgcttttaaaactcaactcctgtgcatggtgatgtaagtcaatatgaattcaccagtatcacttgttctttattgcatatgaaatattaaaggctaacctgtactttcccactggtaggtttgaatccatcatctgggtcctcacttgttacacgaacagcaacacaatgaccttttggtcttatagattctgcctggtcaaaatcaaatggggtggccttaactgaagtatttctccaagaatcatatccaccaccatgctcctttccataaaatcttcttatctctttttgaatcaagcatattaagaagagaacaggaaatattaaaattggaaaaaataaaaatcttcttcaagaaaaggggaaaaaaaggttatagaagtgcctaccaggaatttgccaaagaggaatacccatcccaacagcgacctgggctgctggcaaattaacttcagcaatccactcagtaacaggatgctcgacctgcaaaaataaaaataaaatcattccaggacatccatttactcaaaaaatagccagtcagagaaatgaaataaaatgagtttctaatatttgaagtcacacatgtagatacctctttctcaccttaattatgtgctcgttccattttcacaaaatggtgcataatatctaaataacttagttttactcgattggtgtgattttcattaacaaccactttaggcaaataaactgaacaattgaagagcaacaaaacatgaacctaacctacaataagcttacctgtaaacgagggttgagctctaaaaaatagtactctccagtatccatactgtacagatactcaacagtagccgctccaacataattaacggatttagccaaccttcgagctgcctgttccaatttcttcactgtctctagaggagctactgttattggaccttcttcaataatctatataacaaagatgaacatgttagagagaaagagggcctaaatgcattttaccacttcagatatgagtttaccttctggtgtcgtctttgaacactacaatcacggctatgcaaagctgcaacatttccgtgttgatcacacaataactggacttctagatgtcggctctgcagtagaatattcacaaattatgaagtgactagctgagttttcttagcacagttcaaaactgctgcaattataatcattcatatcaaaaagtagagataactaacctgagatgcaaccttcattataaatattggggaaccaggaacctctccctgaacttgcttaaacaatgccctgacttcgtcatcattatgaacctaaagattcaaatgatttacttcagtattttaaaaaataatgaagagggctcaactaattcctcaccataatagacgacttagtctaacctactgttcaaatcattctagaacaccttcttcgccatacagatcttgtaagcaattctttttccaatagaatgaaaatcatttgaaacaagtttccaaatgaaagcatattgacatgcaaagaacaaacctttcttatgcctttaccaccgccaccccatgatgccttgatcattgctgggtaaccaacaacttggcaacttgcaactgcttcttctgttgtagaaacacatgcttctctatatatttcatctggaattgtaaccaagttactgtctggagggattttcacctggtaaattttaagaaggttaggtgtggaaaacactacataataaatcaagataaatttaggtacgttttggtttgatagaatattacatgagaaccactccatggaagggtaggcacttctgctgcttgagcaatcaatgatgaaccaattttatctcctaacgctgccatagatgttgcgggcggcccaagaaatacaattccttttgcatttagagcatctggtaggtcagggttctcggatgcatgaccccaaccaggccaaactgcgtctacatgttttatctccgccatctgggaaaacaaacagaatattaatcagcagttctgataagaacatctagcttaatcagctatttccaacattgaactattcaccaccaccccatgaatgcaccaagaacaagattgatagaacaataacatagatcgatacatcaaatgacaatatacatgtacgtcccattttcacaaaccaaaaatttccacattcttagaaacattaaaatcttaggatcatatattctaaaaacatacttgggacactggattttaggttccaacctttctgtctcacctagactaaaaattcagcaagtgtaacattaaaccaatataaaatttctgtaaactgaaaaattatccttcgagtttagttgacctgtttcacatttagaagccaaattaaggaaacatgaaagttggcatagctcagaatacagacctctacaataagctgtacattggcatagttattattgttagtcccaccaggaacttccacaaactgatcagcaattctaatatgttcagcattgattctcatgtcctctggtgtggccatggccaccagcaagattgccttttctgagccaaatgtttcataagcccatgtcctcacactacgtataaatttaacagctgccataccattgtttgcaattaaaatactatggattggcttcttgccaccaagtgcattacagaatttatcaacttcagatacggcagcaggatgcctgattaaagctgccccatttacgtatccatttccacctagaacaccagccattgtcgaactctttcgggcttctaacatactgcaataagagaattatttgttcaacaactctagtaattgaatggagaaaaacaaaagcgttttactcctaattcactctaatttagtcaaatctattttttacaagaaaatcagcagtggttctatactgcaactacctcaattacacaaaacacagttgatgcacaaacatagttctccaacaatagaaattattcgttaacagtagactttttctagtgatcataaccactttccccagaataataaaaaaaagtgtgaaagtttctaagatataattgcttttagaagtaaatttgattgactgtacagtcttaggatatgtaatatcacatgaacatagtttaccacgaaaagggtaccgctcaaaaattaataatttagaaaaggaaaaaacttaacttttacaccaccagcataatgatttacatataaaaaccctttttataaaaataaaataaaagtggaaaaaacatgagtcccaatcatagcctactcagatttacaagctgcaaaagatgcagtctttaaaaaccacaaaaaccagtagaaagtataactagaatagttctaagctaggagaaacacttacctcaatgtccaaattaacacatattaagcaaaacgcaactgcccataagagaattaaagaaataatctaagaaaaaactagcacagacctcaatgaaagtggaacttaaaaattgaagaagccttgaatcaaattgcttcaaatctctatgtgggtatgaagcatattgaaccaaaaacggaaaaaggcggtgttgaaagtgaagagaaccaagaagaagagtgtaaatgaatgttgtttatatgatgataatgatgatcatgcacaagacacaaagcacaaatcttgaaaaagcttaatagtagttataaggaattgcagcgggtaggtgtgagtttggggtcgggtagcaagagcccgtggggtcattcaagtttcttaacgactttaaatgagattcgcacgtggcacttgctccttccacaacgctcacatcctcacttacttactactactactacagctactcgtagctcccatctacccttctctctcatttcttcaacccaattttttctactctttttaaaaactcaatttgggtaacctaattttttaatacaacttcatgaatcaacccaaaaaaaaaagggggcagggggggtctttgttatgtcttgaccaagagagttgggtggtttagtcgaccaaaccaaaacctccaaatgttccataatgataaatatatattatagttttcttgttacacatatatttaatatgttatatgttttttactaaaaaagaaaaaaaaatatattatagaggactgggtccaatattttagtgtgtttttccctttaaaaataacaataatgcatatataggtaagagttggattagtaaaacaaggcattaatattgcaaaagatggggatgaggttggatatggttggaggttaggtctatccatgtcatcctttcccttatttttgttgtgagctcatatggtatatttaataagaagggaaggaaaagtaaatatagaagactctcttttgtatcaaattatttacttattagttattaggaaggagacgtttggttgggaatataaacatgagataaataagaaagagaatgtgaaagggaatattaataagaatatgaaattaaattaaattaaattaaagtcagaataaatagtatttttgttggttttccaaattatgatcggttcatatgtgaagcttgaatggttgttaaaaattccttctaacatatttgtgtctccgaacattgatcattgccaaatgtcccattttattaaaaaaattatattttttaaaaaaaaaaaatcattttcaaaaattgagaagntaaaaaataaaaggtaaaattttaagcattaattaaataaattttttaaatattaaatgacaaaaagaaaaactgattaacataaaaaaaaaaaaacaaaaaaaaaaaaaacaaaaaaaacttaaaattt

SEQ ID NO: 224815 - DNA, 22061 bp, Cannabis indica
tccccgtgggctgggagagtagccgcctcttcactctccttcagccgattcagataccgaatcgtatctcttggagagaggtgcggaagctctctctttgactcaggagggcgttccaccacttcgactgatgcggacgcggttccctcgtcgtgaaagaagtaatgaaagggaagccccgggtcaaaccgcgtttgttgttgcctgtatagctttctagagcagagatctagaaacgcattctaggcacagatcattggtattggatgaatcgttaggttgtgccgagtcaaatctgctccgtttttttccgttgcagaaaagagatcccttccccccgctttaaaaaatgaatgatgaatatgaagtccgtggggctgcaggtactatggatcctctgactcccaatcgggttgccttcccaggtctcgccggtgttgcctgtaggtcgtgatgtgcctcgagatggccgtctcctgtccccctgccgggggggaatccgctcccgggtcgtcgctctgctgcgtctggcccgtcctttaggcacctttggaaggcagggagtgtgacaacgtacacgcttccctttactccatagggccttctcatcagttgcagggtttggcggcccgaaattgacttggctttgccaaaaggcctcatctctagaagcccggctcgcgaggcgtccctctcgcagtagggttccaaacctcgcctcgctcttgtgacatgctatctttcccctcttcattcccaagtaaagggtgagtcccatgcgtcagtttgtggatcgcggtctcacgcactaatccctacaggtgcccgtagtaggccggccgccctacctaaaccaatcatcatatcggtccctaggccccattgctggaaaggctcggcttcaaaaccgtacgtggagcttccgcctcatacggctcctctagggatggaggtaggcccaacccaggcttgtgcggttaaggtttttgtacacgacctcataagaaaagaatgaaaaaaaagggggattatggaactctattatttgaatagtgtttcagcgtagtctctgagacccccttcaggtcattataaaaagtaagggagtccttgtaaaatgggctagagcgcccattagcttacaaatccgctagaatagcggggaggttttccacatcatatttgtgctccaagagctctaaaatttcctgcaagcggtgtgcagcaggaagtcgcaatccatcttctttccgcaattcgcagatgagatcggctactttgttttcgcgatcagtaacccattgggattctagtagaccctcgatgggcaattgccccgccgctggtgctggatgataaatttctgcttgttgttccgcatgaggaatggctggcagagcatgaggattgagtggcagggctggttgctgaggttgataagccattctcaagatctcgggccgcccctccaactcgctcccgatgccattaggcattacctcaatgctggaactggaaatctcagagcccataaacatcattgccgtggcttcggtttcgatgaaaaaaatggaaagaatataaccaactatccacgccagatcccctaaacaacctacatccaaagatgagagttgttgaagagccatttttaagggcgtataccccccaaagtatgacacgcactagatgtaatgggacggacgggatgaagccaataaagaaaagactataaaagaaaaaactaaaaaaaaaagaatgtgtgattcgggcataggttgccatgtgactttttgatactaaattgttctgttcccttagatgggactctatttaacataacaaagagggtccgccgttgttaaccgggaaaagagtgggacttgaaaagaggatgggagacaggggaactcaaacaagtaatagaagagaggagagggccctctaaaagccgtactgctgctgttgtttctatacgaaaattgtgtgaattttctatcagagagaaagcctgcattatacttgaactgaactgtaattccgcctcctttatagcaagcattcctttccaaaaaaaaagtaagagaagagaaggccgacctcctttttgttgttcgaagtcaatgaattcctttcttacgcaattatagaaatgctttaagcgcgtattgagacttcttaagttgaggaggttttcggtttcgcctttccccttgggctttatcttcttatgtagttgaagatacaacttgtacttttgaatgtacgaattctgtagaaaagcgagtacctcgttagcattacaagaacacacgagcacatgactaagagggagaaggtccttaaacagagaaaaagttttccttaacccggggggaattacaagaacaagacttgtttatactttggtcatgttacaaaccccagacgacgacggatactaagacaactgggattcaaagaaggattaaaagatttatggaattccgttccgtcaggggctgtttcaacagcaatagcaggaatagtaatcgaatcaccggcaatgctagaagcagccgaagtcgttgcattagtggcatgagtaatatcaactggagcagggaaactagaaggaagtggtgatgaaactgccatagtaggagctgccggcggaggagtcacaggcttgcagacctcagtacgcaccacagggatgaaaaccatatcatcataagaagtgccattagtagaacctggagactggatagtagcaaacggaaatgataattcatcaaagatcacatgcctggatatgaaaacacggcctgaagagggatcgaaacagcgagaccctttatggttggggctataacccaaaaatacacattggcgagaacgaggttccagcttgtgagcggtatagggtgctaagtggggatagcacgcacacccgaatggtcgtagggccttgtaatctggtagacgaccaaaaagagcttcacttcaaaaggagaacgccatcccatagtaggcgtaggcaaccggtttatcaaaaacacagaagtgcaaatagcttccgcccaaaaatcaagaggtacagaggatgcaatcattaacgtacggcccatctcagaaatatggcggtgtttacgttcaaccaaaccattctgctgtggtgtctttggacaagaaaaacgagggtgaatccctttttcatcacaaagactgcgaaaactagagttatcagattcccgaccaccatcactctgaaagatcttgagtgtcataccaaatggattttccacaaaagccataaaccgagtgaaacaagaaaagactgaatttttatgtcgcataaatccatgaatatcgggtacaatcatccgtaaacataacataatagcgaaaactcgaaagagaagaaataggatacatccatacatcagaatgcactaaataaaaagggacatgagcccgtctgtcaacaaaagaaaagggctgttgggtagattttcccatagcacaatctttgcaaaaactagtagaagaaattctagcaggaaggtctagaaacttattggaaattaataaaaaaaaaaaaaaaaaggatgtccaagtctgtgatgccagagatcgcctgaaacagaagaggcggagagggcagagaagggtcctgtcttcggctggatagttgctgtattcggcttgataggatagagatctccttcacattggccttgaagccagattttcccggttcgcagatccttaaccaaaaatccccaaggtgtgaaacttacaaaatgatctttcgtaaatttagcaactgagagcaaatttggatgcatggtaggaacatgtaacactctcgaaagaggaaatgtagaagaacccgagggtccgaaggagaaaccgtacaaatattagcaatgggaggggaatcaccgttaccaaccataacttgatcattgccaacatattcagatttctgagtcatagaacgagcatcaccagtcatatgtcgcaccagtgtccggataccagttgggatcataggagtgagtaatccgcatgccagcgaaactgttggagagatcatcgtcaacggggacccgtaacgaaaacgacaagagacagcagaatggccaaactttccccaaatttggcttggcattgaacacgtcgtccatcaaagtcggatgacggggtagggcctagaagtcctgaattcgagaagaaagatccacgacctcctcgtccaaagtcaccacgaatagcacgaccaccacggaaggagtccccgcgacccctaccacgaccacgggtagttacaaaggcagtagggtgggaagaattggaagaaggaatgttgtgagttgggactcaaaagaaagcaatcgagcacgaagatcgggaaaagaaggtaagggagggatattaaagatagcagtgactagcatagcataatctggaccaagaccacgaagaacggaggtaacaaggtcaacatttgagactggttcgttgatagcagccaacgaatctgcaagatttttggcatgttgaagagattgagaaatagatggatttccggagataagttggaagcgtagcattagcaagcgattgttgagagaaattttgttgaagacaagaccaaacgtcacgagaggtttgtttgaagaccaacgacttgagcaagaacagattcggtgagagtcgcattgattagactgacaagagtttgatcagtttgaacccatgaagtagttgatgggttgagattcattgttttgccatcataagaagggataaattgaggagggcaaggaaacgatccatcaacgaaaggccaaagattttggcctataaggaatggctgaatttgacttttccatagaagataattggtttcagtgagtttgatcgagactaaggtagagatattttgaatagagaaagaagaataagatgttgaagagagtgaagaagaatcagccatgagtaatgtatggaagagagggaaaaggaagaagaaaaacctgattcaagtaaatcgtggcaagggagagaagagagattcacctgacgtaactacatcaataagcggagtgcgctaaacaaccgtaaggtcgttaacgctcctctccctatcggtcgtatcctcgcaagctcggctcgacctgacgtaactacacgtttcatcccgtcactcaagcatcacgtagctagatcgcgtaccctttagtgttctatcgcgttcccgtatcggtcgcctccacttgctccttcgtttgctgcccccaacctctaataggcggtagcaagcccttaaagataaagcttatatatatggtatatatgaataatgtgatcagccttgctgcctgaaagctttacactctgatcgcataaaggcatatattaaattaagataagagctataactcatcgatacggatactcgctagagccgaaggcggagctagacccttcggggagagactcaaccgctaaagctagcaaatcgattcttacttaagccgcccctattccctctaagcctaccgagccttctcaagatcagctctcttggatgccgcagcgttagcctcggtattcagactcatccgttcagctctagcgacgtgaagatcatcaatcgccgtctgacgagaagccctgctcgcttcgcccctggcctcggaaactttctggctagcctccgctaaaaaaccagaattcgcaggaatagtcgttgttcgaccttcgccacctcctcctcctgggactggatcacggtagaaagtcgatctttcgaggccaatcctgagagcgagtagacagactttgagatcatgcctttaaatcatataaagtgtgatatgtctccaatgtcttcatcggcagagagtaggcatagcggagctagccgttgaggaactcaatcgctagcagctggcaagaagaaaacacttgcagcaactccttcagagtgaagcagccatgcacaatcacttaagccgttacgctgggcttccctaaggacctcctcgctccattctctctaggaagaggaagcgaagggccataggaaagaacaagctgggctccggctccgcacacctgctgacacctttcgaagcactcttttttattcaaaccatttcggacacaactgattccaataagctcgtgaccactctcagaggtagctgggaacaaaaggaataagtgctcaaagctaagatcagctgctattggacttctttccttggcgagaagggttagcaggtttggaaccctctacaggcctcaacaaggcagaaccaaagagagtagtgaggggagaggagttcaagcccgactcaaggcctagtagatctattcctgctaccttacaaccttccctgggggaggttgagttgaagaagctcttacagaatcagcagctattgaacccccatctgttggaagaaggactactggtagtggttcgtcttatcttattagtagcggtcagtgggaagaagactagctctggctttcaagcgtgaaccaggtcttggattcggcattggttgggcatggcattagattaggaaggggcctaagctaagccctgaaattgaaatgctttactcttactctttgggtttaggaagagaaaagcactgtttagcttagttagcttagatcctctttgagatgaaatgcggaaaagtcctaatcaaaggccgtcttctcttccgaaagcccttcttattctagagatgaatgtgcagctgactaggtcccgaaatggggcattctgtcaaagaacaactaagaaagtgccacagcatgaatccgttcctgcgtcagctatccccggacttgggatattaccaccacatcgcagggaaggaataattcttctttcgacgatcccggaagattgattattacggaatgaatgagcaatccggaacggataactcttctgggggaataaggcaagtgcccaaatctcggacatcaagcaatggaatcgaattgggtttctggcgggctcagaccggcagttggtttttggttacgtgatatcgggtgggatcttggtctcaagccatcctcctgcgaataaaggctcgaagcgagagtatagtgggcggcccctcacgaatggctttcggagggcaagtgtgaccttcggagtggaggaaacattgtgttgcccgggtcttggagtaggcccctttgtccgtcagacagtaagtggtaggcacgcctcgccccaggcagcaatccgcggacccataggaggtagataggaggagggtctgtgaatgcggtagacggtagacctctcgaagactcagctttcaaaatgacagtcggctttattgatatttggaattttaagagaacgtgaagtctaagatcatcgaaggtgggttcggcttccttttatataaaagttcctttagaaaaggaatcgaatggggcccgaacctagcagcattcagaaggtcatactgctgctggtggaagttgcacagcgaaaggcagtatgacacgatccttagagttatatagttgcttattgtgggagatgagttctccgttcctctaattgatcgggattgttaccgacgttggatctttttcgaccagattactagtgaacaggtaaccgtaatgacgcgcagaaagcacattctttctagcatgcgatgtcttcggtattggcatctttcccgggagaactaaagcaacccctatctattaacgaccacttgggaatcgctagctcgcatacgctagttcgttcgtacgccctgctcgatctacagctagggaagtgaaaggagcaagttcttgcttggcatgtgacttctacggcaatcccatgtcttcaggcaaggtagcgttagctatcccaggttgtgaactggctccgatcagtgcctattctccgatcaatggtcgaatatgctgccgttcccctatcggtcaagaagtaaactcctcggatgggtaaagaagcctatcttatcccgaaaccggagatactggaggactgattcgagtggatcctgttgccagaaagagaactttcctagtcggggaaagaggcttccaaataaaaggggcacttaatctatagaaaaccaaacctatcgatgcttatgacccggtaactaacttgttataggctccgaaggaagggtagggtgagtcattcctatctattccaaactttcctctcccgcttattgattagggcgagctagatgtaatctccccttcacttcgatctttgcctttgcctacgtagtcttttttcctgctatttgcttttgccttcgggataatagatgtatttcttacttcccctagagagacttgggatcaccatgtattctaatctttctctaaacgcaagagctaactatctatccttaccttataagtaggagtagtatctcaagaaaggggatctttggacattataaaatccccactctgtcctaagcagatgctccgcagcgtcgacgtgactcatacctaggatgggtggctctccatctgattcgtgaactcaccgagaccggagggcacctctgccattggggaaccctatctataataaataaatatcccgtagaaaatgctgagtcgataaactggtcacttggaaccggattcggatgtgccttagtttagttccaggtgtgtattccgaggttctctatgaatcggttctagagtagcactcgacgaaagttcctggcttcactaccgattccacgtttgagtctccgcctccacaagaaagtgctaaactctttgtcgctagtagcgcgggattccactgcttaacttaagttagggccccgtcgctttattgcctctttccttccctgcgggagagcttaaaccttggccgcagatcctacgtactgatggctctagcccggaccgcttctccctctaatccagtgacccgtggaggtctagttgctttctcctcgctagaagagccacggggtcttttttaccataaatctagagtgaaggactcgtcagactattacttcacttagtgttagtagcgggaatggagaggcagtctgtggttgtggtgaattggagacaggctacgagaaagtaaaaatagatgggcttggaaagctatattataaggccaaagtccaatcctccaatgtgccggttgttcccttccgactcctaactaccttcccttctatttctttctttttcactctcccctgctgccgcccaagcaatggaatgggactgaatctgctctaaggtaaatgtgaggccgatctctgtcttgatcccaagaagttagaatagaatgaaagcaacctcaatcgggcattcgggtgcgaccagggaagacgatctcatctttggtaagccggatgggaggaatcctcgaagtggtaccaagctgcttagctaccgaataggcatgcggatctcttcttctaattctaaagaagaggcattttgcgtaagtaagaaagggggttggacctgacctatgagcttctgggcgaaactgtgctttaaacatgcccttatccgggttgaaggccttagccaagtctcggaagttaagcctctgccgaccttccctcggcgattgggttcacgtaagctcgacccggattcgaagtagcatcggatgagactgggatgtgggcctctttttcccttttttgaccaggagggctccctttctttcaactgccgctttgagttttgtttttggtgaacgaaagtgagtgccaggattcccctggtaggtacacaccctacacattcagactgctacgtttcgatcggaagacgtcttgccgaggctccgaccactccctaaaaaagcccatcccggagcgcccccagtgagctaggggcagttagctgtccaacatgcttctgctttcgttcccctcgactttgttcagcagtttgcttcactcattgttatgaatcttgatggtgaatgctcgctttgcctgataagtggacaagggatctttgctttagttgccttagctagcctagaactgaaccctggacggattggttccagttaggcgaattggtctctgctacgctatcttaacaacttgagttagcctctagcctttttcctggcctaggagctgtctgtgagtttgcctcattgtacaccaactttcccatcaaattggcttaggtcagtgctcacccaaacaatctgtattgcacaacctcttatcttagaatcacaccttcctttctcttctgacgctttgatcttcggtcattggcggctgctttcttagtgttgcttggatcctgcctactttcgacgttgacgtatatagaatagagcctaatcgttagagtctcgacgtggcggtgtacgcatcgctctatagctagagcgaagcgagtcgctggctactgttttctttcctatcgggccagatgtggccgagaatgttatgtgaccaaggacgattttgtggaagggaaggctgaccctacctataaataatataaggatgtttgctgattagcgagaagacactgaggaaggtcttgaagctcaacaaagtcaaagcccgttgacctagaaaggatccatggagctctttcttcttgtgccccatcccaaaagcattgaaaaaagataaggaagggtcaactagtgagaagtcttaccctgggagtttatacctttattggctttgcaatccctcttaagaagtggtgtcaggtcaacaagaaattctattgattccgttcagcgaaaggaaaggtgcccttctctcacgagtttgatacccccacccatagatcatccagggcaatccgcatgagttttgctgttcatacatgagccatagaagggcctaaaataaggctttttgaataagcagttccataccagttaaaattcgatgaccgaacaacttcaagataaactctttcttttgtatgatttaaggggcccatcttgattcaatagctacggataggctaagagcgcttattgccaaaagcaccactatcaggtaagcccttttcttattagaaagccctgaggattacatagactagcctagtctaataggagtatgcccagaattggatctcctaagggttgggtatatagctgctattagcatcttaattcgtagatcggatctttccggtttaaggactgatgtctgctgggccctcaagcccctctcttcattgactcttggtacctagacactttgaatcaatcccctctttatatgtatctgagttcgacactccatcccagatctctaggaaaagggctgagagcaagaccatatctagtgaaagttactagcccctatactagctctttgttatgagaacaaagagtttgacagttatgatttcaattgaacgaatatttagtgaattagtgaatctaacttccatcgactaagattctagcactcagctgtgccatttctttattagtttaagcttgaagtgtgaatggatttccagataagaagcgctacccaatattgagcatgtgtcggtaaaggaaatcacaaatgaaaggaagtgagtggaaagtctttctcggtactttagcatggtaatgaagaggaaatcctgtaagtgaaggccaaggagggctgacataattgattcatgctttgccttatataagaaggcctccggacaaaagcttttttaccataagatgctttattctccaaagtactaaatgatttcctagttcgatttcgatacttgcatcaagtggtcttttcccaaccgcttgtagacctatcctatacttgacgagctagtttcagttgttggtctctcgagccttctcctggcaagtaaagagctagaggattaggtcaggcacaaaagagactgtttcaatccagcggatacattatgaagcatgaaaatagaaaagaatgctctttgggcattgcttgtgtcgaccagccaagcagatgagattctgtctcttcctttactattatcactgacattaaggttgactctctccttgctcgtttcactcctttccgtgaagagcatagtaggcaccaagtcgcagtgacaacgccttcctgcgtcggtcctccggtaatcaagcaagaacaaacaatcattcatcggagggagcttggatttccagtcaggcagataggtgctcctttaagaccattgattgtcgctctttgaacaggcagagacgaacacaccattccaacggcaggaggaggaggaggatagactttcgaacccgacacatccactgcacgatcctttgagccgtagttccggggtttgattgcaaagggagcgggaatgctttgaagctcaacgaagtcaaagcccgttgcccgttgaccatggagggatctatggagttctctctgtcctccctttgcttgaactggacttttccgaaacatcaactcctcttactgtgggctgtaggtactaattggtttctttccttaatagacagccctcagccagctaagtttcatttcacatttcatatgataatatgataaaaggttctcgccgcccctcggtgagtaagccgagtgcttcttgtcttagcgagcttgctggatgagagcagactagttagaggaatggacaagtagtaacttccggagtgaatgagtgcagcaaagtctcttatcttcccacgcacggagcggtaactagtctttcctattgggatagcggtacgattccgtcggaggtgggaagttagcaaaaggaattgaactctttctaagctacagagtaagaaagcagaaaatccttatcagaagactttttgcgattcaatgtctttcttatgtaatagttcctttagaaggtgcctgatctacgaccatcctcacctcatattctttttattctcgatagccagatagtgaagaaagacgcttaaaagccccttcatcgtcttccttccctaagcgcaatagccccttgaatagataggatagaattagtgcgcttgaaagagattcggcttagttcaaattcctagtcttactcatctcagatgcgggattaccaatgtcacgattggaattaggaaaggaagctgtggcacttcttactttatatgaggagggggttaaatcactagcaatagtagacacgctacgatctttggctctttgctagacaggagcagtacaggaagcatcgaatgccatggttcttgttacagactaggctgcaagtgagagtgatagaatcagctcaactgtgaatgttgccgatgccgatactggagctgctaaaggaagcagtagcagtacaaccattaaattgaaatggaattgcacattcatcttcctctatcaattaatttcttttgtttgaataagctattaaggtgcctaggacactagtagacacccagaaggagttgtaagggagaactccgattgttgatcggacgattttcaacagacaagatcagatcgtagaatagagaaggatttgctgccgctactgaatcagagtccacggtgcaacaatttctcatctgctcacgaattggattcgaaccaatcaagctacttgccctttagtagatcgtgagtgggtctgtcgtcctcctcattatagtcctcctaaaatcaatagcatttcgtcgggatacatcctgtcttttcaccttcctatctatccacctctccagacacaatatcttgagtacctccggggtacaggttcactttacctgctcaatctcctacgggcggggacgggggctgctttccctgagtcggagttattttagaacggtcagtagggtgcctgatctcaagctcaacgcctctccaagaatatttgaatagaagatcaacccccctagatatagcaatcctttcgagttcctttctatccggataaacaaggctagaaagagatagatgaggaagagaccttggatacaaagtacagtcattgttaaataataaactttatcattctttgacaaaaagtctacccagtacgcgactgtttccaacatatttattgattttttcttttggagtaattcaaatgttataacattgcccgaaggggctatatgaactacggaactctgaacgaaagaaacatagatcaacaagccattggaattactctttcgatcagagcagagagaacgagagccacactttgagaaggctccaaaatagaactgaagtgaccactccaagttaataaaaaaaccacgactatctaaccaactaccgatgaactaatcaacaaccgaacgagactgaaaaaaaagacgagtgaacagctgaattacatccagcctcgggttcgagtcaaagaagacccaggcaatgccaatctcgattcaaaagcaactacatcaagaagtttccctactaccggctagagagcattgaacgattcctgccctcggaccgccaaaagaaagatgcagaaagaaggaaaactaggtgggctggtgacgatcctcaattgaaagcccttggtccgcttcagctgcctgacttcatgaaggctttttaatttgaatacgacttggttatctctgataaaggtagctgttaggctaatggaactaaacaacaagctgccgaactcaaaccttcaagataataggcccgaaaggaaacttatctactccaatagttcgcttgaagctcaacttgacgtaaaccttcggtgcggtagactcaacaccaactcaatctcgactaagcttgttcagctaagccgaacattagacacaaatagaacaatgaacactgacttaatctcttcatttaaccagtcgccacaagatcactacttcgaagaaagtagttgctagaacactttccattttcttctgtctaagctggtagattattcttaccctagttagttggctttatactagactatcggatagccttatatataaataaaatttccatgttgattgagtggagttgcccggctcaaggctttattaaagaagaaagcccaggaaaaagggcccttctctgtcatattgtcaagccaaagaagagagaaagcctagcccttaaagcaagcctgcttcaccttcacttccttccgtacctgattcttagtctgttctaaaggcagccagtgactcgaggtcttctggagtgaaatcactctcgggtaattaaatggttcagctctggttcaaatggtatctggggtatatctcttatctgttgttcacgaatccgtttcaggttttcaggcatacccggtcttttctctttcagttgctgctccggggaaagaagtttcattggggaaggtggtatcttctagttgatcacttaagcttttagcttaaaggactgatcttcttgaacttagcccgagtaaggccgacttaaataaagataactaggtgccaagcctttatatgaaaccatttctttctctctgggaatcatagcctactttcgtaccaaagggttgagactttccttctgatcctagttcttggcactgggaagagtctctataacctatagggtaaggagcaatagacggaattcgccctagaaccgttaggctaggctcattagacgtagacggaattagtctggtatggctgaagaatggtttcatcagttgaattttggaaggtcatatcgtattataaaaaagaaaaccccgttgttaaaatagcttgcctttcctgctttccttttcaaaagggggaagggaggtttttaaaatgctttttgattgagtcagatgtggcattgctgattcgagaacagttgccctttctttttgcttcgacaatagatcaaaatagaggcaacaaagccaccctacttagatccccggatcgcgttattggattagcgggcgccacaagacaaattagtcgtacaaggacattcggcttatcagaggcaatggccttcgcctacgtcaaagagccgattcgtcctactaacatgtcttctgctgggattgggtgtctggtggtatcttctgccagagcccctattggttcaaccaacggcttgttgctcacctgagtgcgctagtgcaattaaggaagccgcacaatgccaaatgaggtctctgggcttcccgtgtatgaatccaaatcagatccatgagaaagttatggacacgttcacgaaaccggaagtctttcgatcccatgcagtcaatgccaatgggtgtgcttaagagctggtggcaaccgaatacctttcacacctaacccaggcttttgccaacaacctttctttcaaaatccactaggtaaacctagcaaaagtccaggaacagctaaaaaggcttgaagagacagtggctcgaaacattaagaggaaatagaaaaattcgtatgaagaggtcctcaaccctatgatccttagatttggaaggaatgatggggcccacatcaaaaagtagttgaacctacatagcgaaaagggggatcctcttacgcacgtgaaatccttttatgcccatccgcctaatgtgctgaagtggctcatgatgatagtcttatgatcagactattcccaaggagccttactgatcaagctatggaatggtacttcactctccctaggtattcaattcaatcctttgccccccttgtcgaaaagtatttagaacgcttgcttctcagctatcacaaagagggaaatgttgattcaatcgacctggaaacacaatcctggtgagagcttttcatcataccctgcgaggtctctcgagcctcaataacccattccagatgaaattttgttcctttgggtatatataatagtaaacctaggctttcagcagacacatctacatccgaatccgaagaagtggagaatccgcgactggagaagaaggccttgtcccctgtgggtggtggccaggcgaaaggaccgacccgggaatgtctaggggaaagcacttcctaacagagcagtctaattgttgtattcggcggtaggactgtgataacaaccttctcttcgacctgcctagaggtttggaaccctcatcaactcttagaaaggtgacgaaaaccggcattctactagtagtagtaggaaaaggcgctttcttaggcaaccccgctttcaaaggagaccagcttattagatccagaaccctccctggcggtaagaatcttcaaaagtggagtcattccttgtccctattcctagtagtgcctctggacgccagccttccttctagtagaaaggcgtttactgtccctactttcagattccctgaattccactcaaggacacctgtaacaaacaacaatagggtaggggtttaaaccaaaaaagaatgggatgactagtgctggttcattttattaactagttatatacgcttttttatgatctaaagcagatagattgaatcgcacgaggttcgggaaaaggtcttgtaccattgaaatagggtccatgtagtagtcttatgcgttggaccgggtctccttttgtctgattgcgacgatgaaatggtaaagagatgtcgaaatggtgagaaagctcacaatccataagtttgcccgtttggagatgttgaactatcgttagtacaattgcgtagactttcgtcgctttgttcctgcctggctcactagtcagacccccaaagggatatgtgcgtcttgttcggatgggtaagtttgagcttttatgaattgagtcttggtctctgggctccgagtactttgtgctatggtatttgctaaacaatccagttctagaacctcctttctgctcccattggcggctcaacttcgcttttgtccaatgattccttctaacataacagggcattcgtgaacaagtcttcaaacctcacagcggattctgggcattcatctgtagctgttacttttacaacggttattttattcaccggatattcactaaaagaaagagctttttcttgaacaagatacacccggctaactatccatttttcatattaataagataagagaaatgggatcctcgcgtagaaaagagatcaaaggaagagagcgggcatgagcaatagtagtaaataactagagatggtactactgactttactgttgatgacgaaaaagaggctgtttatgaaacgtgtccgatttgaatgtgtgtctatgaaggctttttaaaatcccgataaaacgctcaaatggcacatttcgatgtctcgtaggcgatctatgccaaacaaaattaccgggaaaatgaaagtgtcgatttcacttccctcgaatggcatgtaataatagcttttcgtcacttatcttattataatagtggatgtcagagaagaagttcctggtttggttgaattcaatcaaaagtaccactttccattgaatcaggaatctctttttctatcaatttcctaagaaaagatagataggattgcaggctagattcgaggtatgcccaaacaaaggtatgccagttgattgatttcactctattttcaagattgggtgggtgttcagtgtaccctactgtatcgaaaagcgcggtatctattggtacttaattacagagagcaattcggacttgatgcaatggtggcggggatcaagatcactaagccagttctttgccttgctctacgcaaagccccacccaatcaggctgccatgctgaacaagcctggtatgaagctgactgcaggcaaatttggcaatcggccacgtgacttcacgtacgatgtctcaaaggccgatgagatctatgattgcttggaaaaagtagggtccccagagcatcaagtccagttagacacactaaagggacagaaccccgtatgcaagtttcatgccagtaatagtcacgccacagctgactgcgtagccttctgccacgcaatacaggacaagaggaggcttgctgaagtttcccgaaaagggaaaacagatgttgattgacaagcaaccatttcccaagaccgcgcaagcggcgccggtgtatattcattaccactacggcgtaaaccccgaatcagaaggtgaacctacggttacaccgtagacttctaagttgcccaagaagtatttgatcgcttcggggaaatgggtgtgctgagaccagtcacacaagaaccatcttccgcagtcattgaagagattgtcgatcaccagaccgactattaaaatgtaaacatggttacgatcctgcgaaggccggaccaaccccggctaaaaattgatctacaagggggccttctaggatctataatccctgtcagtaagcgtgccgttgtaatcggccaagaggctactcaaatacttcgctgatgctatattacaaagcttcgagctgtcaagcctaaggtcggcccacctaacctaataggcggatggaagcaagaaaagggctggctagctcgtgcaatcaatatctcgtcacccccatgcatataatagctacgagctgctgtaagcgctgttgcacgatgtatcacaagtacactaacaagagaggaactacgagcagaaatcagtagtcactctgctacttatacttataatttcgtataaataaacgagagatagtcagtctcttgactcttgagcggccgagaatgttatgtcaaaaggaccaacgacgatcctatcctaaaggagaaggaggagtaggaggagtcagccaaaaagaaagaccaccaaaagtaacgaccaccaagatacgcatagtgattcgatcttttgatcacccattttttgaaaaccattttggggggcttccgccttacacacggaagattggattgcctgaatcacgagtcttatatactgtgttacgatcacctcatattgataaaaagtccagagaacaatttgaaatggaaatcaagaaacaatttctggtcataaaaacagaaaggcatgaattgcgcaagaagttctttcggttaaaacgccgtgcgacttggaggacataagacttcttggtcaaaaagattgccgacagaatgctcctaccccaccatgcctggccctttaccttaccttaagaagaaatagggggggtatgaagcgtgggaaacaatgcaagaagtgtatgatacaacgggtaaccttaaggagtggcggcaaagctcttgattgatcaacgcgagtgaactgtgcttagacgcttcgtaaaaccgcaccgatctacgagaggagctgatggatgagtaggcttcccctttcgattcacggaatgtgatctgggacacgatgggagtttgcgtgcctcggaaggaaagagatcaccggagtatagcacaagatcgccttttcttgctgccatggggtcgacctgtaaacaaggtaaacccaatgagaaccaaaaaacgggagggtaccgcattgggcagaagacgatccaaaaagcgaaggctcacccagctgaaggagggtcgcgttagcgcctgaccttattattagagaaaggggcaacctatcttactaataataagaaagggggtgagataggcgacaggtagcttgattccaagccggcccggccgcgaggaatcaagagatctttgccggtgctgacttggatctcgggtgacggaataaggcggccagaagcgacgagcattcgcggtcgaagcttggctctagcctatcggctagcagtaagcttggctacagcgaagcgcttaccaagcgcgaaggaaagggccttcgccacttgagccgtatgcgggggaactcgcacgtgcggttcttagggggggagaactagtaggagccatcctatcccaatagcgtatatttggagctcaatatgaaatcctattttattgcaagacccgttcggataaaggaaaactccagagattgcttcgaagtaagatccttgcgttgaccctttcctgaaccagaaccgggggggggtggtgagaggaaaaggggttcaaaatgtcccatcaataaagtgagggctttccggaccttccccaccccactttccattcttccttcccctctcacccccttttcaataaataagccccgctccctaagggccgggcccctctctgataaggaagcaaacgaaataatctcaattttatgacaaatctggttcgatggcttcttttaagttcgccagttggcgggttttttcggacgttttctaggatcagaaggtactaatgaccacgggtcaaaatattgtgattttttcaatacttctttttcttttgggcttcatctttctctttcgtctttattgttttcagttgaaaaacaagtggggcattggacttgtagttgttatgtatggattcttgttatttggaatatctttcttaggctctttgatccggatctacgtgttttctcacgtaggtctggatttgacctcgttgttccctctaatcgatagtgtcggggggggggcaagcccttcctcttccggccccttccgacacagggagctcatccccgtatagtgaagatccattagacatcgatgtcttattggaaccgttttctgaaacggaaagtggcttcacatctacgaattcttcacgaactgttcgttctccgggggacggtccctctgtggccccagaccaggagaggcagcggcagcaagaggcccccgcttcttctttatattcttctttgtttgattacaccccgattcgtgaacaacgagtcgcaggtattctggccgatccggccaatagaaacgaattgttgttcatcgaacaagaatttaccaaatattgtaaacaagcttcaactcgagccctttttccggaaatggattttatccctaaagagtctggaattggtgaaatccatgttaaaagacactccattctctatccaatatcaagaagacttagacgaggttagcaaaatggattctaaagttaagggcgagtttcactattttttaaacaagaagtttcagacctgacgaaaggctggcttctacacggaaacgaagactttcgagaacaaatattggactggaccatgaataaaaaaa

SEQ ID NO: 224816 - DNA, 9862 bp, Cannabis indica
gcattagagacttgaatcttaatatgctctagcatttattgggttttactactagttgctaaaaaatataaggataagcaatgacgaataatgtggttaggtgattgaaataataaataaaccctggtttgatctaaagtgatcaatttacgaatattaggaagtaaaaataaaatataaacataaattacaaaaataaattcacattggttcgggaaaatactaaataattgacaattgttgaggttttgatataaatttcagtaattacaaaagagtaaaatcacacctcaaaatttcactataaaatagtgtaaagacttcacattttttttattctacaaaaaaaaaaaaaaagcactattaggttgttaataccctctctcctgtttcgcattaaaatagtgttagcgacaacgagcttaggccatctctaataggacagcaaaaactcaaaaatagtgtagtttttacacaaaattgttccaacccaactttaaatgtcatcctatatataggggagtctacagtgttccactaaaaatagtgagacactgtagagcacggaaaatttttatcttgttactttttgtactttttaataattaaataattaatttatcaaaaaacaaatattaaataatataacaataaagaagatatttttattgttatggttggaatagaaaaaaatatagtgttaaaatagtactcttttagtgttgctcttatatctctatatgactaataaataacaattaaggaaactacatataatgagtagttcataagtagataagctcaataacatcaaatgtctaaaagaaatacaagtagaaaacaaaagatgaagaataattaatggtcaaaaaactcgtgaaatttgctctaggagttgcttctggttctcccattcaaattatatttccttttccctttatcagtcttttgggcatgtgccctagcctctaaaaatgtcttggactaacacccaatagaatttgaataaaacacgtagaaagataaatttttcgacttttgtggcgtcaagtgacgacgcactgcagctatcaaaagcaacgtgcgttgcctagaacttgttttctttattctagtgatctacaactttgtttttctatttatctcaatttcatcttggggttaaaattaaggttgaagatcccaattcgtcacaaaattatcagttaagattatttatgcacatttgtgttgtgtcgtcgtgacgaggggtggtaatttgtggtgttgttgagtttgtgatgacaatttgggttatgatgaatgcctgcattaaatgtgcactcatatactaaaataaacttgtgtaaagtgtggtaaacagtttctcatacaaagaaaaagatcgttgtggctggctagctaactgatggattcgttattttctgtgcagcctcccaagtttcaattctatgattcaaagacaccgttctatacatctcctaggttcttgccacctactaaagttgaaaaatgcagggtatgactgtaagctcaactcatcttttttgtcttaaatctgtagtgtgaatttttcatcacaacaccagttgattcttgcagattgtggacgccatcatttctcatggctgtttcctgcgggagtgtagtgttcagcactccattgttggtgtccgctcacgtctagagcatggtgtagaacttcaggtgagccaatgagtattctactttgtactagttttggactttattgctcaattcttaatgacttgacatcatcgatcccctgtcgtattatcactttctgttaaacatggttttcacctttgagctttggaattttgttgcaggatacgatgatgatgggcgcagactattaccaaactgaatctgagattgcgtcgctgcttgcggaaggaaaggttccaattggtgttggccaaaatactaaaatcaggtaaaattcgataaaatacaccatcctaatatgatgaaaactgaccctttaaaacgttattcctcacacacatggagccctttttcttttctcatcatttatgtttgactttgttgaagaaattgcatcattgacaagaatgccaagataggtagagatgtgatcatcaaaaactctgatgtaagtgttttatttctctttaatgataccttaaacttcttgtgttataaataaattgtatgtagatacgtttgctttctgttcggctcaactcattgtttgacttctcagggtgttgaagaagcagaccgatcaagtgaaggattttacataagatcaggtcttacagcaatactgaagaatgcaaccatcaaagatgggacagtaatttaagttagttttctctttggtatttaatggtagaaaaagtttttgaggaagttgactcatcggatttgactttcactgcttctcgcatatgtaaattaaaggctgtttcaacaaccagttgcttaatatttagagaataaggggttctcttggttttatgcttttttgtaccagtttggttggggaatattagagctgagagagtttatttccaataaatattaataaatcacatgaagttcttcttagtatttatctactgactattgcgtaaacaaatctactcttcaacatacttggttctactgtccatttttaccctccctgtccatctctttctttcttagtgtacactatttaatatggttccggtataaagtgaacatttgtggtgtttcattcatttggttctaccatatttctcttctttctttccaaatagaaattgaagaatcaagccaatacaaaaatatatatattattgctagataacacaaatatccttgttcacaattatagaatcaagggtaaacgacaatacaccaatattaagagtttattgactatagtcactttgttgtatttaatttataagttgggtataatcacttgtacagacatgtcaaacttaagtttcgttatactttaacttctattttggaataaccacacacatttagctcactcccttgtttatttgaaaattctctcttactaattgattaatttcttaacccagttttgcccttgtgcaaagccaaccactgagcccttcgaatatccctggctttcttccacttctcaacgtttctcaatcgagtatacatttttcgaatatgattaagcttttgagactcttgggtaattaacgaagcggttgagctactttcactcaaaacgacctcgtatccatctcgaaaagagtccattccttctgtcagaagctgccagaaaagcccaccaaccgcagcaccaccgccactcgcagacgagtatatggcatcgtaaactgcattgaatagctcgtctctttggttgctgccggacttaccaaactcggcgaagagaataggcttgtggagaacattttcagcatctgaaatatgatcgtttagccaagtctttaagaatgccatttgagcttgagaatttgaaccagataacctgccaaaaccaaagacaacccaattcttcaacttcccaaatcatcaaaaataaaagtgttttaaatttaaattcaattataccattgatctgggtacgagtgaacggtagcaaaatcaatgccaggtatctggttattagcaatgaaatctgtccccacttgaaaatttggattagtttgctgtttggatgggccgtagaaaccttcaagaccagcttcaagcaagtgatttccgtctatagatttcacgtaagatgccatctctgtaatccaagcctgtgaatacataacatttatttagaaacatctttttatgcttaccattttaatctctttctatttaaattttgaaaagaaaagtggtttatttacggcatgaaaaaaagagaacgaaaaagggcataagagcttttcacgcattgggcatgttgagacccacgcccacacgccccgccccactttgtccacttgtgttaaatgcacttgtgatattggttaatggttgctttatgctctcatgcttatgcaaacgtggttcttcctttttatttttatatatactacaaattctttcgatttcgaccaatcatatattcacatatcctttggttaataatattttgtatcaacggaaccaacctcactaaactccaataattgtaacattgaatgtaactgaaccccacaaaggaagaaagcccattatttaccactatgaaacggttctctcatccctctcctttctcattttatgccccatgctctttgtttttgttatgtttggtacatatatacctacccattgacgaatgcaatatcacatcaattataatggttactacttaccaccattgttaaaaataaaaatctgtatttacgaaattgccgttcttcggagaaaacagagtcggaagacccaacaaaagtaaaagagagagagagagagacctgaatagtttttcctgatttatctgaagtgcaacgtggctcgttaataagctcccaagccattatggttggatcgtccttgtaagcaactccggtgaacgtattttttcttgtaagcaccgtctatttcacaaaacaatataatcgtaaatttaccaattgagaaagaaaggaataaaagaaaaaaaaaacactaaagagtttctggtaagtttatatatctagaaatatatattttttttaagagttaagaaataaattaattataaatcatgcaagatttttttacaaaaaagaaaaaataaagaacaccaatctatcacgcgtttagggaatctatctaatatatgaaaaatgattaaagcatttactttgatatggtttttgtagtattgcttaacaagagaattggtgaagaaatcatcatcggaagttatggattgcccctgatttcttgcccactccacatattgtttttttccaccaaagtcttcatagttattaacaaagctcaacaccaactttatcccattcttccttgcttcagataccacaaaatccaacccctaatttaaacaacaacaacaacaacaaaagattatcatcactacgaatctatcagaactacccaaaaaacatatataataacattaataattatatataatatatacctggaacatttgctggttgtaggagccaggggagtattgtaaaggcctatatcctccatcactgaaggcccaagttcttgctattgaaaggccatgagtcttggcttgttggaaagcagttgtgactttatttctttgtgatgggtcagaggccatgtacattaaccagtacccattgaacccgtttgcgtagaaagggacttcattcaaaactaactgtactcctctcgttttcacaaacccatcttctgaaaatacttgctggaaaaacagagtaaaactacacagaaccactccccaaccccaactccttttcatcattttcttttttgcttttctctctctctctctgttctaatgtggtatgaaagtatattaggaaaagaagtacaaaatagaaaatagagaaaatctctgcctctgtatttatagctcccaaggggaaaaaaatataacaaagaaaagattatgtaggattacttagtggttgcactataaatgcaattgtattacttaccaaaacctatacacttagatacattatattttaatttcttttgaagaaaaaaaaaataaaaaatcctgtacttattatgaattgaagaaatatcagtcaactaaaaactcgaaaataccctttggtatatgttattatggtacgtaacgtatggaatatgaagcaataatatgtttaccaacagttaattacttgtttgtcgttttttaatttttcataattagttcgttcaatgatgacctctgaccttgttaaaacgccaaaaaataatataattaattattttacaaagagtagtaattaagtacgctaataaaataaaaaagaatattacgttcttcgaaattgtattttaagttttgtttaatagttataatagtttggtgttttgtagtgtaaaggaaaggaaaagaatcattcaatcatatatatattagctttgtttaattcctccgaaaaaaattagataccactcgttctactgtgaggttgtaacattgtttagccttatcatatttagtcccactgttaaaaaaacaaatcgattatcgatatatattcagttgtcagatcaaatcaaggaagaagttttaagatatatatctataagagatggacatttaagtaagatttgtaaccctacacgtatcacacattgcatgacataaattataaacgtccaaaataatataataaaatcaagggccatcttataaaactttctttctccagtgaaaggtacattcacgtgacaatcttatattttaaattatattatatataattatattatatatatttttttttgtaaggacattttaaattatattaaatacactttatcaactacttgaggccagttcaagtgactatagatgagtgtctgagtgttgaaagttttgagttcgagtccaaataaaacatggttgtaatatataaacgtttcaataaaaaaaaatacactttatcaaaaacagtctaatttataatttttgcagagaccctcaaaatttaagattttattaagattataccgatgtcaaatttaagaaacagttgaatttgcaaattcttgccttgcaatatttgtaatgtgtttcttaacattaattttgttgaaaaaaatgggtattatatttacgcggagagtggctggctatggctaatattttcttcaaagaattttgcgcatatcacggtgtctggtacagttgagttggtttgctgtaaatctttaaatgttaaagaaaggagaggatgacacgtggaattagaaagttgaataaaggttgactatttgactaattaagatgaaggttcacaatcacatcagattaaaatatatagatgatgaagaaagaatagaaggatagatatcattatttaatgagtctaattctaattaattaaaagcatatattatatgtttgagtgaatgatcagttcggagacaaaattcaagatttatattaataaaacaagcaatataggcaaagcccaaagaagaagagaactgaataaaaggtttatttttttcagtttcatccattaatgatttatataccatatttaacattacactaaaataaaaatatattactcaattaaaaaaaattgaatatacattgcacttaacattaattatttaattaaactttattaaaaaaaattaattatacactaacattaacttagtatacataaatatatagatgtatgccagaaatattctttatacaaaatgaaacaacgcttaaagctattattgatgtcaccttcacaaaaacttttgtttcttcttttaaaatttaggagttatcttctttattttatttttgttgggaccaatttccaagttcaacctctactcttttctagggacaagttccaatccaagtatattttgcagttatattccttttttaattattattttaatttgatactattactattagagattgtattattcgtgtcctattcgttggaaggcatgcatgcagtccacctagggataacatatataagcaaaaaaaatataacaaaaacatattttgataaaactgtacatattatcaaattatcttatcaaattacatggtgaaagttgtttcaagttgttttgtctaaatttttgagataatttaacctaagtcgttttgtttatataatgactcatattatgacggtatatctttaactagataattaacttattgactgaaaatttccctgcatcgatgtttatcatagtgtgatctaaatcacgctttaaaaaaaatctgtatataatatataaggttgttatggcttaatttttattgaaagattattaattagtggtcataataagtaaattttgttagatgttcatttgattagaaattataatttaaatttctattgaatgatgtagtatccatttaggtgacacgtgaagtacattttataatttgggcaaataattctattcttagtaagttgtacaggaaggattaaaatacttaagctcacaaacaggagttgtgacatccgagctgagtatgcatagacagccgactagcttctataaagcaggtggctcgcatgcactgaccaggatatgtgagttatcaattttaaagatatttcttgtatgtcctcaaacttacaagtcacgacataattcttaaattcataggatagattcgtgtcttcaaagaagaaagacaatcaacctaattttcctactttccttattgtaattatagaaaataaactattttccattttatttcttattgagtaagggaaatcaatttcatgtaattaatccctataaatagtggtcttatctcactattcaacgacacgaattttattgagagaaaatactcaagagagaaacgttgatctaagagtaaattattcagagatcattgtaaaagctttagagagagaacaagacattcttgttcatcttctcacaagtcaatacaaaaaaaaaaaggagagtagactcttaccatccagaaggggccgaatctttataaattctagtattttctttactttagattatttatattttgttatttaattattctcaatcgttttgatttgactcattatcgttggctaaaagggagatcaacatcttagtacttttattgagagcaaataaacacaagtttttgttttaagtgtttttcgggacaaatgatagttgtgcaaacacaaaggggaaatcaaattaatacaaccaatccaatgggtacggatccaaacgtgcagacgcctgcaaacccaagaaattcagccaggacggaccccgccctgattaatccttagccaccaacaagcccacaaactgtaggtcaagcagtgacaacccctacctgtgttcactccgggcgtgcaagaaactagaactaccagtacttgagctgagcaaactacacccggtactgaaatcccatatgttaccatttctcaaaggccactcggtgatgatgccaagctacagaacttgcgagatgctctagggaaaatacaaggccataataatactcttcatcatgatcaacaagatactagagcagccataaactttgcctttgccgaacaaagacgccagttcaaagaatagccagatcgagaaatgaagatcatgagagcccagcaagcgacaatcaacaattgttccaggcaagccgccgtattgatcaggagagcctatcaggtctgtaaaaatattatatttaagtaaaaatgttttcaataactcatattttaattttcacttaatacattactgatgttgtgatgggctgcttgattaaagtgagttgatagaaaataaatgagtagtgagcatatggaccaatacttatattttatataagtgagactttttattaaggtctgtttggaaacaactgtgtaattactatgtagtgtaataactagggtagtaattacactgtatagtaattacattgtattttaaaatacaaggtgtgtttggatgtcaagtggtaattacatgtgaattcctaatatcatgtttgacatgatagttagtaattacacattaaattaatattataatatttaaaaataaattttatcaattaataatatatataaataaataataacctcttcataaaataaagtcaaaactataacaatttagtagcaaatatttaaaataatttttttaagactat

SEQ ID NO: 224817 - DNA, 3759 bp, Cannabis indica
tgatcattctttctctcaggctgaacttactatcttgaagctaacagaagagaaaagcaagaacatcaaagagagagaaatgcttaagcatgaattggtaagaattattgagcgagtcaagtacttttaataataatgtgacatttctcccatgttttcaagtttcttagtatattgcttctttttttggcaggagatgttgaagaggaagaacaacaagaaagatgttcaagtaggattccccttttctttgtttttatggttgccctcgtcggtttggtggccgggtacttcgttcatccataggagaataactaaggtgttgagtgacttggtctctcatccataggagaataactaaggtattgagtgacttggtctctcattcatagagttgtttggttttaattgtatttgatcttgtaatatatggattctcttctaatttgtaatgtgcagctaaaataaaagaaaagtttagcctatttgtcacggaattgctctttctttttactgatactatcatgttttatataatttagcaggataataatatttagtattgaatcaacatttcatgattactgtcacttaattttgaaattgaatgtggtatgtgaattcttaaaaattaattctccaaaaaaaagggatcaccaagaaaaaagttaaaactatctcattcattgaagttttctataagactccttgaaactctacaattctttacggtattagagctattttgaccatgttaatggactcgtcttctaacccaccaacaactgtagttttggtagcggaaccggccccttcggcaaccaacacaaatcaacaatagaatcatttctcaaactcactcacttcatctttaactattaaactcgttcaagtaaattttttcgcctggaaatcccaagttgttctgaccgtgatcaggcatgatcttgatgagatcttatttagcaatgtatctcctcctgaaaaattaatcaatgggccagattaattctctcttctcgcaatagaaacattgtgatcaactctttttgtcttggcttcgatcatccatgatagacaaattattggttctgttgctgcatattccacttcctgtgaagtttggagagctcttgaacaaatattcgcagggcaatcaaatgcaaggcttcttcaattgaagagtcaactcaccaacatctagaaaggtgacacatccgcctcatattatgttgataaaataaaatctccgtgataatcttgctataactaaatgtacaattagttatcgaaatgtggaattacaactattgaatggacttggacctaaatatgatccagttgtgtttggtattacttccagtcttgaggaaagccaagctctgttaatggctcatgaatgcaggcttgaaagacatcattctatagctaatatttgaaacaaaatgtcttctaatctcacaacaaatggtccaataacttggtttaatcagtatcaaagcccttctcagtacttaagaagaccaaatcagaatgatcagtccaaaaactatggcagaaactactcaagatacccctccaccaaacaattcaaggcctatctgttacactgctacaatttttcattacatttttgccaaatcctttactccatccaagaacaactctgtgattggtaattatgcacctcattgagccttcctaactaataggaactagctgagacaccagatccacaagcatattcatccacatttgtccttggttttggagatgattttctctgttatgctgacacaggggcaacaaatcatgttgcaattgaaatggaacatctagattatgccactccgtgcactagatgtgaatccctaacagttggtgatggtaagaaaatcttaatttatcacataggcacttctacaatcccttctaaccaccgtacttctcttaatcttaattatgttttaattgttcctattattaagaaaaatcgggttagtgtatccaaattaactaatggtaatgatgtatttcttgaattttacaaaaaatattgttttgttaaggataaagaatcagggaaggttctagtcaaaggaaaaattaaacatggcatatatgtgcttgggaagggatcatctacttccacacttcagtgacatcttgccacaatctccaattctgctaaggatcaaagttctagttgtagcactagatcttcttcaattgattacaatgttcaatgtaatagtttgttaggattttgtgccctaaataaaactcattttcattgtaatcttatttacttttaataaagatcataaatcataccatgacttagtcatatgttttgttcacatattttatacatgattataggtttaatatataagatctattaaatcccgaacatatagttattcacaattatagtgatgccatcatagtgaaaagtgattatgattatatgtctcaagttatttagtcccacgatttatcagtgcactaaatttacactgaagtgaatcaatgatggggtttgcttacacttggataaagtggaatgtcttttccagtatattagtaaagtaaactagcattggatgtatcgactatacattgaactagaacgatattgacagtagtaaatatatcataaacttaacgttgtatctctttaagtcaatgtcacttagttgatcatagatcatttgatctcaatcttgagatggttaagctctaccttaatgtattgcgcacttgttcgttaccagcttaccagttgaactagcccatacttacatcgtaggaactcagtagtgaaattgagtggaagtatttattatagatatggaaatctattacttttatgtctattagaagtgaaatgctagtttccttagagcttgatttaacgcgataaatgatagagcactcatttcggtaattatattagtttcccgaaacatcatttacaagtagctaagtgttttaaggataaaatacattaaaggataaaacgataattttgttcctactcaatttataccatccatagaggatcaatgattattgtgattgaaacaatggataaattatagcgtatctatactttgtgtataaagtgttcaatgtaattagaagtacaattctgaatctatagtggagttaggaggaattagtaagttagaaaatacattcggtaaatttcaagatctgattattaggagcttggttatatgggtcatattccccacattgtctgagataatatcatcttgtagactcaactaattgatttaataagtcaattagaattcaaaaatagattgcgtcttatttgagaatttcaccaagtttgggcaatcttgagaagaaaataaaaataagtgtttatttgttaattagtactctttgtgagtctaattaataaatatattgaaattgcattttatttgataattattaaaataaaattggtatgtaaataattagatgataaaagtactaaaattagaaaagacaatttagttttattagttgaaataaagtggcacaaatctaactcaaaagcccataatatatttggccctaagagttagatatcaacccaagtttttacttaagtcatcttatctaacctagccctaagtgaatgcgtaaataaggaaagtgatgagaaaaaaaaattaacctcttaattttatgttagacaactctcttctcttttttctttgtagtttttgaaattcacta

SEQ ID NO: 224818 - DNA, 4761 bp, Cannabis indica
gttggttatatattaaaaaaaaaagttttcaaaaattaagcttagggtactatttttaccattttagaaagtacatggtctattttgtcatttaacaaaacagaaggcctaatcgataccttttgcaaaatacagggtccaaaatagtatttacccaaaatataatggccttgaaattagagtattattaatgatatgatacttttggggaatgaccattacattaatcatagttaccatactacctactgaagactatcattgacttactccataatccattataattatgctctctctttaagagtttatgtacttactcctactatttgttatatatttactgaggatgagttgactatcatcatgacaccaattaattaagatttctcctcttataactaaaaataataacactattattatctgcacctgcaatcaccacaattaatggatctggctttatgccattgcacacacaacaaaatagtcaactcatatcttagtcataacttttgacaaatggcaaaactctttcacacatagagagtgctcaatcaacatatcttaacacagaagtaccagatcaagaatatagctgatcatggctgaagcttttctcactgtgttgtttgacaagctatttgaaagtttagactctccagagtttgccaacttcttccaggaaaaaaaatcaatttgtgagcagctgaaggagttgaaccttaagctaaaggcagctagtctactggtaaatgatgccgaagagaggcaactcaaggagccgggtgtgaaggaatggttggatgatcttaatcatgtagtttacagagcacaagacatggtggaccatgttgactatcaaatcctatccaacaaccttggacatgaatctaatagtactgatacaactactgtgcttatgaaaatgaaattcttcttctcttctttgactgaattcgacagagttattcaaggtgatcaacactacaatatttttacaacttctcatcaattatgatacaataaattaatttatcaaaaaaaaaaaaagtgataatgtttgttcagcatgaagctcactagtcaatttgttaatttagagataaagaccccattaagaaatggagcttctctcttcttgttgttagtgttaacacttagaatgttgcaacaggtggttcattgtatataatataaatatatatagttatatattcactggatattatggtcttgaaacatatgattaatgggaaaataattaacttatttttacatcaaaatataatgtgttaatcacaaaaatattattatgacaaaaaaagaagttgcaactaataatgtctttcatttccttgggcagcggagatagctaaaatcttggttgatataaaccttcttttacagaaaagaattctcctgggtttgaaagaagatattcaaagcactatctcttcacaaagatcagttgtttcactgagaaaacaacaccaagttcaggtacatggaagagatgatgataaagataagataatggagtggttgacaaaaaaggaaacattaggcagtgataagattggtgttcttccaatagtgggcacaggtggacttggcaagactactcttgctcagctcgtttacagtaatacaagactaaagaaacatggtttcgagcttaaactatgggctactttatcggctgagtttgatattaaaagaacaatgaagatcattttgcaggctgctaccgattcccatatcactactgatgtttcagttaaggaacttcgacgtagactaaaagaagccttgagagccaagaaatttctcattgttcttgacaatgtgtgggatgaaaatgaagacaactgggatgccctgaagctcatcttcacatctggtgcccgtgaaagcaggattattgtgaccacacgcagccagcaagtggccaaaattgtaggcatggggaaaatttatgaactatcacaagtatctcctagtcattgctggaaaatatttatggatcatgccttcaatggagattgggaagcaaataaacatttggaagaaattggaagaaggattgtagttgagaaatgcaagggcctcccattagctgtgatatctgttggtggtcttctaaaattcgaaaacaatccaatcaaatgggaggagatcttaaggagtcatgtttgggaatggtgtgaaagccagaacaataatatagttccatggttatggttgagttatcgttatcttccttcatatttgaaacaatgttttgcttactgctctatgtttccaaggaatcatgaatttgagagggaaagaatgatcttattatggatggcagaagggtttttggaagataaccaattagagaagacaccagaagaaattggagaagaatattttgacaatctagtttcgaggtcattgtttcaaagattgagtagatatgactccaaatttatcctgcatgatttggttcatgacttagctatgtttgtctcaggagaattctgtatggcagcagaggacaataataatttaaggaatctttcaaataagactcgccatttatcgcacacaacaacacctgttactgactgtgactcggttagggaaggactatcaagagcacagaatttgcatacttggatagaactgagtacagcatgtgagaataagataactgtagaattttttgtagaaagaaaattcttaagagtactatctctgcatagtttttctgtgtcatttgtgttgccagattcaatcaataaacttaaacatcttaggtatctagacttatctcaaaatattataatagagataccttcttctatctgcatgctatacaatttgcagacactgctattgtcatgttgcagaaaccttagaagattgccaaaggacatgggaaggctaataaacttgcgccatcttgatactattggctcgccactagacgaaatgcctccacaaatgggaaatttgaagaagttgcatacattacctgaatttgttttaggtaaaggacatgacaatgcttcaaccattgaagagttgggagagcttcaacagttaagtggagagctttatattacaggtatgcaaaatgtagctaatgtaaatgatgctcttaaagctaatttcaggtataaggagaaacttacaggcctaacctttcaatggctgggtgagaccacaaacacaagactagaaacagaggtacttgaggcactgcaacctcacacaaacttgaagaaactcataatttattcgtatgccggttttagtttccctaattggattggagattcatcattttcaaatgtagtgtcaattcatctgagtcataataaacattgttggtccttgccatcattggggcagttaccttcacttcaaaagcttgagatccaaagctatcatggggtggagacaataggcgctgagttttattatggcaattatccgtccaataatattactccattccaatcactagaaactttgatattacatgacatgtcaggatggaaggagtggtccactattgggagtgatgatagagatggtggcatgctcaaacttttcccttctctgaaagagcttagtttgaatggttgcccaaacctgagtgggagctttcctgatcttgacacattagaaattctccatatttcaggtatatatggttgttattttccagaacctcgatcatatatatgtcccaaccagttgttgtgcaagaaactagagttcccgaggagaaattgttgtgtttctattacagagttgatagttcagtttggcgactcagttaagtcattccctttagattacttcccaagtctgaagaagctgatctttttcgattgttcaagcttagaatcgcttaccttttcaaaagaaaatggcatttcagaactccgttcactcatggttttggaattccacaattgtagaaatgtcatggcattgcctcaacacatgcaaaagcttcttccatctcttgctacattaagaatctaccaatgtcaagatattaagctatttcctcatgaaggatttccatctactctaaaagagcttcatctctgcaattgcagccaactggtggcacaacacaagcactggggtctgcaaggactaaactttctcaaaaaactaagtattgatggatatgatggtgaaatagtgcttgattcatttccagagggattgcttcccatctctttaactgaactgtcactgaattatattccaaacttacaaaagctaaatgacaatgcctttcaacccctagcatctcttcataagttgtcactccaaagttgcaagaatctgcaagttctgccagagcaagtggtctcaagcacatctctacgctctttgttcatcgatggatgtcctatccttgaaaataggtaccgaccaaggagaggcaaagactggcataagatttcacacattcctatcatatcaattggtcactggtcaaggttagtaataattgaattctacttaatttgactgtatttttcatggagaagaagggtctcttattttgagtgtttatgttaattttagaagactaactagcttccatattgtagtgcatattacaggactgaagaagatgatatatgaggactgctcagagaagggaaagagaccatctcatttcattctacgcacaacaaagtttgtccactgcatgtacgtacatatatatatatatatggtagt

SEQ ID NO: 224819 - DNA, 3073 bp, Cannabis indica
acttctgtttctttattgatgttgaataaaatggataacattgaaatggagttttatttagggcataaaacccaacatggaaaacaacagatatccaagggaactggtctaaatttctagacccatccttgaatgcaaatagattcccataatactctaaatttctttccctacctgaacatgcttttaggatgagatttttactaacggcaaccttgttggctcaatatacaatgaaatcactagtgggagttaaataagtatcatgttttcattacatcctataatagattggtatttaaaaaaataatccattttaagagctacatcataccattcatcaagtaaccctaacaagtttggacacaactcatgttccacaaacacaatttaaatggatctataaatgacaaatacctcactatgtcctcccataagtacactaacctataaagcatgattaaagtttttccaagtgaaggccatcatactcaaataacaatgatataaaatactttggtgcactggtaaaaaataatacatatgatctacaagagtctgagataagaactatatcattaacaacttcctggcctgcaccccatgtatatcattaacactaagagcatatgtttaagcatagacttttccttctactcttactttacgttggctagattcatatgccaaatttcccacattactaacctcactgagacttagtagatattacaagggttagagggacaatcctaccactacatgcccaaaacatggatgaactagccaataaaaagagtgatcattaatactgacataagttgaggaaagtaatctcaaaaactttatgtacaattcattgtaatatcctcttacctcaaccatcacatgctccaactattgtcctcttgtgaggcaaaaataaatattgctccctaaaatctcttaaaaatatttgtggtatattattttggtcaaggtatcccacaaatctgctgcaccaattttaatttggacacaaaaaaagtaatatggtacttcttaggtgtttccctagtgttaaggtttacttatctaccttttctatctttcaataactaaagaatcttatacaccgataaacttaggcattcaaactaatgaaagagctaaaaataaagattttgttgagtatcaacatccatctactgagcaagaactcctcctaacagtactataattatggattttagaggctgtttttctaccccttttataaaaaggaaagctgaaaagtgtaaaaatacccgcttggataaaaattgacatttagaggaagttttttgtaaaaattgtagctatataatttgttgatacaatttagagacggttttggaatcaaattttggatatttatgaagagcacattatgacttcggttatttgaaaataatcgatgccatatcaatgagagacacgtgtttgttctttaccatatatcgttattattttcaaataactaacaccatagggttatataaataaatcttgttcagccttcctcccacttcgtcttcttcttcctcaacacgaaaatagaagccagcagccaccataacccacgaaaaaaacgcttgcaaaacaccttttaaaaatcatatatgtctaccagttttacaccatttgagtctattttttttaaaaaaaaacttctattttcgatacctaaacctatacaccaaaaatattttgttttttcccgtatttcactctaaactgaagctattgaagaaaaagtggtggttataatccagccactgattttagtggagaaaacatggaatatcaatggctattaaggtataaatatgatttatattcattttagtaatgtacattactttatattttattatttaaaattttcttgaggttttttttttatattattaatattatgttattgtgtatgttcatggtggctgaacttttgtcgaaattggtcatcagattgtgcttgtaaagtaaaaatttaaaccttaatatatagtatatatgtatatattttaggttttattaaatatttacatatatatacttttgtgtattttatttataaaaatattataattatattgaatatattctaaggaatatatatgtattgtgaatgaggatgagataggagaaatttaattagtttagaaatgatgtttttaaaattttattaatgtgagatataatttattatatatatgtatatttaaatttcttaagaatttatgtatatcatctactaactagtaactagttaataactagtaagtagtacttaaataattaaaattttagttttgttgtcattttattatattgtaggttgtgagctaatttttaaggttccgaataatttggagttgatcgtattttagcttactacaggtatataccttcacgatctttttgttattaattttttatcaatacttagtggaatttgaaaatcttaaatatttatctgtagtgaactaggttcagtgatatattatactacggtcggatgggtagaataatattatgtatgtaagttgagtttgcatatcttaaatatttaacaatagtaaaataggttctgcaaatacatatactgcagtcggataagtagataatttttgtattgttagtattattttgtttgttttatattattatatttattttgtttgttattttaggcatgttaaaaaattttgggaacgcccaattacaatcgttatactgccaaacttttgatagaattaggataaattttcctaaaagtacataaatattaaaggaaaagtgtaacgcataacacaaataattggttaactactagctagctataagaaactagctagttaattacaacttatataaatagtaactatttacaattagttactagttgtcaatatttgaaatgagaaatttaataatatgaactaaactaaaataagaattagagtaatatataaatatgaaataattgtgcgaattttagttagttacattatgtaagtagtaactaattataattagttactaaatactg

SEQ ID NO: 224820 - DNA, 9087 bp, Cannabis indica
agagagagagagagtccaaaatggaaaagtggaaagtagtatttggaagggagttgatgagaggaatcaatggttaggtaatggcttgtggcctcttgtctttaaagaaggtgtttgtgttagcttacaactttttgggagggattttcctcttgttatgttttatcttacagaaatagtaaaaggcactagtaataaacattgttataagatatcaacagtgtttagtactacttatagttagtgtcttaaaaatagttaacaattaacaattttataataattataaaattaaattatataaaacttaatatttaattacattaatagactaaataaaaaatatttataagaagatcaaagtgaaaaaaaaaaaaaaattagggaggctaaaaaatacatttttaaataaaaaattagaaaagaaaaatatttgggggggaagcaaggcccccatattaaatatacatattcgccattacaaacaacgacatgacatttttaagtggtgttaagaattactagtatttttctaataatagtgctcgtacaacaccataaaatgtcatacttttattaatataattaaacatcgaatttttatataatttaatttaataattattaaaaaagctgctaatttataataatatcgaataccactagtactttataagaatgctactcttaaaaaccataaaatttaaccattatgtcttcttcttttagtggagaaaggaagccaaaaaagacaatgactaaaggaatattgttttggagggttggtgtctatgattaggagtttaggacctttgcacatggtctatataaaatatatataaatatatatattggtgtagggaatcctatagaaattgctaattcttttcttccaaataatattatatatttatttatagtttactttactaaactatgtgttcactatcatttcatgcactcttgtacgtagagctatagtcagcaattgcaattgaatactagagttgaatatatacaatattcaaccactccaagattatataacataataattactattatgttcgagctcagatggttagacatgtgatttgttcttacaaaatttaaggttggaattacctacgtagtgcatagtaattattcttttggtatcctagagttggatgaggaacgatatttaataattagaagatttcgagtataattgttaaaatatttagtacaatcgaaataagtaagaaatgtcttcatttatcacacttttaggcgtgtttttagaaagttaccatgtaattagtgaattaatttaaaaaaaaaaaaaagaaaacataaaaacaataacaaaaaattacaaaaatactgtacatgatttttttttactgtttttatgattttatttacatgaatattgtattttgatgttatactcttgttattttttgttacttgtaggtagttgttttgttgttttcttgtgtctttatagaatactgtaaaatattaaaaaaaaaactttaaacataaaaatgtaaaaattttgccaaaaatagtaatttatgtaatttataattacacaataacaatataattggagtactctctaattctcatggatgtaattacattgtataattacaaaatgttaccattttttgctaattaacgttattaaattatgtaattactaacttatttgccaacacataaaaataagaattcgtataaaattacaacttaatatttaaatacattttgcattttaaaatagaatgtaattactaaaataatataattacacagttacttttaaacgttggttaacaaattttgttagttacacaaaatgttgaagaaggagcttgtgtagtgcagtgtgaaaacaagttttattaattataaattaaaacattatagtatttaaaaatcccatatggtcataaattataaacaaaatttttatatgtggtagtcaaacttatttttatattcatatgattaaatatttcaaactcagtaaatataaaaagtgaaatgattgggtttaattagaattcttggactatttttttccaacttaaacaacatatttttatatagttgtttttttgttaacaaaagtggttgatatatagaatgagacacacacaaaagtgattatctaagattacaaaaataccaaactaagacttgcccacactcacttgtttttatttaaaacaattaaaaagaaaaaagaacaacctgagtgagatttgtatgtttgtgataaatttttagttgtgaaattggaatcactagacaactttaccttgtaaagttccaaaaaaagacaagaagaaagaaaagaagagaatataagcaattatttttgagtgtggtacatttaatatcaaagtgtacatgaaatgaaaagggggggcacaatccctctctcccaacacaataagaatcataaaaagaaaaacaatgccaaagcataagatcacatctttcaaattctacaacataactacaaaatggtaatgacaaaagtatgtgtttctttatctcgagcattgttttgggtatcagtggtgttggatggtgatacttaacaaatgattagcgatattacttaacaattgttaaattaaaatatataagacatgttatttaattaaatatatgtcaatgttaaatatgaaagtcttaagtaaatctaaataaaataaggtaaatactatattaaactacacgttttgaaaaattattgatcagttgtattgttttataaatgacaatttaaattctatattatgcaaaaggaacataatggtaccctatgctcggttttggtcgaactatttttttttttattcataacttcataacttcatattcctattccctaactcaatagctttaacaattgtagttcattttctatcatactcctaactcaattttattttttactaaaatcatattcaaagtatagtctaaattgtcagttaacaaaacagaaaattcatggtatttttaatagttggtctagaaagaaaattagtttgattgttggcatttattggggaatttagaaagctcctaataatgtgacatgtctagtatggaaagtagggaagagttgaggacttgtgacattgacggaagtaaacctaataacggaggaaggctcgtgaaatcgatattgtaccatctctagtagtgggagaacacagagatggaagtgaatcctatgtgaaaccaatgaaaatagtattaaggtaaatattggcatcgatttgtttgagggagaagggaaacaagaaatgtgttgtgtagctcgggaccaccatggaattattataaggttgtttactagatgcacaacaagaagggtgatgatagaactggccaaaatccttagtatcaaagaagctcttagttagataaagcaaaagagatagggccatgttaaactaaaatctgattgcttagttgctatctaagcaatttgtagccattaatacagtcagacttctagattaagagatgtctttatagattttattaaacattctacaaatgtatcgactcacaaatttactagagcctcacatttctattcatatagtttgttcattgggtgtgatgtactctcttgtttgtcgagagagtctaaaataatatttacccaaaaaaatatgtttcaaatacaaaaattgtaacagcatacatccattcaagcatcattacatggtaccttgatatttaacaagtaaatcaagttgattctaaacttttaacattcaataaccaaatcaaacccctcttaaacctttgggaaaacatatagtaatgattataacaaacatatatttacatacacatatattgagagcttgaaatttacatttacattgacaagaatgggataggaagattaatttttaacaattcttatgaaaaaaaattcatctgttcaattcaaaatgtaatttttatactcaagaaatgataaatgaactaattttcttttcttcttattcgactatgctataacgaaatagttagtcactcattcacgcatccaaccacttaagttagattcaaaaacgcgatctataaagtcaaaactttgtacaaaatcctcaatcagaaaaaacactttcatcaattgtttattctgatcatgctgcaaccacccgatgatcacgtggcaattttctttcataaacctcaaatttcgaagacgaaaacgagcttgatggataggaaacaaaacataaatttgaaagaaagaaagaaaaaaaatgttagtagtgattagtgatgactgtccatgagatctgcaagagttatctttccgcagttcccggtatcgagcatatcaaacttgttgcagatcaacaagatatctttctctgatatcttccccatttccttcagtttgtatatgacaaattctgatttactgcaatacaaaacaaaccaacatatgataaggcaaaatggaaatttttatagcgtgattagattcatatggtagaaattttcaagaacttgctgagttcatataaagataaatacataagcattttcgcaaggactctttcgggaagagcaggaaaagtgtcttttttagcttttactagatcgttcactcgtttattctcaatctatagaattacttaggcttttcgaagaaaagaaaaccaatctactatggttttctatcctggacttaatgcaaaccgaattaagaatttccctataaaagtgcttaacggtaactaaatatcgattacaggtaaatattctttcctaacacttcaaagatagcattgtgcataactaatcactttcttaagcatttcaactcgatacaagctaaccaatatgaatcgcatgcactcacgcatatgtttataacgtttattcctcttatgtagatcgaaatcaacattttaaatataataatatgttaatctgttctaacaacattacagaaacagcagaaaaatctccttcctaactacaaatgttttaaacaaaatcacaagtttttcaacatcaacatcttttgtcaaactattcgacgtcttaagataaccttttataaacaatttattcaagataatatttagaaattgaaatttttggtcaaaaccttaaagggtatgtttagttggggtaattgaatggaaaagaaatcgattttcattccattcctttgtaaagtcattctttctaatccaaagaggaaaggtcattccaatgttattccattctattcttattacctttcctaaggcaccttgaagatctaatatacaaacatgaaaaattattatgaacaaactaagcaccttactcaaaccgagtgctttagtcgttagtcgtttcttaaagaaaaaaaaaacaaactagactctctgcctaaccctacaatatttggttaccaaaaatctatgctatagcaattactatatagatacctagaaggactcgaacctcaaccagaaaactataacttatttaaaagtaaattatcgctctgtttggcttaacttctataagttttttttagcttttaaaattaaaaaagttttttcatgggtgtttggataaaaaatgaaaagtcaatttttaattttaaagtcctaacttcttgcaaaaagacttttgaaagttatttttaaaattaaaataatttacatattttctaatttactcataaaaattctttttcttaatgatatccacacattgaaaagtactttttattaaaaaaaatatctgcatataatagttatctagtaaaaataacacaaagtttatacttattttatatttctaactataaacaaaagtagaaacttagccaaacagaaccttagcactgagaatttacatttggttgtcaactgcataatgaagtcaaacaagaaaccaaatgtcctagtaaatttgaatatttcattttcatttcactccttttttttgttaatatttaacattgactttcccaacaattttggaagggaaatgaatagtattctcacacacaatttcatttcttgatgtcttaaaaatcatgatactttttccctatgaaacttctttgttaaagaactaagatagtgataactaacatctcaagtcaagcctaaacaacaaaaataagtactatataataccaaaagaaaaattttcaaacaagtttaccaaattatcaaacatttgagagtctatagaaacatccaaacacatacctaacaaaaccattgttgtcaatatcagcagcaagaaactcagagatagtcatgtcttgaccaagaatccactttgccatcctcctatgtcttttatccactcttgcttcagccaaataaagaaaagctctagcaacggcgagcgtcgagacaagcaaccaaaccgaggcgaaaattcgaccagtcattgagttgaatgccctatctccatacccaacagtagtaactgacataactgaaagataaaaagaatccaaccacccaagtttctccacaaaatgcataacaccaactcctaaaccaatacaaagaacaacaacacctaatgctaaagcaactttcattctaatcctcattctccctttcttgaaatcaattatatatgatctagcattctcttttttcttctcaccaacacctttaacacccttaacacttttaagtaaataaccctcttgtaaatcaagaacataactaaccatcccactaagcaaaatatcaacaaaaccaaaaccaaccaacacaaaagaacagaaaaaagcttagttgcagtactattaggagtgatatcaccataaccaattgtacacattgttacaatacaaaagtacaaagcatccacaacagggtgagtttctttagccacaaatttttccttattcaaagagtaaatcaaaaccccaaaagataaatacactaatagaagaatgaaaccttgtcttacaatagatggggtaccaaattgaggcttggaaactacagggtggtgattgttgtcatttatgacagccatagctggtgctgttcttgatctatgaagattggttttgttccaagatgggtaatttgggtctataagccaagaagatgaaggtgggctagttgggtcaagagagagagttgtggaagaagaagaaggagaggtttttgatgagtttaaggaaaggtttaaagcatcaagtattggggatgattcttgtggagaagaaggtggaccaaagattaaacggtctttaagctcagaaggggttaatgggagatggatttcattgttttcagggagagtacataaatgggtcaacggcggcggcggtggtggtggtggccacctcctcacataaggcaacaatggctctttctccatctgggtatgccggaaaaatcaaaaagtaaggatttttactaacaccccttttcttcaatggtcaatgtgattatcagaatttgaaagaaatggcttaaagattgaatctttatcggttttcaaccgactagccgagaggtctgagaaagaaagagagagtgattgaatcaaatgtgttgattgattagtgttatgattgaatcgaatgtggactaaaatcatggtaaaggagaaaactttggtttatttttgggtttggagaatcagatgattgtatggttcttatatgttcgtgaaaatttagattcggctgttctttaggagtatcctagatcacgcgcatttgaagcgcgtggggttttgaatttgattatacaataggtaattaataccttatccaaaccttccatgttgggtttagttttagtccttactattattttgtgtttgttttagtcccttactattaaataatataggattgtagttttgcgggttgtttcggtagattttttatctgtttttagtatttgagagagttttttagtgtaatttgtttcacatattgtagctatttagaatcatttgtaaatttttaaataattctgattctgaatagcttactgtaccgaaaataaagttcagataattatttactacaaagtataaaaaaaaaaaaaaatacacgcgtgcaacaaaatattattattattattattgacatacattccttcttatttttaactcgggaagggaacgaaatcaatgtcatcttcaaaaatagaatttttcatttaattttggtatggtggataaagtaatatataaatatatattaagtaatatataaatatatatttaatgagataaaataataacaaagatatatcattaaaatattgtttttaagacaaacttaatccaaaaaaaatcatttaaacttttaaataaataaaaaaatcaagtggattctttctttcacaactgctattaaattttgagaatgagtgatatgcttaaatatcaagtatatatagctcaatttaatgtaggacaatgactagaaaaatcaaaatatcctcataatttttcattttgacacttagagtttatttatttgtttattgaattgagtatattttactagccaatataattgaattttgagagatagggttggaatttagtatcttcaaccataattagtagatagatatatttcatactaataatgcaaatttgtgacatcatgtaatgctaattgacaaaatgtatttttaattgatagtgattgacataggattggagtatttacctcatttttagtctctttaatattttatcatttgttaacttagtttataatttgttaaggtattttttgtgtagttttaatagagtggttataaatatatttttgggtgattgtatagagagtcatagacatagtataattattttttaaagtaatttatgacataaatatttaaatttaattttcgattatagataaactcttaaatttaatttttgacggtaataatacataaattatatttctagaacttccataagtacttgaccgttaagtgtcaagttattattgacatgttattttttattggtatatttaaattaattttaaataaaaataaaaatataataacatggaccaatcaagga

SEQ ID NO: 224821 - DNA, 4606 bp, Cannabis indica
attatattttaaaacaaataatataaaaaatgatgattaatattacgtacctggatagtgattattaattaatggagtactggaagtagtgtggaaagtagatgatgatgatgatgagttcatgagttgatgatgattattcatatcattgaaaacagttgtatgcagtttagtaatctcattaccatccctgcaacccatctgatatgatatatatcagagatttaattataaatattgtgtttcagtagtactgggcgcagaagctagctagctaagtcgagacagagaaaagaatattttgggggccggaaagaagaagatcaaggttgtggaatacaagacggacaggacagagaggaacaaagtgataagagagagaaagttgttgcggtttctaattgtgtaccttcaggtttcaaatttgatgcaaaaggtgccatatatatttatacatgtgtgtgtatatatatactgtatagtgtatatataggcctcgaacgttgaccaggcacgcgtggactacgagatgagactatatgtatagttcagggtgcaaactagtataagattgatcgtgtaaaaagttctatgtatttataagccaaaggccaagctacctatatatcatattgttgttaatacttaattgtattattgttcatcctattaatattgttactttttgacagttagctacattttttttttaaaaaaaatgtaatgaaaatagcatatataaatatggagggatcaaattccagtctagcgaaatgcaaataaatctgtcaagttttaaaatatactatttttgtttacatgcccatttatctaaggttgaccatggaggcttaaatatatattcaaaagaaaaatatttccttttaagaaatgtacattttttatttttttacaagaaatgatatttctattaatcaaccagttacaaacaagaggagaacacttcaacaactcaactacatctccttacattttaaagaataattctatcaagactagacaatttattttcctgtacaagctttaatcgaacttttagattatttttaatgcaactatctatacaactcgatgtcaaatactttttcacaaatatacacaaattttaatttaaccaaatgatatatatggcacctcctaacacatcatacaaaatgtcaataatcagcccttctcgggctctttaaacacagccagcatagcagttcctcaaagaagctaggctaaagttgacttccaagccaactcttgatatgttgtaacactctcaaagagtaaggacaataaaaaaaaaaaagataggcatgggcctcaatgtcccactcacactcttgtaacctgtgctaatctgatgtgcttctttacaagcttatctcttgtaaggaggttattgtgtaatacttgccacatgataaatttatgtttcagggccaaaagcttacaccaagtttcttgcaaaaattcataccgagatccatttatgagcttgtcatagacttgcctaattaaaatattaccattacttccagcttgtatgatatcttccagacaaaatgcttctctatgtctcaagagcttcctccagtaccaaccaacatcagacttatttagctcatgagaccaattgttttgaagtaattgcccaaaagtacttaggcaaggaagccttgttccattaagggccctctctaaacccctccaagctgtcctggcttacaaactagctcccaagaaaccatatgcaacttgcttgcataccctttctcacctaaagaaaattcctacaaattcgatctatctcaactttttgaggttattaaaaaaatgctcatcaaataagttcttattccaatgaggacaaagttaatgagaagagctttacctgcaaaagataagtatctgcgtacccaagtgtataagtgtctgcttgctcaagtatgcaatctcaactcatgtttctttagaatgatctcacagtcctcctgcttctattttggtggtctaaggagaagaccaagatatttcatgagaaaagtacttatcttaaaagatattagctattgaatttcttgttttgtagactcattcacaccaaaaaataagatgattgatttctcattattcgccttcagactagagcaaccatttaaatgagcaaaagcttcaataatgtatttaacataatcaatgttccctttgtagaacaaaatcaacttatctacaaagcagaggctaatgagctgtaaacttctacacataggatgatatgaaaaaactttatctcttgcctcccacatgagtgactgagatagatatgccataactagaacaaaaattagagaagagatagggtccccttgccttggacctttagctcctttgaaatatatttgaactttctcattcagcacaagcaagtaattgaacttacgaacacaaatcattatccagttcatagtttgtctcgaaaacaacaagtttttagtaattttttcaagaagtcccaatcaattgtgtcataagccttgcttaaataaattttcatcaaacattaatgagtgatagttttcctttgatagcccttaaacaaatcttataatattagaatattgtgagcaagggatcgagttttaatgaatgcaccttgatgatcactcaccagccccagaagtacatcaaacagtctcgtgcaaaccatcttagagatgcatttgtacaaggttttgctgcaagctatcggttggtaatccacaaccttggatggattctccaccttcagaatgcacataagaaaggtttcatttaattgcctcggagtcaaaccatattgaaaatttttagaatagaaaagtcagtttcttggcccaattccttccacgtgctcttgaaaaatcttgatccatacccgtttgaacctagaatttttatgtaaggaataaagaacataacttttttaacatcttgaatagtaaagggtcgaatcaatctcacttgctgttccaaagataaccgagagcccttatctatgcaatggcgatggatagtgtctgaagcaatgcttggttttcccatgaagcttttaaaacgagaaagaaaataatggaccatctttggataatcatatactacctgaccttgcttatcaaggaaagagacattccgattagacatttttttgttgatacaagcatggaagtaagctaaatttttatctccaaaatttagccaatctattttactttttttctcaaaagaatttcaaaaaacctattgcaatcaaccatcttttcccaagcatggtttaattcctaatgtaacaacaaaaaatgaggatcatgttgaagattattgtgagcttgattgtagtaatctcgagccatctcataataaactttgacatccctaacatgatctaaattgaattttctctgcaccccttgaagtctttttaatttaaaatacggagtagctagattacttccctagcttatttcctccaattggagagaacaacatccttaaattcactatgtaagctccacatattgaaaaacttgaaaggtaggtaaccccaattctccaatttcaaatgattaatcaatccacaataataattaaattcatcttctcactaaaaatgagcctcaatatttggatgaagatctaactattcttatttttaaaaacccaatcaataatcttcgagtaaattctcaccccattgttttgattattagtccaggtataatgagtgtcacttttcttcatttcatctaccagacccaaagtaagtcatttattttcctcccaaaagtttccaaagctaacagatttccctccaaaaatatccccatagctaactactgagttgaagtcctcacaaaggatcgaaagtttaactggcatggatagaccatctagcctttgccaaagaaactctctctgtctgcatattacttccatagactattattaggcaaaaagaatcaattaaccctgtcattctaactttactatgaacaaactgagagttctcttccaaaatttccaaaaacaaatttattaagccaaaaaatcaaaattctgcttcctattattgagcttatgtagtaattctatcatcaaaaagacgagctcattatttcttctacattatctcctcttacttttgtttccaaaattgcatcaattcccaccttatttttatttattaactcccaaaccttttcttgctttttttttttccgattaaagcccctaatgttctagcttggaatgttgaaattctccatggttattgcgagtcataattccttcttacaacacactgaacttattgttgtattgcttagccaacaatttttggattttgccacattttctttttagaattttcttttgttttttttgttttcctcttttataccatcttcctgttgcgtattttcagctactggtatggtattatctacctgttgaggagcaggagtaacttccttctcttccaagactagcattgaagaactttccctttcctcaacaacttttggagctacaattgtatgcttgtcaaatacttgagtag

SEQ ID NO: 224822 - DNA, 3101 bp, Cannabis indica
attatacatatagtcacatataatatatatataaattatcaattatttattattaaaacggtcaagtccggtttaaccattaactatttattatgaatcgtaaccgaattattgcgctgtaaacggtccgaattaaccagaacatcaaaaatgtttacggtttacagtgatttagattgtcgcgatctgaatttaaaataaccttaacaatgtgggactaactctaataagctgtgttaatcacgtaaaatagagaaaataatagtcaaatgacagcatatataaatatatatatatatatatataataggtgtcggtgtgtgttgtagttcagtttcagttatcattactcaaatgataatgatcatatacacagcactactggctcttctccttcttttttctcctcttattcctctacaatagaaaaacttccaaccatggccggctgcccccaggcccaccagggtggccactattcggaaacttattcgacctcggaacaatgccacacagatccctaaccaagctaagaaacaagtacggcgacgtcatattgctaaaactaggcgccataaacaccatggtaatcctctcatcaaaagcagcaaccgagttcttcaagaacaacgacatgtcgtttgttgagcgaaccatcaccgaaacaagccgagccctcggctacaacaagggctccttggctttagccccttacggtgcttactggcgtgtcttgagaaaattagtgactctagacatgttagtcctaaaacgaatcaacgaaacggttgtcgttcgaagaaagtgtgtggacaacatgttgtgttggatcgaacaagaatcgagtaataatagcagtaaaggtgttcatgtggctcgttttgtgttccttatgtcgtttaatcttttggggaatcttatgctgtcaagggacttgttggatcccaattcggtggagggtgctgagtttttctcggccatgatggggattatggagtggggtggccacggcaatatagctgattttttcccttggttgaggtggttggatcctcaagggcttaagaaaaagatggagagggatcttggtaaggctatgaagattgcttctaaatttgttaatgaacgaaggagtgaacaagaaaaggttaaagagaggagggatttcttggatgtcttacttgactttgaaggtaatggaaaagatgagcctcacacaatttctgaccgtgatcttaacattttcatacttgtaagtactatacttctcaatcctttttcattaattaccagttatttttttcttaataattatgttatttttattattatatatataaaaaaattttatttttctatttaaaatataaatgtgcactttctaccaatgataattaacgaaagcaaaacgttttgcgagtatttttgtaaaaaaaaataaattaaacagtaaaaataaaaatttatcagtgttaacatatttttacaatttttgtttaaatatattatcgtaataattttaaaaaaattaatgtatatacatgagtaaagagtatatacataatagaagggttattgatgtagtgtattaaataagacaaacgttaatagttggatcaaatttaagttaatttctaccaaatttattagagcacgatattgagctaaatatatttttgacacaaattttacaacattcatcatcagaaattgttggtgtaaagtattatattaattagattgcacatatccatacaaaatttaaaaaataattattaaattaaaatgtaatatcgagcacattttttttttagatattatacatttctaaaatataagtaatatttttagttcagttttttttaaaaaaaagtaacatttttaagtctgcagtatcatgacaaagtataggattgatattgtcaagtgaaatgcttggatattaacaaaaaggaaacaatttggtcttgtaggaaatatttatggctggttcagaaacgacaagtagcacaatcgagtgggccctgactgaattactattgaacccacaagccatggctaaggccaaagtcgagctcaatcaagtgattgggccaaataggaaggttgaagagagcgacattgaaaaccttccatacatccaagcaatcatcaaagaaacacttcgaatgcatccaccaatcccatttctggtcccacgaagagcagtaaacgacaccgttttcatgggccactttgtacccaaaaatacacaggtcttcgtcaacgcttgggcaattggaagagacccagatgtgtggaatgacccttcggttttcaagccagagagattcttggactctaaaattgactacagaggacaacactatgagctgatcccatttggagctggacggcgtatgtgtgccggggtcccactggctcatcgaatccttcacttggttttgggatcattgctacaccattttgagtggagacttgatgagagtaatggtgttactggtgaatctatagatatgaatgacaggttaggaattacaactcgaaagtttgagccattgatagcaataccaaccaagtcttgctcatgatggtgatcattaatatcaataaataaaaaaattttaatccaactatagtcacagctagctacattattgataaagtaatataagtattactttgaatatttatgtcagtcttttctttaatgatcttgttgaggcttagatctcatcgcgaaccaacataacaaattcagcaaaacaatattgtaatgatagtacctaaattaataatgaacaaagaattgaaaaatatattaatggacaaagttaaagagaacaggatacacagattagatcacaattcaagggactacctaaattacaattcaactcagctcacatgacagaagttactttagaaataaacaatctctttaacatccctccaagaactcactctaggaatcataaactaaggtggcgtttggttggaggtaatgaaatggaatggaatggaaaggaaacaattttcattccattcctttgtttggtaaagtattggaatgacattccaatggaatgctctttccacca

SEQ ID NO: 224823 - DNA, 3733 bp, Cannabis indica
catgaatttatggattgtgccatatccttcaagtttgaggatatataagatatatctctaaaatttgtttaactcacgcctcttggttggtgtatgcgagccatctacttaatggaagccgatcgtgtgtctccgcatgctctgcttgaatgtcctaacttctgtttatgacttcaagtattaaatctccctgcatggctcattaaaggtgggattacccatccagattatacaatttattctacgtgttacccaaataaatgttacattatcttgcctagaaatttaaataacataaataaataaatataataattattctctattattctttccctaaacataattttaatattatatacatataatattttgttttcttaagaatactttaataatatataaataatattttatttatattttaataataggatagtatatataataaaaagtatattatttaaataatatagaggtaaaaaataaaaaaagttagatatatattttaatgtaaaaaattgaggtaaagttttcatattgtattttgaaggattttaagagcattgttattaatattggtgcctaggtgatgttttacgattagctaataatattctttgataattaattacaataataatataatatggactaaattgctaagtagggcctttagcaattctcagggtgatgggagtgctcacatgtgaagagtgagaaaatcagtactgtgaccaagaaaataataataaaaaaagaaaaagtaaaaagaaataatcaaatgatagctgctattctagtgacctttccaaagtgtctttcctagtcaatttctttcacgactctttagtcttaaatcttagtctttatacttctttctcagtttcttcttcctcagctactacagtgccactatcacagagtaatcgttcatggcatcttcaccatcatccttgaaagctcaaaattctaacaaaagtacacacagtgaagcttcttcatcaccacctcctatttcttcacaagatcattttcaagatgatgactctggttttcaaacagctccttcttctcccatgccagaaccagctgtgcctcctcccaattcctctacttttccggcagatgtttcaccccaaagcggaacttcaactcaaatctctcctcctcctccgacccagactatcaaaccctcttcctctcttcctgccctactacatggtaccactactaatactattactatacatctcttttctttttacacatctctgaagaaaaatatttctcattttgtgcttttgtaaattacagagagagatgctctcccaagccaccatttgctcaaaattaagtccttttcaacacttttgaaatctcccatagaaaaattcagtaatgattttaaagctgggggctacgaatggtttgttcatttaaatttgtaaactaagctggtaaaaagatcattattaattaatatatgctaaaatttattttaatgtttaggaactttactatataccctaatggggacaagaacaaagatggagaaaactatatatctgtctacttggaaatagtggaaacaagtaatcttcctgctggttgggaagtcaatgctatctttaatttctttatatttgatcatattcgcgataaatatgttggtctccaaggtatagcttcctaacagcttcatcatcatacattattgaatgcttttacttgaccaaattttataactgaacctttttgttcttaaccattgtgagagatgcagatacgacagtaaagcgtcaagtttattgatcttgaaacatttaacaatccatgcaatggttaccttgttaatgacacatgtggttttggtgttgaggtttttgtggttaaaactacatcgaaagcgcagtgttttagtttgataaacaagcctgtgacttatcaggtcggttgggtttttagtaatgtgataaaaacaacagtcgaacgttatataactgagtactctgtttttggagattacaaatggtatgtgtacttacaaatgatcatagaagagtattaattggatgaccatacacatgtgatgatttgagttgtttttgcttttcttctctcttaggaggctgctgttttttcctaaaggataccaagtagaaggcaataagatcaacaatatcatatcaatatttcttgatgtggataattcaactctttctgctggctctaagctacttgtgcatttcactattcgattggaagacaaaaagaaaaatagcaaccattttgaacgaagcggtgagatatcataatcttaattccatgttttcccaccatttctagtgtactaaagatatatatctttcacttttcagataccactgcacttggttccggtgctcggggatttcgtaattttatgtcagaaactaagttcaaagacccagaaaatggatttgtggtggatgacaaatgccatataagtgtagaatttgaagtacttggtgtagtcaaataatcaatgtagcttgtcggttttacatttttcttttggatgtaacgttatgcataacttttcaatataagtacccgtttgttgtttggattcaaatgtaaaatagaatatatatttgttagagtcacacatcatggaaagataatagtatgatctattcactatttctcttattattaattagtttaaaatggaattctataagtcaaaaacaaactctaaccatatagtcaccttcaacctaaattctaacttgctataacattactaatatgtgaaaatataataacttatataaaatttatggttttaagatgaaactccaattgattttgagataaaattttatgagccaaagacaaagactaacgatgcaatcacgttcaatcaaatttttaacatattagaaatgagtctctcttattatggaattacgtaatataagtgcgcctcacacagttgttataataattgaaagataaaatttaattttacatatacatttttagtataaaatttcatatttcagttaatatttttattaaataaataacatataaattatgatcacatttgtaattttgcaattattttttaataacgattgaataacttttaattcctattctatcaccttgatttttcttattgtttcttttaattattattatcaattactataaagaaattagttactattctataatctaaataatttcatttagaatatattctatcattatttatattttattgtggtaaatgatattttttgtaagtatatcccacttcacataaaagagaatgaataaaaagaacattgaaaagaaagaaaaaatagaatcttaaaataattaccttatgtatttttagacttacaaatatatgtatctatacaaatatatatcttaaaacatatttacttaattacttttttctctctaaaaatacacatatatatatatctgtattttttttttttattttagttcttacaaataaagtttgaaaaattatgtataatttttcaaatattaatatatatttttttaaatttctcagtataatttttatacataaaataataaaaataaaatagttttttacttactaattattcaactctttatttatgatcttgatatatacatataatatagactagattgaagttacgtgcaatgcacgtatacttgtttttattaagtaatt

SEQ ID NO: 224824 - DNA, 3415 bp, Cannabis indica
gggtggcccttaacatttctctatatatatgttaattgtgatgcatatcacatagctagatatattatatacatatataaatcaagacatgcatatagtacataatttttattcagtgtacaaaataaactatgccttaataatgatttgttgataattgatataacatttatatggtggatcggccgcgctgcttataactacataatattaataaatataataaaaagacgaattatgcattcatttattgaatttaggaagagagttcatttttacatattataaacgttgacctcctggaaaagttatgagagagcctagagacataaactaatgattaataatgaactttttttttacaataataaataatgaacacttaatatcacacgttttcttaaaaattgtgtgtcgtgtgcatggcctttcaaaaaataaaaataaaagctttatatagaatattgcagagacaattatgtataattttaagtggccgtggatcaaaaatatatatattttttttttaaaaaaaaaacttaattaattaagaattgacaatgcatattgggcgtaattgacccgtatactcaccaataaattttaaaatttcgaccttggaagactacaaatgaatatttggaagaaagaaattaaggggagcaagttgcaatttgtagtttgatatgacaggtttgagatcgattgaagtgattaattctttgtgttttggggggctttaattctagcgctggattttgggtaattaatttccgatccaaataagctggcatggtcatgcattctatttatgaatcatgataactatgcatatgtccatctcgatgattgggtttgacaaattgagtttaaaatctcacacaccaacgtctcttggcatgtcaaatttataatttaggggtacgtacatacagtatttcatgctcttctatatatatatttatttatttcttcgagtctacataaaggaaacacattgaccaaacttcatgcctaagcaatcaaaaccatgcaggcttctaaaagcatgtgctcaattgctggctttcataattctctgaatagcattattggacatatatgcctaaacatattcagaaattaaaatagataaataacaccaataacaaatattatatgactgaaagtgcaatgtattctctatatatgttaacgacgttatattatattagttgacaagaatatacgattttagtttcaatatagctcttaaataatgttgcatatatataattttagcttgtagctagaagtgttcgcagactcacgaccatttttaagagaaattttgagttaatttgttaagtgggaaagaattgaccccaatgaattctgcacaagttatgaaatgataaaagagtgcctatatatgtaccaaccatatacatattggattctttatttttatttttatttttcaaaattttgagagacatggggggttggaatataatctaagcaaaagcacatgagtggtccggggccagcgcccagggctatagtttcggatatttgactttatgacttggcatgtgacaagttctagattacatgttaaagattttcacaagctatatgaatgaaccaagaatttatacatctaattggtggaatataagggaatgtttcttttgtacaagatttagaaaagaataagaaagcttttacaaaagaaaaaaaaaaaaagtttctagctgtacatgatgtgatcgataagagtgaaataatgaatatatgtagagtgatttgcttaaatcctttcggaacaacaatatgctttttgggcttgtattatgggctacatttactaatctcgctggttgaagaagcccaacaaacagattactttgtcagcccacgtctcaaaatctgctgtgggttgtgagcccatgcccatgccttgttgcattgcttgaagtttatatattttcactttcctcaaacaaaccatagtaagctgttttgtttgcatttcgaaatattagaaatgttcttgatactcttgaaatgcatgaaaaaagaagtaccatcattttcttgagatgaaagttgatgaatgattgattttttccaaaaacatcgatcctcactttatttatttaagttttttcatgtctgcattggtaatttgggattctcaatgcttacaataggaacttgtgctcttggaaaatcacaattacattgacagttcagtctcaaccatctatgaatactacaatggttaagattaagggattgaacactccaccaaaatgagccgcttgctgcatcaaggggaggctctacaaaattgggcatgagcaaatacccattcaaagtctttattgtcctatttttgcaatccaaaaaatctattaattgtttgagaaacacttttaactcctaacttataagttcaaaaacccaaaaagggtttttaacactcttctctctcttataaactattgttttttatagatgttcaaccaaaacatcaactatcaattgttcaaacagacctgcctcaatttccaaagccaactcctcttgctcaacctcaaacttgctccattttccatctttatgcatctccctgatatatacctccttattgtagtctagcccccacccaagtacccccttttgttccctactcaaccaagatttggccaaattcaccatctccaaattgtattcatcatcactctcttttgcctttatttcatctctaaaaaagtcaagtaatacttggtcttcttcactcaaacatttatgtgatgaactcattgtctccttgacataaacaaccaactctcttgccatttcttctaccaataattcatactcttcttcttcatcatcttcgccattgttgtgttcttcttcgtagagattatcaaattggttgatattctgaacaagtgtttgtcttctccctattgaaacataatattatgaaattaattagtattaaacaaattaagatcttcatcatgatgcttgtaactattctgttgtgaaaataaaaaggagaataaaatagagaacatactctccacattggcaagactttgatcaaaggtattggaaaagtgttcctcatttcctctcaactcaaaatcaaaaactgaaactggactgtgctgttcatcatcttcttcgtagaagagcatctctctatcctggtattttaaaaatcatcatcagtcacaataattagcaaaaatgaaaaatccttaaataataatgactcagcaagtaaaatcttcttcttaattaaaatgctaaacaaagttaatttgttgtttaaccaatgtgttatctctcttcttttttttttttctctctccatatgatataatttaacattacataagtatacattcttata

SEQ ID NO: 224825 - DNA, 5793 bp, Cannabis indica
tttttaaatgtatatttaattaaatattattataatatttaatattattataatatggataaagttttaatggtgcttagatgctagatcatgagaaccaaactttaaaactttttaccaatatgcgaaagtgagtggtccggaatccaatctcaacaatgaagatatatttggctttgctagtttagatggaacagtacagtgattctttgggaccaacaacacgtttcggcgtgtaaaggcttatgttaaagaacgataaatcagaactgatgttttgtcatgttggtcatacaaacatgttaatctttagtgtggtagggagaggagaggaccatgctcttcaggtccggaaaatcgctcaatctgctttaaacgtgaaaaccaagatatatagagataatctcacttaatctaacttgcaaagcatcttcaaacgcaacaattggtctttgctgtaatctttacaaatcatggtgttgtaataccagctcctctttagcgcaaatgtgtgcttaaagagtacaaactataataagaagatttacttaggaataccctgactttttatttttgatacttcactttcttagctttatgtttgtattgtgtggtaatagtgactagtgagtatgaaattaccacaagtaacggacgcattagagctccaaaaacttaaagatccgagtccgaaatgaaatcatgttgtatttaacaagttcatctttcatgagataaatatcttttggacgctaccactccatccatctttgttgtccgcctaataggccatgctagaggtctcaattgtactcatcagtcaagatagcaatggcaattcatcaattcctcctcagtcttacaatgtcactgagacgaattgtttggctaattcttccattagaaggaaaaaaatggtaaagcagaagcaaaaaatattctaaattctagtcccttcacaaaatcacaaatacgaatctcattacgggagtttgtgactcaccttgttcacacagctcatagaatgaaacatgaaagacatcccaacttcctatgttctgtgatgcaaacaagagtttaatggcttagaaattcaagtataactaaggaaagggaaagaaaaaaagaagaaaaatatcacatacatgtgaaacttaaaacgaagatcagcaatgtaataatatcaaaatcaaagcatggtagtttgtgtgtagttcaagagaatatgcaggttgagactcaaaaagctttgagctttgtgaataccataaactgggtcactgccaaggttccaaaaatattgactacacattctccactaagcttctagctctacaatacatgcatagcttgagttcataaacagaccgaacaaccaagtaacatacaaatccagtgaaacttcagcttggtatcagaaatcattttaggtcaaagtacccaaaaatgggtttaaaactagaacaaggggaaaaataaatacagagcaaaaaaatacaaaggacctgagcgaggaccggccgatgctgcagttcgccaactacttattagaatagaatatgtatctctaacagttaacacagcttcacgttgccttatcagccatttcaacttgcagttgctgcatgggcccctcctagtaaaacaatacaaaataatcagtctcaactattggcttacaagaaaaagcattgtcaaaggtatccattatcagcaagaaagattagcaaggagaacaaatagaagcacaaaaccacgagcaagcttctgcattgggagtcaattactgaaaggacccagcaatgcatttcgattaggtcaatatgttagaatctatcgaactgaagaaactatacatttggatatacattcctatgcgtgaaagataatagcaaactaacaaacaatataagactcatatcggataagcccaagcctctgataaagttcacttgaactatgatagacatgtaattatactgtgtccttctagatatgacaatctgaaaagaagcatttttacattgctggaccaataacatcaaaattaaataatttgcaataagagtgcctgtattttttcctgcttagattgtagtccagaccataattaaagattcaaccaaacaaagagaatcggcaataaacatcaaactagaagtgtaaatcgccaataatccaaataatttaatacagaaaaggccattcaaggttttacctttcctcttgtttgaggcagaagatttagcacgagctgatacactcacattgccaactccacaaccagaaaggtccatggaagctgagttctgatttgccaaacattggagactctcaaattcgcaagcatttataccttggtcattcaaggagtcatcgtcacatttgtcatccaccccaggatgaagacaatacacctgatcgttacattgtacattacaggggttcaccatgtaagaaccaggcatggttgggtttggaatggtgtgattcacagatttctgatacggaaaagatccaatttccccttcaattcttccacgaatatccacaagtaaacacttgagccttgcaacctcagcctccaaagcagcttgaccttgcaatcttttgaccaactgctgattaagagttctcaatcttacaacttcatcctccaaagatgctgctcttgccttcttcttctcacggtatttgcgcactgcttcccggtttcccaaagggcgttttttcgagttctttcctacagaatctgcagaatcatctgttgcagtgttgttgccttcagttgcagcaggcacaatttttgtatggacatgaaaacaagtgtgggtatgagagtaatcaggaccgggtgggttgcaagtgtgggtgtgagtacaagcatgagagtctttcagaagctcatcaaagaaactgtccatcgagcaactgctgggaagctcgccagccatatttggactagaaaacacttcttggttcgaaaagtcaacctcaccgtcgtccattgtgagaatcaaatttgagaaagaaaatataaataaagaattcaaaccaaacagcaatccaaactgaaacttctctctgcgcccaatttcgagtcctacccaacacaattcgaaggcactacacaacaaaagaatcaacaacgtgatacaattcctaagaatcaaccaaaccctagatactaatctatgaaaattgaaggtattctacgaaatcagtaagcacccaaatgaaatactacaaccccaaaatctaataagcaactaattccgccaaaaatcaaagtatttccaaccaagcaaaagggtaccaaaaaaaaaataagtaaatgcgattaaggttctgaaattacatagagaaaagggagaagaaacctggatttgatattcgaaaccaagaaataacaggtggaagaacaacacattcggttttggaaaaggttatgatgaaaaaaaaggatagagggtagtgaaaataccctaggtataggctaacatggcgatgattttgacagcataacacgagaaaaaaaaaaagcgtaccagacctaagacgactggctcagagtaagagattcgacaaaattttctctctctctagaaatatgagcaatcggttacagcttcaaatttatacgtattcgggggctaaactgtaatattaaaacgttcggggagttataccatgctaccggtctcatcctcataaaaatgtacggctccgtgtctgaattttgtagacagtaaattcttgcccaaaccgattcaccggcaccgcctccacctccacagaatccagggaataatgtgagggttggcaatgctaatcctcctgctgactgtcagcagatattccaagaaatgcgaggtatcatacttcgtcaaaaagaagagttgcgacgattaaggcaaccggcaccggctgcccctgttgaacaagtgttaccaccagcacctgtgccagtggtgggtaaccataatgtcgcatagagactcaatgtttgagcggtttgtgaagctgcaacctccgacttttctgggaggtattgacataataaagaccgagcagtggatgagcactgttacccgtatccttgacaatatgggggtgacgggaactgagagagtgaactgtgcagccttcatgttacaagactatgcctgcgtctggtgggacattgtgggtcagacccgggatgtcagtgtaatgacctgggaagaatttaaaaatttgtttgaagaaaagttttacaacattgttgtgaggacttcacattaggaagattttgtgaagttaacttaggggaagatatcggtggtcgagtacactctggagtttaatcggctgtccaagtttgctggtgatctggtgcccacagatttcaccaggaaacagaagtatatgcgagaactgaataccacaatcaatcaggacttaaaaattaccacttcacatgacactctgtacaagagagtggtagacctatccctaattgctgaggaggctgagcaacaagtaataaaggagtaggctcagagagtagagatgagaagattggaggtatttttcacctcaaagctgcttgaaagagagtatatatgtttttttggatctggcacgagaaagagaaaggcacacagagggtgcatattaaatttaagggattgaacatctcccacttctagctatctcaagtcaggatagctaaacacgagagacatctaaagatagctgtccaacacactttaatgattcctcttttgtttgatggcttatatatgtagcaatggataaaaaaatttagtgactcaaagtttattattttattctttaaaatatttaatatctttcgcttaattttaagttattcgatgaagccatcacatatacaatttattattattgtgctagtatatgtaaatattatatatggaaaatattttaatggttacaacaaatatgtaatcacgatagttacatttatttttagtcgttgaattattctgtaatatgatactaatctaattttatttatttccttataaataaaaaatattcacaaacattagttgcaaaaaatgtcttattaaatattttaattaaaaaattaattttttaaatatataattaatttgaatttaaaaataaattttttacctgttagtaatttattatagcaggtcaaaaaaatgtaactattataattatatttttaatataatttattatatataaatatatatatatgtaaattatctttgaaatattatgaattattaggcaacttagtaggcatcatgatagatgatgcatgttgaaagttctaaaatattgttagttggtacactaaagtcaaatgatcaaaattggtacatgtttaaattgttgattagtaatttgtttttttacatcaataatttgttatgttaaacatatggtttttatatcttattaactttttaattaaattaaaattaataaataaataaatatatgtcattattttacattttatatctcaattatataaggaagtgtatggttatattgttcttaataaaacaatcttagaccctgtttcatatacaaaacataaccctaacactttatttcgttcacttttaaattgcatgaatatatgttggccataaatgaacatataaggaaatggtgattctacatgaggaggacacaaaattactctgctatacgaaaaaaatggtgcgtgaaattttgtaaagaaacttgaatatcaagattgaaacactagcagtcgtctgagagtgg

SEQ ID NO: 224826 - DNA, 5370 bp, Cannabis indica
tatgtcttagttatgtgagtgtgtgagaataatttaagtacaatactcataaaaaaatgtatatttaaattaaattttatttaaaagtaattaattaatatataaaagaaaaaatattcttcaacttctcccatattttatcatgttatattaagtatttatagcaagcgttgccttttgtttcttttattctcatttcctattattggctaaaaataaaagtataattattctcttctcaatttgtttaagctttggatcacccttaattagtttattgaggaaaaacaattcaatgtctcctttgatatataataatggttttttaataagggaatatattatttatttggtatttgttgtttataaacaagtttgatactggtaatctttatattttgaaattaaatatatttaatattataaatttatttatagtcatatttatggtgggacagttagggcttgttcagaatccctcaactcaagaggccttctggtatttttttttttttttaagatttttttttaacattagtccataaaacctcaaaaaaaattacaagaaaaactacttgaaaagttaattgaattttatttatttttcaaataaaagacctatttttaaaattttaccccatgccccataaaaactaagatggccctaaatttattaataaaattatatgaatttgaccaaattattttgtatataattaaataattaaatttaaaactcatataattattgaagatagtttgattatgttaataaaattttattgatcaattcaaattttaaacataccaaaaaaaatattgtataaacattattgagaacacatatactaaatttgtattttaataaacacaggtatccaaataattatacacccttaaaatacatagaacaagtcaaacttaatcataattaattatgaaaactattatattagtgtgcaatttcatttagtatcccatagactaataccgcttatgctttaaaattatataaaggaaaataatatatattttatatgattgcatttgcaccctctttcaacaattggaataattaactcaaaacaaagcttgacattttgatatttttctcttcaaaaattggcatttgtcatgctgcatcttattatgcaaataatttttttttttattatttaaattgattgggaaaggggaactataataaatgttagcattgaagaatagttggatactaacactaaaggtatcaataatgtctagtattctcatatgtattaatattgttattggtctaattaagtatcgggtcccatataatttaatataataacttttacagagtatcactaatcaattgcaaggcaacatgttcagaggtgcccactggtgcctaataacaataatgctcgttagatatttagttatatttgaatgagcattgctattggacagtatctaataccttttataggtagcgcgctacgattgattagcgatattatttaaatattattttcttaaattatataagacccaatacttaattacatttatagtagtatgataccgatgagtctgttaggcaccaatagtgtcttttaacatttctctatttagatggtattttagtttgaaaaatactaaaaaccactggtgatgcttaacactagtataatattattattgatgtaatttaatattaagtcatatttattttaatttaataaaagttataaaaaatatcgagtcatatcattaatgatattaggcagtaagcacatgcccatgttcttttagttcagatataaaaagcctcataccatacatatttagttgcctagtaatatattagcctagctagacgacttggtaagcaaattataaaacaatacaatcaaattaagaaaaaaaatgaaaaaagaataaataaaaataaataaaaaattggtagtgcgatttgatgcttaaaatggtaaagttgaagatattatttatgattgatttcccgtaattaagtggcttctcattaaatatgatttgaatgtttagagaaatgtaaaagagtattattggtgtcaatactattaaaatttcaaatatcaccaatattattggtgttcagtatcgaacatcacctattataatttaataataaataaaaattaatgttttcttaacacaattttagagcattcccaccaacttttttactcgatcttttaaaatatatcacaaaatactattttttttaatttacaatactctttatattaacttctcttttatgtaaatatattttcttcgtattatttaaataatatattttttaatatatataatacatattaataaaagtaaaataaaatatatttaaaggaagaatagcacttcttaagtaaagaagcatttgaaaatttaggagtgttcattgaattcaatccgcactattttactcgttattaggatcaaaagtctaattattataaaatgagaatagagtatttatacaaggcttaagaactaggggttttgttacatccagctgagcttaacagagtaggaataacagaatcactaacctaaccataattaactttaagagaaaaaccaatctaatcataacaaactcttaatgagactctaatactccccctcaagatgaggtgtagagattgatgacattcatcttggacaaaagaaaattgaattgagatggaaagagtgatttggtcatgatgtctgtaatgttgtgctgagaagggacatggatgagcttgattcgatttttggtgacttggtctcaaactatatgacagtcaatatcgacatgctttgtgcgctcgtaaaaaatagcattcttggatatgtgaattgcagcttagttgtcacagtatagagtagcaaattagggatgtgagatgccaaagtcactgaggatgttggaaagccaaaggagttcacatcttgtgtttgtcatgtacctatatccagcttctacagatgacttggatacaatcgtttacttctttgacttccatgagatgagggatgtacctaggaagatgaacctgttatggatcgtcttgtgtctggacttgttccacaatcagcaccgagaaatgcttagaggtggaaagcacgatctgcaatagggtgtgaagagttgaagaagagtccttggctaggggtgccctttaagtattggaggattctagtggcaaccttaatgagaggttgtcttggatcactgagatagtgattgcatatgaaatgtcaggtcgagtgatggtcaaatataaaagtttgccaatgaggcttctgtatgaagttgggtctgaaacatgggcccaacatccttgttgagtaatatattggcttccattggagtggagacaactttgacttcaagtgagccagtttcagtgagtacttgaaggatgaattatttttagaaaatagatatatctagtttagaccgagcaatttctaatccaagaaaaaatcgcagaggtccaagatccttaagctgaaatttagagtttaagaatattttgaatacagaagcatccaaattattgttgcttgcaataactatgtcattgacatagactaggagtgcaagaaaagccttaggagaggacctgataaaaagtgaatggtcattaggagattgagtaaagtcatagttaagtagggtattgcttagtttggcaaaccattacctaaaagattgttttaaaccatagaggattttgtttaatttataaacaacatttgggggaagctccccctcgtgtacatagcctttagggattgacatgaggacttgttcatctaagttaccatgaaaaaaaaatattgttgatatccatatggtgtagtgaccagttatttatagcagctagtgcaatgaaaattttgagagtattaaactttgcaacatgtgaaaggtctcaagacaatcaatgtcatgttgttgagtgtacccttttacaaataagtgtgtcttgtatctgtcaactttacctttgaagttatatttaattttataaactcatttgttgccaatagcatggcaaccagaaggtaatgacacaacagtacaagtgttgttttgtttaagggcaaaaaactcattgtctgtagcttttagccattgaaacagttttgaggcttggttatatgaagttgtctctagttcaatatatgcttgtaaaattacatttcgaaaactagaatgtaatctgtcatgtttaagatatttgtctcggggatgtgcagtgaaagtgtggcacacaaagtcttttaagtgacttggtttagagatgtgtctacctgccttggtagtttgagaaatggattttttttagcaatagacactgatgttgaaggtgatggtggatccttggggatgacaactggtgtatgaggaggatctgcatttttatttgaagttgttgtaggcatgagaggaaagaaaactttttttaggataggtaagttagcagagccttataggaggaaaatgttttcttaaataataacatttctagaatggaaaatggtattactagcaaggtctattagcgtgtaagctttcataccattagagtaatcaatgaacatgaaaccatgtgctctaggagaaaatttatgtcttttactgactaaagatgatacataggcaaggcaaccaacagtccttaaatggtcatatgcaaattgtttgttatgttgaagttcaaaagatgttttgtgttttagctaggtgtgggagtcttgttgataaaagatacagcagtttgtaattaaaaaaaaaagacagtagactaatgcaagggtagattgaaaagccaatgcccaacctacatttaatttgtgttggagttttctctcaactacaaaattttgttgaggtgattcgacacatgagttgtaagtttgaatacccttttaagcatagaaggggtacatgtttaactctttagcattgtcaaacctaattgctttaatgttgatagaatattaggtatgcactaaactgtaaaattggggaatgaattattgaacatcaaatttggatttcaacatgtaaacctaagaaaatttactatgatcatccacaatggtgagaaaatattttgatatccttcaatatttgtgatgtgaaatggtccccaaatgccatatgaattaaatcaaaaggtgcattagcaaaattacgatttgagttaaatggcagcttcttttgtttagctaaatgacatgtatggcagggaggaattgaagcaggatctttgaaaagtaacattttattgataaaacttgtagtggacatagaagggtgtgtgtgacagtcagtagtcc

SEQ ID NO: 224827 - DNA, 6435 bp, Cannabis indica
ttcagcaaacacatgttgacaatattttttttttcatggcagtaatattgttgatgttacatcctatgatgaacttaaagtggcaatatctgagggcaaatgggcgaggggtccttggtccgccaggtaaatctaatcttaactcgtactatttatgtaaaatttgatgcctttcggacgatttattctggtctgtgcttttataaagcaagtttaatgatgaaataaaaacgtgcaagtgcaatgattttaatagggaaacctttgatcatatttgatacagtgacgcagatgagttgaaagtgaaagaagaaacaggtgcaactattaggtgtttccttttgatcaacctcaaggtggtgtccaaacatgcttgatgactggtagtcccgccgaggaggttgccatttttgcaaaatcttactaaagacgttgagtcaaggctttctttacacatcaaaaatgagtatctgtttctggctgccgttataaacagcctgccaacatccatgtaaactgtttttgttttattcttcacaacttaggctaaaacaaataagtgattttgggtagtttagataaatctaatttatttttgaatattaatttatgagcaactgtggatttttattttttttttcttttctttttgacatatccaaacagatttattttataggcacaattcattttttatttgttaagttaaaaaaaaaaaatcatattacaaaatattaattttttttttgaatagtttaaactatcattataaattaatagtcatttacaacaatagcataaaccagatgaggaatttgtcctatccaagacatgtcttgatccaacactaaagtatgttttgccaaactatgagcatcatggttagcattcctcatagtatgagaaataacagcttcagggaaaaaggataaaagacaatgaacatttgagattaaatcatagaaactagataaatccttcaatggagagtttaaagcattagcaacacgtaatgcatcagtttcaatatgtgtaatttgcacttgcatatgcattacccagttaaggctgtgaaaaagtgtttttgcttccatttcgtcagaacgaaaataaccttgtactggtttagaaagtgctgctataacatggccattgtgatctctaattatcgccccaatactaagtacctttgtggtggagtttaaggtaggatcaacgttaggtttcaaaccattgttgtgtggaggctgccatgaaatttgctgttttttgcacctgaatgttgttgttggttgttgagcagaagtggtattttttgcagcctgaccgtgactggtttttgtagcagccagttgaaacttttgaatgtattgcatagcctgtgagtaaatatgatcgccatcactctgttttccaccatggaagacctagtttcgttccttccaaaccgtccacaagatactaatgatatgttcaaaattagccttggtatatagtgtggagaggtggatgatgtagtccccattattcatatgctaagctttttggaaatcaatgttaaaagttatcttcttccaaacagattttgcttgtgaacaacagaatagtgcatgtccaatggattcccatgaactcgtacatatagaacaagcagttgagttaatgacttttcttctgtggagagcagcagttgttgaaagtgcattattcattgttttccaaacaaaaattttaattttggagggaagattaagactccaaaaagttttccaccaatttccatggttgttcgaagaggaagattgaagttgctcttctaaatttgctgccaaatgaaacctagatttcatagtatacacacctgtggttgtatgatgccgaatcaatctgtcatttgatggaaaaaagcttaatgggattgtaataattttgtctttgtctatttgtccaaaaaaactcatttagaagctccgaattccactctctttcctctgtgatgaagtgtgttactggaagtgtgggcggacctctatatgtcaatggcttgaactctgttaatcctgaaatccacttatccaaaccactttgtacattatagccattaccaatcttgaaacgtagtccttgaattaacaactctcaaccccaatgtatactttgccaagttaaggatggtgaatgacccaaacttgtttccaaaaatgagttatttgaaaaatatctacacttcaataattggctcaacaaagagtctggcatttcaaaaattctccaagcttgtttagcgaagagagcttgattataatgcacaaaagaacgaaattccatacctccgtcaaatttggatttacaaagtagcttccatcgtttccaatgaatttttgttccatctttatttgatccccacaagaagttggccatcatactttttaattgttgatagaagtttttgttaagtggaaacaactcatagcataagattgaattgactggacgaccacgttaagtaaaacctctttgcctccaacagagaacaacttttcgttccaagtatgcataagcttccaaatacgttcttttatgttgctaaataaatccttcttgtctcttcctgagtatgatggtagaccaagatatcgttcatgatactcacttatcggcatgttcaatatttggttgaaaaaatgtggtgccgcctcaggagtgtttggggagaaagacatgacaaatttctaattgtttagcatttttcccgaagcacagtgacaaagattcaaaactcttttgattgtgagagccgatgcgttggtagtttcacagaacaacaggctatcatcggcaaacaaaaggtgtgagacagatggagcatgcttagtaagtcgtaggccttgtagatttctagcagcttcttcatattgtaacatcctcgatagtccctcagagcaaattaagaaaagatatggggacaaaggatccccttgccttagtcctcttgttggtttaacatgaccaacaatttcaccatttagtgaaaacgagaaacttgttgacgatagacaatttcgtatgaaagcaatctagttactgtgaaaacccatcttactcataacagcccaaagatatgtccattcgactctatcaaatgccttactcatgtccaacttcaatgctgagaaacttttccttcctcttgttttatgttgtatgtggtggacaagttcaaaagcaactaatacattatctttgatgagcctattggatagaaatgcactttgtgtttcaaatattaccaaaggtagagcctctttaaaccttaagaccagcatctttgatatgagcttgtaaataacattgcataagcttattggacgaaaatcaccaataccttatggttttttaatcttagggattaaagtgatcacagcagtgttaatcaattccatactttggccatcgtttaaaattcccaagaccacatccgtgacaacattaccaacaacatgccaattgttttgataaaacatagctgacattccatcgctttccgaactcttatcaggactcatggtttgaagcgtagtgacaactttggcaatagtaaaaggaagaagaagagaggcattaatttcatgacttattgttgttggaattgttgcaataacctactccaaagcttcggcatcagatgctgaagcagtatataaatccgtaaaataagcagaaatagttgcagtgagtccttcctttgaggtgacttcattcccattgctgtcaaaaagtgaagaaattttattgtttgttcttcgtgaggaggcatgagcatgaaaaaacttagtgtttggatccccactttgtagcctatccacacgtgatcgctactgccaatacatctcctcttgtgcaagaaggtcatcaagaattctttttgagcattttagttcatttattactgttgctgtctggttagtctcattgttcagcaatgttacattcttctgtaccttggaaatttcctttttgaagttgccaaacttggatctatgccactgttgtaaagaggatgcacatgagtctaaattactcaaataaccttcaattgcacttcgggtttgatcattctttcaattattttgaatgacatcagctgcttcctcatgttgtagccatagctttataaatcgaaatcttctctgagttattgtttgctggttttggtcaccatgaggccgaacgtccctcgatattgctctatgattcgagttgtagtagtccaagtgatgtccagtgattgattggaaagtagaatcccaatgatcattaacaaaacaccaatctagtctttctttaagagcatctgttgtatgttttcctttaatccaagtgaaatgatttccatcatagctttgttcatttaaatggcagcaatcaaggacttgtctgaatttttccatctgcctttcacttcgtaaggttccacttgacttatcttggtttgataatatttcattaaaatcaccaaaaacaagccatggggaaagaggttccacatccttgagtctctctgcaagtgaccatgtatgcacacggttttgagttgagggtgcaccataaaaggcagtgaagtgtcatttgaatccatttgtaagagaaatataacaatcaaatatgtttgtattaaaattcaaaagagttacatctacatcatccttccatagcaacatcaaaccacctcccaaacctactctgggacttcaagtccatgactgaaatgtaaagcttgacgaaaatgagaaagtacattagagcctaacttagtttccattaaaaacagaacatgtggggattgctcttttacaagcaaacggagatgacgaaatgcgcttagattccccaaaccacatgcttccaactaacgattttcatggctgagggcggggctggaaaccagccaccgctgtattgttgaaagagccagaagaatccattggtgctgcagaaacttcatgacttggtccttcttcaactgtcaaggttggagtgaacccatatgtttgaataccccgacatcgtttaagtgtgtctctaagtgaactcccatctatttgtcttttataattgcgatttggggagttttttttcttttccgtgatgtccacattttattgatgtatccactgcagatgagtctttggcagtaagaattgccattgttaaatttgctgatggttgaagcattactgatgatggttgtggaggataggttgctatgatattggtccttgtgtttaaacctataatcagcatgtagactgtacaaaaatcagtaaagttgtcttgattctagtttgagagtggggcagctttagcatttggatggctagtaagcattggttgcttcaacacaatttttggtgttggtagtttcttcaacacttggggattataggatacaggtgtaacaagatcacttgatatgtcaatagtagtgtgtgtatgaggcttgtcattaggatctcgattgtggttggggtctacatttgaagattgctgaactaccatctagtttatgtaaaaactagcagttacttggtgttgctgaaagtccatcttgtttgaggaaaaaccagcagtggcttgttgttgttgcatattcatctggtttgagtatgatccagtgacttgttgttcctgtgaagattcaccatggaatagttgtcgtggatatggctgtgatcttttattcaagtttggaacaacaaaaataagagaagtgcgagccatcgagtaattcgttgccaagcgtgtccttttgaaaaattagctcggtatcgatcatagtttgaagttggcaacgcagatcctttcattgttggcctatactcgagatctagttcctctccattgtcaagcttttcaaaaaataccaaacatttattaaaaggatgtcctaaccgtccacattccatacaatatttcgacaatctttcatagcggaattctacccaaaacttatcacgaacttgttaaagagtgatcattcggcctctaagcaaacgcttggtgacatcaattttgacacgaatgcgaagaaaagggccccatccttcattgagagagtcatcaaaaacttctataaactcacctattatattcccaagagcctcagccagttgttttgttttactcataaaaggcaacatgtatacttggacccaaaaggtagagaaaataagtttctttggtgtgacgttctcacaaactgaaggcatgtacaacactgtgatgattttggaagtgaaatggttcacgatgtagaacacgttgcttatctgttggaatatattttaccaggatctagatttactaccatgtatgtaacaccctaactgacttaggcgtattacgtgatttttaacgtactgtgcagctcgttgc

SEQ ID NO: 224828 - DNA, 16082 bp, Cannabis indica
ttagcatttctctttatataattcgcaatccgcagttccaaactccaaccaattcagactaaatcatttgagaccggaccaaataattttggtgtaaatgatttgatcaatccagaccgttttaaattctcttgttcgatcatgattttagaaatctccgtaacagttcaaaccaaattaatccgtatacttattatatatacttaatttgtgtctttttgacgaattgttgatatttgaaacaaatttaggtaaataataatgttgagtttatattattatgataatttttttattgttatttatgtgttataaacaaaagtaaaaaaaaatcgaaaaaatgaataattattgtaaaaaaataaaacaattacgaaatataaactatggctggaactaaaccaatttatttttgaattgtttagtgtgatttgatttgattatttaattaatcatttggtttggtttgaattttaaaaaactatactggtttaatttaaaaaaattgaaaatccataccaaactaatgacacgtaaagacattatttctatgtgaatgaattaacactttttgaattatatttaagattctttctatttttggggagtgaattaacactcttcaattgttttttaacttttttcttgaaattgtgtgcattttgaaaacgtggcaaattagtttagttggatttatttggagggaagataagttgtgaaaaattatgagatgagatgagatggtcccctttgatgtcaaatgtctcatcctttcttccatgcctcattaatatcacataatccaaacaaaaaataattttacatcaattgaatctttcatattattaatataagggatgatgatgaggtataaaggatgtgcatcacataatttatttttttaagggaagaaagaatcttacatattaatgtattattaacttgtatagaagcttacatattttaaaattgaggagtgataattataattttttattaaaattttttagtcaatttttacacttaaaattatatattagaattatttttttggggtttttttatttttcatttcaatatatatatatatatatattttatatttttacagaattccacatagaaacccctatagcaattaacggagtaacttgaatcgcaactaaaattcgtatagcaacctgtatagaaaccaccggaaaaacccaaaccgaaaatttgaaacaaaaaagtatatgggattctcctattttttttttatatagaggtatttattatagttacaatatataaatatttcaaatagttttgggtagaaaataaagtttatgatatttcagtttatttcaaaaaatttcaaacttatttttaacattgtaaactattcaaatttttttaaaaaattataaggatgatgttgtaactataataaacaccgtcattaaaaaaactttgaacacaatattttaaatacggtagactaaaaattgtaataaaaaattcacggtagcactctccttaaaatttaataaataataaaaaaaattactaactaattatcagatgccaagataccatgtattaacaccaaataataatgttttttttagaaatactaaatgtcattaatgatgtttagcaccctattcaatatcatatcaattaagtattaagattcaaatctcatataatttaaaataataattttttaaaaaaatattactaattaatcgtacaccgctcatgttagatatagcatttagaatatttttttttaataaaaatcattagatttattaattaataaattttttcatagtaatagagcgcacttcagaagaacagtcctccagctaagcacacgacctgtagagaaacaagaatctcttgtcaagcaataaactaacttatttacagatagttttacaaaacacaaaataaaaaaaaaaaaaaaatccaaaagtaaatttggaacatttgaacaataatttttttaagttacgcaatctcataataattaatgaaaagtactcaaaaatgaataattctctctgaccttaaattactttaataacagaaatcatcaaattaggaccaaagattcccacaaagacatatcaaatcatttccaatcaataacttctcctctctctcttcaccacccaataattaaataataataatatatataaacataataaaaaatccccccaaaaaaaatgaaaataataaataaataaagtcaaagatgcaagccgctggatcagttgactatatagagttccaaccaatcacaacaacagagctgtcacttttttgtagagacgtataatttcatttttgttttttttcttgggaacttaaccaaagcttcaatctttgatctcattctgtgtaaatttcttcaaaactaaagagaaaaaagaagaaagatggtatctttcagtgaaaaatctgttcttccatcttctcatgatgtggattctggccatgctcgtctcaatgagcttggctacaaacaagagcttaagcgtgatctttcgtaaattttctcaaaacccttttcattgttcttggttttcttacttcttttatagtcaaatttgtttgaaaatgaaaagggtttttttctttttcttctgggatttgcaggatgctttcaaattttgctttttcattttcaatcatatcagttcttactggtgtaaccactctttacaacaatgggttgagatttggtggaccagtgtctgttatttatggttggtttattgctggttcttttactatgttagttggtttatcaatggctgagatttgttcttcttatccaacttctggtggtctttactattggagtgctaagcttgctggtcctaaatgggcaccttttgcttcatggctaactggctggtaatactaataatgcctttcttttcatatggtctttattactcactcttttttctttatttgaagtttgtgtttggttattgggaaagtgctgtaatgaattaaaactctttgttttggagttagttgatatggggttcacttgacttgactgaattttatatttcttcattgaagaatatgaatcttgattttgcagctcatttcttcacttatccttccatataacttaaaaaataacttctagggaatatcgctaaccaatcgtagaacgtcacctgtagaaattgttgtgcccaataggaacgctctcttttggtttggtgtttctttaattctattgcttggtctttttggacactcttttttttctttatttgaattttgtgtttggtcattgggggagtgttctaatgaattaaactctttgttttagaattagttgatatggggttggcttgaatgaattatctttggtttgactaaataatcaccattttggttttattttattaaatccattttttgacttttaactcctaattcttgctctatggtttagtgctctgcattgaaaagaatgtgaatcttgattttgcagatcatttctttggtttgttctttcttttaattctattgcttggtctttttgggactaaaagcaacaaatatagcaacaatagagagataagtaagaggttttgaaaaatgaaatttcgtttgttttcggggaaaaccaaatggaaggttcagtttccattctcgaaactgttgaaaaagaaaaatcatttgtttgttctttctttttcatcggattattataagtttcttgtagctttgttccaaggtttcagacaaaaatggaaataggatctttaagtattggtgaaaatttgtatttgaattttcacagtattgctattaactcaatgtgatctctctgcataagaagtcaacatttagacctttaaactaatattgaaagaagttgtaatgaatactataatagaagagtgttttcaacagaatcttaaatacaatcatgaactgttaccaaatcaatcttttagctaaatcagtctaatacagaatgaatggttttttttcactgcttgcaggttcaacattgttggtcaggtacttttggcttctgagaaaagaaaattatggacagaaagtgcttaaaattgtagtaaccgaaattttcggttttttcttattgcagtgggcagtgacagcaagtgtagattactcccttgctcagatgattcaagtgatcattcttcttagcacaggtgggaaaaatggtggaggatatgaggcatctaaatacttagttattgctttccatggtggaattttgcttctacatgcttttataaacagtctttctatatcttggttatctttcattgggcaaattgctgctgcatggaatatagttggtaagaaaaagcttacatttttactatttgttgtttaagaccagttataatttcttgaatctgaagttttcttcacatgattttttaggagtttttgttcttatgatcttgattccctctgtcgcgaccgagagagctagtgctaaatttgttttcactcacttcaacactgataatggggaaggaattggcagcacaatttacatatttgttcttgggcttctaatgagtcagtataccttaactggttatgatgcatctgctcatatggtaagtgttctttgctactttctttcatattagactccaacagatgcttacttagattgctttcattttaagttgaataaataggacatgcccccatccttgaattatgtttcttgtagagctttgttcacaattttttttggccgtaaaaattctctctgaactatataaatcgttgcaaataccctcttacaattacagttactaacgtgatgttaatccaacttagtttaagaatccaaacaaaaattacagtctaatgataaattatgaaaatgtctatatgcattcttagagctaatgtttgtatgtttaatgttaataaacttgattttcggtagcttaaaattgttaaatacatcatcatactataactatacatgtaattcgtggtcatataagtaaattgttttaaaagatgagcaaattgaaactgaatgtggatagttacaacttgtaagtcttgtatagttcggggaaattttcgcaacaaaaaaaaattaagaggtcatagttcagtggaaaaaatttaactttcaaaattttgttttatagactgaagaaaccaagaatgctgatacaaatggaccaaaaggaataataagttctattgggatatcgatcattgtcggattcggttacatacttggcatcacttttgctgttaccaacattccatcccttttggatgaaaacaatgatgctggtggttatgccattgctgaaatatattaccaagcattcaagagtagatatggtagtggggttggggggattgtttgcttgggagtggttgctgttgccattttcttctgtggcatgagctcagttactagcaattcaaggtaaaattacttagtcttttgaaacttttcttataggcttatcaaagggatattacaaattgtaattgatttagctttgattctcaggatggcttacgcattctctagagatggagccatgcccttttcttcactttggcataaagtgaacaagcaagaagtacctataaatgcagtttggctttctgcttttatatcattctgcatggctctcacggtaatcacaacattattttcatttatttgttaagttatggtatattatacaaaactgaaatccatatatggtagtaggggtgttcatataatctgtaatttatgaattcggtgttaataatttggtcaatcccgactgtttatattctctaataaggtgaaggttttggatggaatgttgatgtttgatattgacttcatatgaataattacttaaaagaaagaattagaacaattacgaaatacaaactatactatggttttgaaccaaaccaaccagttcttaagtggagtcaagtttgactcgatagtataatttattaggatttcgaagactgagttgtcaagtgcttagtggctgaaatgactgtttaagtgtacctaacctaacctataaattcagaattttgtgtgagttatttaaagtaaaacattgctctagggagataccaaactgtctcgaaaagtaatcgaaatgctaatgatatctttgttcttgcttgtttgcattgcagtctcttggaagcattgttgcatttaacgcaatggtatccatagcgacgattggactatacatagcttatgcattgcccatcttcttcagggtaactttggcacgcaaatccttcgttccagggccttttaacttgggtcgatatggtgttgtcgtcggttggattgcagttatttgggtggcaatcatctcagtcctattctcattgcctgtggcctacccagttaccatagagacactcaactatacaccagttgcagttggtggtttgttcattattactgtctctacttgggtgttaagagcaaggtactggtttaaaggtccaattgccaacattgaatgaaagtagtgcaaaaatttacaattttttcagtgcccaagatggccttttgtaaaatttttatgtgtatctaggtgacattataccagaacttgagatggttttgttcaattgttcttcataataattcaattcacatgaggttagttactgtgaaatgatgcagctgagttctttataaaacttactaagaaacttaacttgatcttcctcgactcctcgcccggttcgggtttgacttggagaatacagcttgaactcttacttcaaacttaaaaaagaacttgactgatgtttttctcaaatgttttatttgtatttttttaactatcatgttaaattatttgtaaggaaagttactggttttattataaaattatgagttttaaaatgcgtttgaggcgtactaaaaaatatgttattcgaaaggaaaatgttttttttggggggcttctggttgggtgggctctaggcgcaagcctaacacgccttagcctagccttgaccttgtgaggtgtatgccttgaggcttaaccttatgtattctaccaacgccaacctcgaacaatacctgcaagaagaagaaacgaaagaataagaatatgaggaagcagtgagtgagtgagtggccacacataggcatcaaagaaggcgaacagaactttgaagacatttgagatgagaaactactatgaatctaaatcataaaatttccaaataaatttcaatcataaaacgcttagtatttggtacaatgatgtaatattgtatatgacacatactaagattgttttgtctagaaagattagttttcaaataatatttgtgttagtgtacttaccttggaacctcagccctgtctaagcaaggttgggacgaagcggtaccttgacaacctttccaattgacatgggagcatttttgtgttaatcagtataatattgtattttttgtattctttactataatagatacaaccttgttttgtcaaaattaaacaactcattttttcttagaaaggtctttggttgaaaagtttgatgaaccctacacacttacttgataaccctgaagatttctcgtaagtaagttgtggaagtccattctaaaaatctccaaagtaacctgggaacaaattgaacaaaaaaaaaataataaataaataaataataagagtggatgagtagctcttcttctgacgataccacttctggtgaaacttcttccaatccatccactactccttctcccgttcacacgataatcgttaatcctttcgcaatgaataacaatgatgaaatacaacatagattacttaataattaccttcaccccacccaaacttctatattgtcttaattttatattcccgcataatatgccaagtctcagtgtcaaatctgacattatttaacttttaccaacttttcatgaaatggaaaataaaaatccatacgtgcatattaaagaatttgaggaagttgtttacattttctacgacgagcaccatcaatgaagtaaaggttatcaaattctagcatacaaaaagctgtcaagaaataataacaaaaaaactcaaaactctcttctcgttggaaagaactttataatgtaaaggttatcaaattctttaattgaaatttccatttgatcactttgtacgcatctaacaagtgtgtaattttttattatttttcacaattatctctcaatgcatatatgtctaaatactcccacatgcattacttactgtaataccagttaactaatgacttataaaaccaaaagtcgtttggctaagtaaatcatacctttctcggccttttggctaagatcaagtgtagtatctgttcttatcagtttaatatctgatatgtgagccaatggctcacacgatattaaattaattttttaagggaaagagtccatcacaatagcttgctattgggattcttgagtgtcgcccgtgctttgcactactgcatgggcttggtgcacccctccaacttagttcttgaacaattggtcttcaatattctatctttttgtttttgatctaagtttaattttgtggtgaattaaggttcactttgattagaaaatgcaatttcaacacaaatttgtgatgaaactctaaaccaaaaatcataaaattgtagaacaagaaaactaagcaacagaacacaaacacacatacgtatacaaagttcgatcacaagtcaatgtaacttgtgtctactcctcgaaagaacagcaaagcttggttcttcgttttattgttttattgatgaatcaatggaggattacaagaatcgatcactcgaaacagagaatacaatgacaaaagagacttgctcttatattctctcacagctcactttctcttagtctctcctttctaatcaattgtgttagatctcaatgtacaaaggaatatagggaagcttatatagctagctttaatgctagctaagttcggccttaaaattaggtgggttttacgaaaaaaaaaattattgggcattttatttaaaaattatgtagtatttttgaaaattattaaagaaaaatatttttttaggcccttgggctgggtgagctctaggcgcgggcttagttcgacttagttcaagcctgaccctgcttagacccttaattaaaataactgacttaaggcattttgaatgaaaattgccatttttgcattaaattgttagttgagaaggatgttgcttattggaagaagaagttttgctgagagttgaggcactactctggtggctctttttggttttaattaacataatattttgagtaatttgtgacataagtacttaagtttaattctcagttgtaaataaatacctaagttatatttttagaactctgtgtcattttcttattgatatatttgaactaattttttcaaaacaataaaaaatttaatagcttggtcagggattgccacgtgacaatttatttaaccaggaacctacagaaattttaaaattataactgagttaaacttaaatatttatgtcacaaattactctaactttttttatttttaattactcaaaactgtcaagatcaaagtgtaattataattcttttatgcattttctaaatttagagttgtttttcacgtatactattggctacaacactcaaatctaagcttatatttgtacacacgtttacttagatgtaaatatgaacaattcaacataacactaaatacctaaagtcgataaaaactgtaaattattaacagttttctaattttgaagttttactgcaaaatttaagttttgagaattaaatgtaagaaaaataaaaatattagaggttttggtgcaatttgttcaatatatttatgaattttatttttacacataaaaatgagaaaatacacagaaaaaccctaaaccctaaattccctctatcccttcgtttcttcttcttcttattctcctcaatctccggccaccgccacggtaatagtaccagtcgccgtcgatctcactctcctcactccaccactgtgtgtgttcatctctttcacataaaaccatgagaaagcccaaatccaagtctttacgcaaccaaaacagactctcagaggttaacgaaatccaacttctcaactcatggattgaatcgcagaagcctgattccggttccaacccattagctcttcctcctctccgctctggcgaacccgttggccgaatcgatggctcattattctcccgctactcgggagtaaccatgttcgaccagttgccgatttctcagaagacaaaggatggtttgaaggagtcaaaatacattaagatgactgatattcaaagagcggctttgcctcatgctctctgcggtagggacattctcggcgcggcgaaaaccggttctgggaaaactcttgcatttattgttccggtgagttcgaatttctttgttgttgatgcacttttgtttagagttagggtttacggttcgtttggtatgtcttattgtattgcattggattaaattgtgtttaatttatatttatatagttttaaataaaaatatgaaagaatatataatatggtatacacggcgtaccaaacaaacctttagactatgtttggaagttggattttggtatggaatgaaaaattgtatagaaaaacactaaattcaactaagtttttcatatcgaacttgaaacttattttttctctgtatttttcttttttcactaaaatctaacttccaaacataaccttagtgtttgaggttgctgagtaaatgagaagtatgagtgaactttgagaaatgagtgagtgtttatagtaattagcatgagaaagaagaagacaatgaatattaggaatttttacgtatcaattatagtgtttggatcaaaactctctcattgtatgtaatcacaagaatatgtagaaaattagagttgttatggattagtacttgagtagttttattatctgagagtgattgatattgctgccaatattgataactgattattgcttaatctggtgatatatttttcatgggtagaaacggcttactggtattatctggactcgttaattagggtccagaaaagattgctccgatatttcaacatccatgaaaattgtgtatgttttaggtatttaagacatcttgcaaaattttgagaaattcggaattatttacaataaagaagtagtgttacaaagtccacacgtgtataatataaaagagtcacgtgtgcaacaaattgttcgaaccctgtttttagtgtgtaaattttttctaaatttatcaatattttgcaggatatattaaataactatagcgcacatacaccccttttagtgcggtgtaccatagaattttccctttaattatattgtcgaagaatattagcatgaagaaaccatcagaagccgattagtgcttcctaactattccttgtttctgtctatttctttaaactctttttcaatgctcttagagaatcaacttttgttgtacattctgtaactctgttgatttcaggttttggagaaactgtatcgcgagagatataaccgtgaggatggagttggcagcattattctgtctcccacaagggagttagctaatcaaacttttgatgtattaagatcagttggaaggcaccataattttagtgctggtcttctaattggtggtcacaaagatgtagacatggagaaagagcatgtgaacgatatgaatatattggtctgcactcctggtcgtcttcttcaacacatggatcagactgtaaattttgattgctcacaacttcaggtcttaactttgttattattgttcttatttccaacatttaattggtttatttgcacaaattaaggcaacgattttttctttttattgctaatttttgggggaatttcctacccagggaacaggttttgatccttgatgaggcagatcgcattcttgatgtcggttttaagaaagctgtaaatgccatcatttcacagctaccgaagaaaaggcaaacgtttctcttttctgcaactcaaacgaaatctgttcaagaccttgcaagacttagtttaaaggatccagagtaccttagtgtgcatgaggagtctgatacagccactcctacgagtttgaaccaacgagcaattattgttcctgcagaacataagttagacatgttgtggagtttcataaagtcaaatcttaactctaagatcttagtgttcttcgcaagtcgcaaacaggttatcttgttgctttgattttatcaatgtgatatacttttctgacttgttagctcttttttcaccctctttggactatttttgcaggtaacatttgtctttgaagcgttcaaaaagctccgtcctggaatacccttgaaatgtcttcatggaaaaatgaagcagataaaaagaatggctatatattctcatttctgtgaggaaaaacgatctgttctgttctgcaccgatgtaggttcaagaggccttgattttaacaaggctgttaactgggttgttcaggtgaggataataattcattcttcaaacagaaattttctattgaataatttcgattggatctaagatgggtcttgttgtgcataggtggattgccctgatgacattaaaacttacatacatagagttggtcggactgctcgatatgattcttgcgggaaatcagttatgtttcttttgccatcagaaaaaacaatgctcgataaattgcgagaagagaaaatacccataaaaacttataaggtactatacttgcaagtacagtatattcattccagtttgaatttgaatggttttgttttgtgtattatctctttaaagtaacaggtattctgtttgtttaggtaaaactagacagagtgcaacaagttacggggctgttatcagctttgctagtcaagtatccagagttgctacctaaagctcaaagggctgtcacaacatatgtacggtctattcttaaaaatcgagacaaagagattttcgatgtgatgaaactgccagttgatgggttttcagcatcattgggtcttccgttaactccaaaactgcgttttctaaatcaaaaaattaagaaagggaataatatagtaggaaaaccttctgttgtcgaaccagaagattctactgatgaggatgaggatgaactcgatcttcctggagaagaacttgatatcggtgaattcaagacaaaggaagtggacgacaccaatgtggttctcgtagacaacaccaaaattgaagatggttcagcaagcaaaatcgcagatgtcgtgtatgtcatttttttttcattctttgttggttgctagtgcatattgagctttaaaggtgtttttttttttaaaaaaaattctgcttgattgttattgcagaccaccgactcgagtcttgaagaaaaagaagttgaagatcaatgtgcatcgaccagtgggaaccagagttgtctttgatgaggagggcaacacattacctccacttgcaagggtagctcacatgaacggtagcgattcagcgctgcttgatcaaggtatggccttctaacttcatattatcataaagcattgttacgaggcatcatgatgcttaacaactttatatggtagcgtcctataaatgattagcggttttctgtaatcattaccaaagtgaaataagttggactcgatattgaattgcacctataaggatgcttggcatcatgagtgtcctttaacatttctcgttatcatattaattttcagtcttacaaaacaaaaccccttaatattgatttcccattttacagaaaagaagaaagaattttacaaaaatttgagggaagagatgaagcttgcagacaaagaagacaagctcctcgaacgccagcgtctccaagaaaagagaactaaggagaagatgaaaagaaaaggtagactagaagatgaagaagaagatgatggcgaggacgactctgatgaagaagaatctaggaagaagaagggcgctaaaagatcgaagaagtacttcgatagcgagagtgatgacggagaagacaatgggggtaaagctagtatcaacactgacgcaatatcgttacaggagcaagaagctttggctctcaaattgctaagctcgatgaacaaaatttaagagggaaacaaacatggatcgatcgggtattgaaatctaatctaaacctgcctagtccaaccaattttgtctaaatatttaatttactgtttgagctttacaagttgaattttgttaatatattcaatttactaatcattgttttcatgattaatagagagtgctttgacactgacagacaagttgtattgtaccaattttgcttttagtataatagaaagatgagatcatgagagtgctcagtttgttttccattagatttggcctatgtgtgagtacactattaattacaataaaataatgtatattgtttgctaacttatatatttgagcattgttattggacatcagtagtgtccagaattttttataggtggcgtcttacgaatggttagcgaatttcttaaaagctatttttttaagttacatagaactcgatatttaattatactaatagcggtatgacaccgaggaaggtgctaggcatcagtggtgtcttttagtaattctctatatatttatataaaaagtattgttattagacatcagtagtgtctaacaccttttagaggtggcgacttacgagtggttagctatatttcttgaaaattattacattaaattatatgggacacaattcttaattgtaccaatagtaatatgacacttaagagggtgctagacactattttttttagcatttctcttatataaagctatttctacattctattttctcaattttttttcttctttttatatgttttaaattatttgaataaacctcatagaaacctgaatagaacatacatgcttattaattctccatgcctatacttgttgtaagtaacaaaaacaactctaaaattctcatttgattgagttaactaacaatctcttttaattcactcttctatagctttatattagaaagtgtcaattagagaggacctaacacagaatatgttgaaactcgagctcaatctcacatgccagaaacaactccaagaacaatccgagaacacacaccacaaaactcaattcacacaactcaatagtgaaaagtatttgaatggtttaagctttatttttcaaagtagcttatgattagtgattacaatgtgttcaacatctttaaatacataaactcaatgactatacttgaaaagaattgaaaggtagaacaacaacaacaattatttataattcttcaccaattttactataaatttctgtaagaaaatatttgagttagaaagattatgacatacagatgtagtgttttcttatgagcattttaagtgagagaactcatacaaacattaacattatatctttacatatatatatggttattatgtactatatatgaagagaagagatcaaacaaagattcaaagtgtcatattttttcttctatatattatatcccatcaaacttttctctttacattttgtatgttagtgtaaaattttgcttaaatctatctttcttatattgatttggtcactacactaaacaacttttacaatcatatataatcttgaagaccttcttagagcatttgatgaagttgtttcttcaatcactcaaagtagtattagtgctgctaatacatattctatacaaagcacttaaagatgtgtgaaaagaaagaaaaagaagcggtaggtaagatatgtttagaaaatgaacacacatttatactaatgcttggtaaactgcaattaaaaatgaatagaactaaaatgtaaccaaagagagataacaaagaacgttataaaattaaagatgtgtgtaaatgaaaacagaaggagttggtaggatatctaagttttttttttttt

SEQ ID NO: 224829 - DNA, 6052 bp, Cannabis indica
tgagtgttacctgttttggagatgagatgtgcattgaaggcttctcttcgcgatttgacagcaatttgctccgttaagtgcaagaagaaagacccaatcccaccgccactgagagaggaagattcaggacggactacaatgcttgtaaaccctaaagctgcgcccttcagagagaaaagagagaactatccagaagcgctttctccaaaaataaatgttaatatagtattttgtgcaaattttgttttgaagaaaattgccttacatagaaaagaaaaataaaaaagaatatagcaaaccacattccctataatgaaaacggatctaataataaaagtttgctaattagtaatttttctccttcaattttaacatgtactaaattgtacaactgaacactgaactttgtttttggccgttaacaaatttcgggaggaaaaattagtaatcagcataaaagttcattaacttcagcttgttaatgtaaccgatttgtgttctcttcacctgaaatggataccgaaggaagcacccaaatctgcagaaagtgacgtgggctcgagcaaaaccaacccaacccaagtccttatcgattcgccacacataccatcgaatttgaagggccgagatctcacgctcccacgtataaatcaacccattccgtctttctctctctctctctcttctcttggagagaggggaggaccattaaattgaccgtcactgttccatggctccgatcttcgagtatttcgtggtttgtgggatcggacctgaaattcgaaccttagatggggacaaagggttccatggatatggagtcatgtactctgcttccttactcgatcagtttcctcctcttaatcattctctctatcctcctccaccccctcagcttcccattgtaagtgcctccatcatggctgttagccacaatgccgagaaccgccatttatgattgtatttttttctttttcttcttttaaggaatattctgggcttataattttcgactgatttgagtttatgtatttgtactttatggtatttgttataattgcagtgtgttttaccagctggggtggagttttactcatcaggaatcgaatacaatgatgcctcaaccttcccgcggagtcacccgattgttctcactggtatgacttgaattcaactatttgaatcactgagaacttataagaaataagagttaaaattagtatttgaatttaagcattttaataatttttgtagagggcgatggatcgaaaatatatgttagttgcattgcttttcgggatccagtgagtgaggatattgctgaagcgtatcgtatacctcctaattcatttgccgacaaatgtatctgtcttgtttcacgctccccgagtttcggggtactgaaaagtgccttggaggaactgttttcactttgcttttccccaagtggaagtaggtaaactattctctagagatgaaacttgattacctttttcgtataacttgggtgttaacatcttgacaaatttgtatttgaaagacgaagatgaatggtcttttgctcacaatttgctgtaattttttcaactttgcaacattttcagcaaaccattatgggaaattatatcacacatggtgtctaatgtgcctttgcctacaccgggaaaagattgtgttttgttttctatagagaattgtcttctttctgttgaagctccaccgaaggatgggcttcctcatgccgatgtatgcatttataatcagttttattgtagctgtgcagtttttagttttccctgctttattaaataagttacaagtcttgtttattgagaatggttcttgatgttggactgttatacttttcgatgaatgcagatatcatttcagccattaatacagtgcttggatgttgacaacttaattaaacttttcactgctgtgctgcttgagaggagagttttactccgatcaaacaagtatgctttaagtccttttttctttctttccttctttccctttgcaattaaattacatttgaatttgcttagaccataccattgtattttgaaaagtaccatgttttatacaaattttcatgtgcagatatgtgtttattctgtaagttttgatcattctatgtttctaatttgctgacaaataggtctctcttttttttgggcagatattctcttttaacccttgtatcagaggccatatgtcatttaatttatccatttcgatggcaggtcagtttgatttgttaaactacatggacaaagaaaaaaaagtttgattgttctcaattgctttttgttatgcggacatcatttctttgtctcgacctttaggttgtaacaacgggcaaccactcattctgttagccattcatagtctctaaactaatccttctatgttttttgtcatgtagcatgtctacattcccctactctttttcagcggagtagactatattgatgctcctacaccttatatgatgggcctccattcaggtgttgatacatctactttgacaatggatggtgtaagtagttgcttcgaaacattgtttcggtatttttttcaattgaacatgcatttcatgttctgatttgcaattatcacaaacaataacatgaaatctatcagatcttccggggtaaatgccaatacgttttattttggtaatgtttggtagttagctgaaagaaaagtgaagttatagatatatcatatatattggcaaacactagcacataagccttttctgtttgtattgtacataagacatcctcaacgtccctgtttttgctttacttgccatttaaattgcatcttttgtatttacctaaatgttgcaaatcatttggaatggctatcacatgcatatagagatttcattgccaatgcgtttctttagacagtattacttgagtcatatattcattgttctggctccttatttctttgccttcttatttttaggtagttgttgtggatctcgagtataatcgcatcaccacatcagaagacatcccaccaattcctgagcccgaattaagttctttgcgtggtgagatactgaagcttttgtgtcccaatgttgttgggatagatttgatgaggacaggtccatgtacttcatctgaccaatttcataaaagtgacaacaaaccttggggagaggatcacgatcttcaacttaggtgataactggaattcacatgaacctgtgatgaaatactttttctttttctgaatggtggtgatgaagtactttattaataaagtaactgtggttacatacattgttgttctgccttgcttgcataaccagatctcaccctcttttccttttctaataagtatctttcttcaaaataaatttaaaggatccgtgttattcatatattaccttgctttttacaaaaaaaaaaaaaaaaatcatatattaccttgcttattgagctaaactttcttggattttcatagaattgaactcccgtatctaattgtttctttctagtttcatttgtctgttctgctagctatagttttggcaataatgctaatgtattttctctctagatcttggaaagactatatataatctttagaaggttttactattgaggtgtttgtttgacatcttaaatattataatgcttcttctaataactataaataaatgtaggtacatatttttacatttgatgtgggggcaattattgtatgtaaatttgtattgaatattattttaggagtgataaaaaaactaaactgtaaaagtgatctattgtggccgtaagattaaaatttaatccactactgagagtggaaaaagtatctctactgtagcaaccccatttgaagtatatgctattttctatatcctaaagttttatttcgtagttaatgtaattctttaggttttagcacttgtggagtagttctttgacaaattatatcttcattagcacctaccaactaaaattattaaattcaaccttttaaatctatccgttcctgtgttgcaggttggtatttctaaagttttttgcatcaattctaagtggctatcgcaacttcatagtatgtataattaatattgtttcttgctctgtaaagatagtttatttatttatttttttattttccacttcactatgaattttattccctaaataatactcttttcaggaaatttctgcaaatcatgtcttcaacaatcaagcatttttaaaaaagcgtgctcggtcaagtaatcaatcatctgatcccatggtatttctttttgaaatgtttcatctttatactcaaaaacatcaaccttacagtgagctattttgtccattacagatgacatgaatgacatccatagttttcagtatgtgacactatagtatttgtttttcttcctcatattggaatgcttatcaagacttatgagtgaaattagaaaagtagaagtgtggactttaacggatttttttttttaagtactttatatcatattggctaacgacaaaaaattatcttcatcccatccacagtttacattgtgttcgaagttttataaaattgggagctagaaatgttattgttttagaaatgatacatttctagctgtcatattgtcaattaatgacatcccttatcctaatacaaaccacctcccaggacaccccacccactaaaattttgtccatattgtcaatctcagtatttttctttttacaatttcatgtatatttagatctactctgccttttttttgtactaatttcttcttgctatatacagatagcccaatttctggacactcatgggttcatggattacgtggagaggggtatgggttcctgatgataactgtaataatctcctcgacaagctacaagatgcaatcggcaggggccagaatcccttctctattttcccctcaaatgcagttgaacctgagattataactatctcagatcctggtggtaaaatatcaggtaaattgatctaactgttaagtgatttctgctgattatatcaggaagatgagtggtgtagctaacattttctttgcattttgggatcagatgccaaatatacctatgataggtttccatctaacattagaacggaagaacaagaagaaaaaaggaggcagatccttgcagcagcaagtggtgcctttgagtactctggaaagcatactccaaggtacatacaaacatattaaatttgataatattatttcaatttgagtatatataggaaaattcttaagtagtgtcatacgttttaaatttgataatattatttcaattttagtatatataggaaaattcttaggtagggttatcactcttgttcctatcgtaggggcattttctattttcggtactttaaaactttatatatattttttatagtgtaaatactaatttggaccgtgtattttgcaaaaattactgattagactctctgttttattaaatgacaattcggaccttgtgtttttaaaaatggtacaaaatagatcctgagcttaattttcgtcaaattaaaatttaataataacctgacatgggggtgttatgacaagaatcgttacattttttttgtgaggtttgttatattaaaaaaaattgacaaagatggagttcaaagtctattttatactattttgaaaaatacagccatttagttaaacacaagtctaatatgtaatttttgcaaaataaaaggtctaaaatggtatttatctttttttatatgataatatacgttgttattatagtaggcaccatgattgttttcgggtaattctgaataatgatttacagtattgagaagaagaaaattttagggttcatcacttttgttcatattttcagcatctaaagaaattttatccctaattttttttagaggataacatacattatagttgtagtaagcatcatacccatttttaggtggttcaaaataataatttacagtattgaaaagattcaaatagtccactgttttatcattatcatttttaaagttacca

SEQ ID NO: 224830 - DNA, 1853 bp, Cannabis indica
aaaattagaccccagttggacagacccacaaatgttatgtagccgaaagggtgcatcagtgaaaggtggtttaggaccatttggtctctatgttttggcttcaaaaggattagaagaatacacagcagtgttcttcagaattttcaaaagtaatgaaaaatatgtggtgcttatgtgcagtgatcaaagcaggtcaattaattacctctctctctttcaatttcaagccatcattatcttattattaccaaattttaacatttctttttatattattattttgttattttgataggtcctcactcaatgaagataatgataagactacttatggagcttttctcaatgttgaccccgtttatgagacgctatccttgagaactttggtgagtatatatattatatataataattatattaattacacaggaaataattaatacaacttgattttactaaaatttttagtaacatgtttctctttatttcaaacttacaagtcaatgctagctagcttaataatcaatacttaaatcagaacattatatggctctatttgtaattgaggcatcgctctatagtgacatttatatatattctacatatatcttaaaggataagccattatatacatatttatcaccaaactttatatcatatatatagtactatacatatatgttctaataagtgggggtttgcttttttatctagatgataataattgctttcttatccattaaaagtaacatcatcttttaatgaggtaggctaatatatatatgatcataattaacttttgtttgacagattgatcactcaatagtggagagctttggtggaaaaggcaaagcttgcatcacagcaagagtttatcctaccttagctattggttatggagctaatttgtttgctttcaacaatggtaatcaagatgttcagatcacaagcttaaaagcatggaatatgaagaaagcaatgatctattaattaattgatcaaacaaattaaaaagatacatataagcaacttttcgagtggaataaaagatgtaaccccaataatataataattataattatagcttaatctctctctctctctctcttgcattggttcgtatttttttagaaagaaattgtttcgattctcgaggactggcatatttgtatggttgtaataacccaattatgcgggtcaacaaaaatatatatcataaattttagactaaatatataaaaatactccctaaaaactattatattaaattatacgagagccgatacttagttgtaccaatagcgatattgacacataggaagttgctaggcaccactggtgccctttagcatttctcatatttttactatattttggctttcagtgagaccagttaacattgggatataacactttaatgttctccagtttagaaataaatctctctcctaaataaagacactgaaaaccatttttcaagaaaaaaaaaaaagcattggaaacatgaccttcatcgagtttattacctatcaagcactaaagattaatataaatatttttttagttaattattataatattagtgatatgatttatgtaatacatgatatcatgaaaatccattattgtgactaaaatgatgtgtgatcatttattatatataatagcatgtgaatcttttttcttcactaaaagagaacgagaaacacattctctcccaccgccaccgtttataaggcacaatgaattttaggtggaactatataacgtgagcgaaaagaaattaaatttacaaatactagttgtggtcatcaattaattaatttatttacagagtggactttcgaaactga

SEQ ID NO: 224831 - DNA, 5240 bp, Cannabis indica
cattttcgcaaaatgcatttacttaattaaagtgatgcaaaggataggcataccttccatctcgctttcttaaacagaactgcatctagaccaagtaacattgagatttggttaagaccaatcagtgcaactgtaatagcacgtgccatgttcatgtcctcccaagcatcatggaaacaccctcgttcttctgcatcaatgactaaatttttccaaaacgtgccactcttacgtaatgtttctccactccccactatccaaaggcaatacctgcaccataatatcatggattggatataatgaaaaactacagaaagtcactataaacattttgcataaattataaccaaatcttaaccttgctcgtgttagtgccacatttgctctttgcctactagataggaaacttaatgagccaatcccattacacctgacagtagatatgattataatatcctcctccccaccttggaatccatcaactgtgcggacacttacaaagaaggcattgtggggatctgaagtatactttctcattttctcagtaagtgcatgaacttgtgccttgtagggtgttatcacacctactctgaccttcttctttgtcaaaataatttctagaaaaagcaaatagaaaataaatattattccctagtcctatcttatcacatgttctaagatcatctcacagagaaatttccattaaaaatgtagaattatgaaataatattcaactagtttagtatataacttagacgtacgtttatgaaggctttcgaccatctccaagattacagcaacctcaactatgttttttcgactacgcttgtcatcaaattcctcctttccatgtgacacatttatgaaagaatatgagccatacatttttccttgtaggaaactcttattatagcttctatctttaacattctgtccattcaaaatctgattgttatagaactccttatttggaaataggcttatggatggatgcatcctgtactgaacattaagaaggtgtttcttgtgtcccaggtacgccaacctctcgaacaaacttcttccaaaatcagcttcttcagaaatctgaaaatggtactattgttaaattcaatgattctatagatatttaaggctttaaataacacacacagtaacaacctggcttgtaaccattgcaggtagttgctgctcatctcctactagtatagcatgacggaacccatgaagttgtaaaggaatagttgattcacattctttaagttgagcagcttcatctataaccaatagttccaaaggtttcatatcaatgatgttcaatttagcagagcccgaagcagtacagaaaatgaggcatgcctttttcaagcagtattctcttattacccttttatcacgagtatatggaaagcaaaacttggtaggcagtgattctagaataaaaaggctattaaccttttcacgattgaggtttgtaaattgactgcctctactgaaggcttcctttaaatcttcgttagaaacaccatgcaaaacttgttgaaattttttttagagatttctcagcttcaagcatattctttgccacttctggtgaaataacagatgtaggcaggtgtgtacgcaaattctcaataagaaagcacatccattgtctaacaatatcaaacctcttctttacaaactccccaaaagtcataggaatatcatgtactttttccccttctcttcctttcttctttgcaggaacatcattcctattatgtccctcttgctttgattctttttctctcagtagatgtagcatagtgttcggtcttttatcggtcttgttttctttcaagaacctcaaaatgaactgcttcatatctttattgccttttttgacttcaacagatttatcactatcatctttttctgtatttctttcaaaatctttatttcccaaattcacacattcttttatcaaattactattatcattcttcatgatgtctttgtcttcccctttcatctttctcaagtataatctgtactgtttgtcaggttccttaagcaaactaatcatgtcatgtaaagtatctctccacccgaaatttggatcaaaacacgcagcaagtatgtctgcccgataatcaagaaaaacacgataaagttcatcataatcatcaatattcattcgtttcttattcccaaccaaaactatatctcctagcccatacatctcatcattagctgaagctacaacattttttacgagttgatttgtcacctccagaactgcagtgtttgttggagcacatgtgagtgttctgcattcctccctaagcaacaaacttaaaagaaaaccaactgtctttgttttccctgttccaggaggtccccatatcattttgacagtattttgatggtaacactttgtagctctaatacagcttaaaattgcatcttgttgtgaatcatccaaacccaacttgcgcattctggcacatacatctggattcatagcactgcaaatgctatcagattggcagatggtacaattttctacatcctgcaagagttagatataattttgttctgtgtcaataacacaaattaactatcaagatttagaatcattataacttttaagtatgatatctgttacatgtgattttattcaatattaaatatgttaagtcatgcatttagtgtacacatatttatgatactgagatgcaggcaaaacatgaaaaacatcttacgtaaaatccagcttgcagaacattttgaatgatgttcatgttcactgctttctgatcgcagtttaaggcagtcattatacgaacatttgtagtcatattgatcaactttacagcaaaaagctttgtcctcttcccattctcttccatgtgatcttcatcaaccagggcaggctttgaagatagtattaaaagtttaaaatgatcatctctctccctcacccttttcacatgagcaatgagataggatctttcaggccggtcaagatcatcaacacatgtaggtcttacactagtgatggcaatgagatctccaacttcaggctcaaatgcattcatatcattctcattttccatgcttctttccacttcaattttgtacagcaaatctttaggaggcttaaaatccttagaccgcttcaaagattttatttcagagtaaggtgcatcagacaattctttgaagcttttaagcaattcagcatgtgtttcctctatcagaggggtgatgaatgagctcaagtattcagttgttgatgagaagatatagggaatcgtcttcacctaattaacaaaatgttaaggatatagtccataagtttaaaaacacatctatcaaactatcagtgtcaatttaaatgaataaagaacttaggtggcgattggttggaaagaatgaaaacataaaaatgggaataggaatggaataaaatttaaaatgcattaaaaaaattgataaaaaaattattaaatttttctcatcatacgtcagaatggtctttctttccacttcaaaatggaatagtcattccaccaaaactcattccattagaatgacattcccaacactttagtatgcaaccaaacaaaggaatggaatgaagattgtttcctttcctttccattccattttattacctccaaccaaacaccatactacaagaacctagttcatgattgcaacttttgtgtcaaactaacttcaacttttccactgacattattttttaagtattactaaacagtattcagtgacacattgatagaaagaaaataaacaattcttattcatttcagtattctgtttaaatataaataaataatgtaaatagtacaggcatattacatattgaattacaaccgcccactatgtttttttgtctttttttttaacccaaacaaaaatgcatgaaatagagtatacctgttctttatagagatcaccattgataacatctgcgatgggccaagagaaaactaaatcaatcaagtctttgcttccaactaccatttcattattcagattacaactctccatcattttgaagcagtcacttctgcgtgaaataataaacacgagtgagaatgaagtatgaacagtcaaatcccttgggataaaaaaaatcataaaaatatataaataataaacaaaaaaagaaaaatgcacccataacccaagttcagttctaattacaaatgcaaataaataaatttcaggctaataaataaaatgatgctttaaacttttcaaaaccctgcttttcacaacaaaaaaacttgcttccccataaaagctggagtagcaaaaatgtgatcagagaaaatgggtaatgaaatcgattatttaaaggacgtaaattgagtacattaatattaatatatgtatataaataaatacatgatattttgatagatagatgaataatgatgagaaagaagaagagattaaagcaccctatgccttgcggtttaatttggactgatgcttcttctattgtgaaaaacagaagaaaccacccactcatcgctttacttttagcagcaaaccgccatgtattttattggggtaagtttaaatatactttttttttttttcatacagttaacaaaaaataaattttatttttaaatattcaattaaaatgtgcccacttttataattctattaccgattatatccttacagctacacaagttagagttaactggacagtcagagtcgttagataataagggcataattagtagagttgttgaagaaaataggtagaaataaaaaataatagaaagagcaggtaaaaattaaacacaacaacttaaaagaagtataccatctaattattcctattttattacgcactttttactccctccacagcccacactccactccaagtccactccacactagtcatgcacattttccccgggatggggacccacccctaaagccaatggagtagagatttctcgtcaaaggggaacatggtgggaacaggaatttttcttctcccaaaatactaaacaaggtgggaatgaagatgacattcccattctcatgcgaatttgcttaatattttattagggttgtacatcggtcggtttgggcagtttatcctatatattttctaattcaatctaaagttcgggttgctaaaatttaagttaaacccgcccaatttaaaaaaaaaaattctataaaccgaccaacggttt

SEQ ID NO: 224832 - DNA, 5594 bp, Cannabis indica
gtccgggtttgggttcattttttgaacccgaaacccgtgaacccgaaacccgccaacccgaaacccggtaaacccacccgatgttcagccctagatgtaagtaccaagtaagtttccaataaccttagcaagagattcagacttactcaaaaagggcaatcggaacacttgaacccaaaaaggagttatagtataagaacccaatggagcatttgacagaacagttggtgtgcaaagaatcatatcttggttgtggaaatgccaaggttccttagacaaaactctcattaagtcaccttcacagccaaaggtgatcataaaagaattctcttcataggtggagatagtgacttcaaatcgccctttccattgagtgttaaggaagttggtaaattgctttgggttgaagcctctatgagagaaaattcgacagataatgcgatgagagacagggtgagtaggcagcctagggagattggacaaattgataacctctctttcccgatttgagagagctcgagagatatcaggatgaaaagaatccatagttgcagatgaggtgagatgcctataactgatgcagaagaagaaacttgaagaagaagaagaggttataatttgaaaaaagaagagcgggagtggttgagatacatgggaggaggttacaattcgaaacctgggaagaaattggaaaataaacagttaaaaagaaaataacagaaacaactgccacagagtaaattttaaggacagacaatgctcgaagataatggacaagatgcccttcttttacttattattacactatcaaattagagcccacaaataattttaattcaaaattattataaaattcaattaatatattaaataatttaaaatctacaaaaaaaaatctaaaagtgcaaattgtgcccccaaatttttgaagtggttaaaaattccctcaatagattattggattgagaattgttatataattaccgttagttttaacgacttaaaaaatttaatttaattattgtatttgatacatattaaaagttggggacaaaaaatctgattataatagtaaacgttagaaagtttaaaacggtgacggagtaaaagaattaaagagagtgatgacgaaccagatagaattgttttagcaaaggcatccaacaatggataaacccttctcagcaaacaaccattgataaaccctaagcttccaaaaccactcatctatggctatgtcgtcatttcacttacttcctctatcttttgctttagcccaccacaaaatatcttctcggttactattccagaacaattttcaactcttcgacccacattcttcacttcagttcttcaattcacacaagttaaacccacctagagcttccaccagtgatgacactaatggagccattcaaaccaaacaaccctctcgccgaggcagaaagaagggatccacttcttcttcagagtcttctacaaagaagacaaggcgttcgagaaaaagccaagctgagaaggaccaagtttcagactctgagcttgaggattacgacgatggcatggatatcccgtacgacgatcctcctttgatctgctgtttcggtgcagcacagaaggagttcgtgccgacggttcgtgtttccgataacccaatggacccggatatttactcagagtggaaaatgctccaatgggacccgccggagtttgtcagggccccaggtgggccaccgtcaaatgtggcgatttcccacgtgaggctcggtggccgggcggcgtttatggggaaagtcggggaggacgattttggggaagagcttgttttgatgatgaatcaggagaaggttcaaacacgggctgtgaagtttgattcgaaggcaaggactgcttcttcttacatgaagattaagtttgaggatgggaaaatgaaggctgaggttgtcaaagagtctgccgaggattctctgcttacctccgaattgaacctttctgtgttaaaagaggtaatataaatggtggttttggttcttcaagttcacaaagttttattttttgacagcacaaaacttatagtcttatatcatcatcacacatttgctgaagttgtatgcaagaatggttcagtttggtttgtttgcttgaatttagtaacaaactagctaattgttctgtattgcccatgacattcattaaaaagttctcattgttagtattgggtcacccattgtaatgcaggctagaatattccactttaattcagaagtcctaacatctttgcccatgcaacggactcttttcaaagcaatttcatattccaagaagtttgggggccttgtgttttttgatccaaatttgcctttgcctctatggagttcacgcgatgagacatgggaattcattaagagagcctggaatgaagcaaacataattgaggtctcgaggcaagagttggagtttcttctagatgaagagtattatgagagaaagagaaattacaggcctcaatattattctgaaaactttgagcaaaccaagaaccggaaagatcaccaccattatactcgtgaagaaatatctcccctatggcatgatggactcaagtttttgtttgtgacagatgggacgcttcgaatccattattactcaccaacattcgatggtgtcatagctggaacagaagatgttctcattaccccattcacttgtgataggacgggttctggggacgctgttgtagctgcaattatgagaaagctaacaacttgcccggagatgtatgaaaatgaagatacattggagagggagctgaggtttgcagttgcagcagggattatatcacagtggactattggtgctgtgagaggtttccccacagagagtgccacacagaatctcaaggagcaagtttatgttccttcgatgtggtgaactgaattacattgcggttctgaaaatggtatgtgttttgtccagttgttgtgatacaaaacaaagtagtggtgagatttgtaaaattttgatgattttattttatccaaccaaagattgtttatctgattcagtaaatatatcttcttccaactccaatgatatttttgtactcacatctctcagaaatgcactctacgttggatactctaattgtttattatttagataattgaccttgttaaatgaaagtcaattttgagaataaattaacataattagagcttgctgtttgttacttgcaatttagagatatcaagatctttcatgcctccacgttttcatcagcaaggtcgttgtagtgctcaaagaatataatcactgttttgtcgaatggatatatatataattaaacataacaggtcaatgttgagatagaggaactcttttagcaatttataattatatctattcgacttatttttgtgtcagttgtgtcttctcttcttttcaggtaaagaaatacaattagaaggaggaaaatgtataacctgatttgtattatgaaacaattctcaagtatatgagcttttgattcaacaaccattggagctcaatttgactattggctctgacaatcaaatcaaaagaagaaaaagaaaaataacgaattaacgaatttatacctcaatatctgacagggatgctgcatctgtaccatagaaactatcttgaatttccttttaaaaaaaatgtaaaccaaccatcttctgtgcttctaaaaaaaattcacaggtaaagacagaggccctcatatgttgggacaccaaaactcttaaaactttgtatgttcaaaccatcacgagggaatactcaacttcttcgaccttgtatagatgtagtgtatgttgtgagctgcagtcttccaatgaatagcagctaccactaaaagcaataacattataagttgtatattcaactttgtgctctcatcactcactttagtcactctcttcgagctgtggtcgtcttcaaacttcgtctatgtgtctgtacaaactttgagtttgtaactggttcttgagacttgttacatatgcaaccaggaaaagggtttgcataaaagttctcctctaaccttggtgactctccaatctgtctcagatatggtgcaccaagtctgtatgaatgtagactcttaacctcagacgaaaactcgtcccatgataaattatgctcatctaactgatcaatcagtttaacaaaactttgcctggagaaaggaaaagagtacagaagaacatgttaaggaggaggttagaatgttcaacaacaggttcatacaacttcaaactatgcttaatatgaatgctagtagtgttttattacctatcagggttgatagtcttcttaaatccatcgaatctcctatggccctgaaccgcctttgccatgtttccatcataggtgtaaacaaagacatcactatcaagtgccacgatatagtccaatgcagcaagtcgattttggtaaggcttgaaaggctctaactcttcttctgttgcaagagtggagtgagagaagacattagggtactctgcccgaaaggctgccatgctattgctgccatagatctctcctgcaacaatgtagatggttgtggtggaaggatatcccatggctttgaggaacatggctgcttctcttggtgacatgggacatcctccttggagtctccgttctatgctgtcaatctctttctctttccaatgcttgacattatacctcatagcccgaagctcttcaccttcgtctgaggtaaggttatggctgcagcctgtgaatgctagcatgtctttctcgtatctgcaacaaagatatgtatgctttgattaaaccgacaatgcatggaccagaaaaggaaacattcagccatggaaagaaaattaccttaaatgcacagcaacgtattgctcgctgttgttcctaagcctatcaaccaaaactttccccagatcctcaatatccttcgagtaccgaagcgcctcataattggcacgacatctaagcctttgaattgaggatgcaaggccattgttagcaaggcgggaatcagtatgagtgaactttaccactttgtaacgcttaagcaatggaatcatttcgttcctgtaatagctaggctgcatttttttaaaagcatcttagatacaattcaagggaaaagattatgttgtttagttaaaaaagtgtcttataattttcataccttagaccaggaaacaggggccttaagtaagggcttcatggatgcatagtgtgaaggcaaatattcaactattgctatatcatctttcagaacttccatgaagtgtctccagtcaaatatgtccttaaattcactgaaattagaaatgtgaatcaatatatgttgaaaataaaactatttacacttaatatctcaaaatccaaaaaaagctaagaatcaaaccttggatcagtccaaaatgactcatgatcaagagaaggaagaacaagagtagcattcataatctttgcaacagcaaccatgtcacaaatctgcaactcatttatggcaaaagttagttaactcaaaaaaaaaaaaagtacactcagaagtttcaataaataagaagcaattt

SEQ ID NO: 224833 - DNA, 3914 bp, Cannabis indica
tctgacacgaaaaacattaggcatcagattcaagacttgaacacatttcttaaactaagattcccgcctaatcctacaaatatttcgggaccagaaaactattgcaattgctatagtggtgctcaagagagactcgaatcacagaatgcacatgagaaagaataagaagaatttcaacaactaacagttgctctttatgtttacagatgcaaatattattgacaaagacaatcaaatgctcgagatacaaccgaccaaccaaagtattactcactcaccacatcttttgaaacttctctgggtgcaccgatgatgacttcatcaacatagcgacaagctagaacgctgagactgcgttcgtgtaaatgcatgattggatggtggttctttctgttttcactgcatgcaatatcattaaaaccatgtcatttgaaagactaaataatctttatatttgtaggaatagcggacaaagcttcatgatttcgggaaagagcatacctcacagtctggtcatcatgaataccgaccaacaaaaagtctccaagttgcctggcactctttaggatctgaatgaaaaataacagtcaatacaagttttgaagagttgttttctccatgatctgtaattatgttgacttaatacaagagtgtaggcccttagtctcacattacaaaggataatcatatttagtgatgtgggttattttagagtttatgagattagtgaacaatcactaaagtagtaagccatttagaactaagtaacgaccgagatggggttttgaattgaatttgatttcttcatatcaaactagcaatatgttgacttttgcatactgcaaccaaatggatgacaagaaaagaaaagaataaaatataaaaaaccatacctcaacatgtcctgcatgaaaaaggtcaaatgctccatcaatgtacacaacacgagcattcggtccaggtccctaaaagcaaataagataaatgtcatcaaacaacttgatcttatggaataatcaaacatatgatcaaattgttttggaatatctaaaactaacatatgaccacacttataatgagtatggcaagttttatctatacaataaaagcataaaaacactattacattactaaactgaatgaacataccttcccattagagaattgaacaattcgacgagatgttggtagaaactgagataaatgggtggccttgaactgttgttctttatgcgaatctcctttcaaatgggtactgttatgatcttcagtttcttgcttatccctcgaacaagaaagtatccttcctacacgaattttatagaaagattttaagatgcaaaatttaactaagtataaagcattcacactgtgcatgcgcctccataatgaagaacgaagaacgaaggagcttcttaaatcaacttgaaataatggttctaagaggggtaaagagaatcatagtacctacaatatctgtgctggagacgccttcggtacgtttaatctgcttgtaacgaccagctttctttgccaaggcataagcatcagttccatctggaagcaagcaaggatcatccccatgtatgatatagtcaatcttatgctcattaaagagtctattcatgaactgctcggtaattgcataaggagcgttggctatgacttcgtccacccattttaatccgctaacaagaaccaacctagaaagaacttcaaaattagttccaagaaagactaaagaacacttagcagcaaagtcaacaagcaataacagcaaaattttcatattattgtaataaaagcaaccgagtaagacaactttgagcacactttcaaggcatattacaaaatatataacttaagcttgttttgtaaaaatggggaactgaaatggacaattcaaattatgttaacaataaagtcaaagtcaagtcaatggacaaaataaaactaacaaatgtatgaacaactacctctcttccatggatagaacagggggacccttattggcaataatctcctcatcactgacaacaccgacaactaactcatcacccaaagctttggcttgccttaaggcattggcatgaccataatgcatgagatcaaaacaaccatccatataaacccgaatgcgcttcttttcacgtttcttcttatagaaaactcccatatcagaccacaagtatggcaaatgaggaaccccaattccgccgaaatagcttgttgataatcccaacaaagcagctgtaagcattagaccaccaaagagatgtgggaagttgtaaaccccatccaatatccaattgttgctctcatagtccatggttccacaagagccttgggagtgaagagggagacacagaattctgaagagaaaagaaaaacaagttataatttgtgagaaacaaaatgaatcatcatagctttgttcaaacccaatttcacttttgcatagaaagattttatcttaattaataccaacaacaacaataacaattgatcaaattgaactaattcgatctaaagatgaaagaacatcatataaagaaaacgataaaaaaggagacaaaacaaacgatatttcagatctgaaaagatgggtagaacagaattcattggccaaacattacccatatcataaaaacaagaatagtaaaagacaacaacttcgtaaaacacaatgaaggggcattaattaaacgaacatggtaagcaatttccaacattttcaatacaaaaaaacccaaatgaaagctctgaattctatgaatctgaaacaaccccataaataaatctacctcaaagtttacttctttttccctgaaaactagaaccaagcaaaaaaagttgctaatcccagaaaccaaaaatcagaacaatgaaaaagatggtacctttttagattattaacataataataacatgaaataatgtgaatctgaaaaagcagtaaaatgggaaaaagaaagataagggaaaagggggaatagtaagaaagaaagttcgtatctttcttacctattaagctttgttctcgtttgcgtctcctccttcactctttttttctctgtggcaggccttaattttggaagaagcctttcttaacttgacatataccaccaccaccaccatctccattcttgccctctttatatatatattgctataatttaattttatatatttattaaaattttgatttaattttgatttaattaaatttggatttttgcctccaaatataaacatgtacaaaattatgtccctgaatttttaaaggtcgttaaaaatcttctatgaattattgagattgttggatttgagaacttttatccaattgtggtaaagaaagtctaatgttgatgaaaattcaagaggtataatttggtaaatatcaaagtctcaaaggcataatttggtaaatacttaaatctggagagcatgatttagtacataaacaatcactgaattagtaaaattgaataaaattagacaaaagtgcttaaattcaataatctcaatagttcatcaaaaacttttaattgtccaaaaaattcagaagacatgatttgatatatgtcagagtttaggggataaaaatcataattaacctttaattaataaataatagagaatttcatttatacctcacaaaattataattatataccacctctattgtgtggtgtacttataaggattgtctttaccaacatctttacttatttgggtcaaaggttcgaaaccatcacgtcatcccctttattcacataaaaaaaattataaatatactctaatattgaaaaaaaataatgataaacataaaataaattttaaaattagttttactatttttttaaaaatttctttcttacattatgttagtttcaatacttattttaaattta

SEQ ID NO: 224834 - DNA, 8010 bp, Cannabis indica
gaggctttgctttattgtggaatgagggtgtggatttggaattgataaaagttagtaatggaatttttcaagtgctaattaaagaacctttactgaaggttcattggatgttgtttacggtgtatgggagaccgtatgaaactgaaaaacaattattctcggaagagttggaaaaaaggatcaataaagttcgaattccctgggtggtgattggtgatcttaatgtgattgtgcatccttgggagaagagtggtggtagaagagtaactgctcgggacacttggatctttacaaacttcttgcagaatacagggggagttgatcttgggtttcatggttgcaagtttacatggcaaaataacagatttctgagtgctttgactagggagagattagaccgtgcaatggttttgggggattggatcacatcttttcttgaggctaaagtcactaatgctccaatctccgtatcggatcatggatatgtgcttctggacactgtcgggggaaggaagagggggtttaaaccatttcggttttttgaagcttggtctcgggatcaatcgtgtgaggatattataaaaggtgcgtggagattgatgagagttaggggtaagaatgtgtgtggaagactgaatgatacaaggattgctttacaaaaatggaaaaaagatatattcggggagtgcgatacgatgattaaagcagctgaggagagactaggatggattcaaggccagacttcgaatgcatctctgttgattgaggaaccggaattacaatccaaaatttctgagctttggattcgaaaagagtctatgtggaggcaaaggtctagggagatttggttgaaagtaggcgatcgaaactcaaagttcttccatgcgtctacaataattcggaggagaaggaatgaaattctgcggtgaaaaataataggggtggttgggaaacgagtgagaggcagattgggaatgtgtttaatgagttcgttagtgacctttacaattctcaagggacgagtctggatggagatttctatgatcttctttccccaaccatttcagatgaggagaacagaatgatgaaaagtgttcctacgactgaggaaatatggaatgtggtggctaccatgcatcctttgaaggccccgggtcccgatgggatgcccggttttttctatagaagatattggaatgtagtggggagtgaagtgattgaaatggtccaagacttcttccaatctgggcggctggagagacatgtaaattatacctatatttgcttgatcccgaaagatgaaaatgcgagaacggtggataaattcatacccataagtctttgcaattttgcttacaaaattatccctaagatatttgcgactagactgagggaggttatcgacaagttgatatccccgttccaatcgacttttgttccgggaagatggattgcggagtcgtccattctcactcaagaattggtccacacgataaagaggaagaaaggaaagggtggtcttatggaaattaagctagatatgctcaaagcgtatgatataatcgaatggaactttcttcaagaggtgcttaaaggtcacgactttgaccagcaagtttgtgatctaataatggaatgtgtacaaccggtctcctactcggtgttaatcaatggtgtaccgcaaaaaaaattctttccaaaaaggggattacgccagggcgacccgttgtctccctttctgttcttgctttgccatgatgttctatccaaattaatcatcaagcaacaagcaagaggccggtttcatggaatctcaatttcaaggtcggcccagcaatatctcacttgatgttcgcggacgatacaatcctgttcaccggtgctaatgtgagtatggcgtccaaaattttggactgtgttcataagtatgagctttggtctggtcaacaatgcagcttggtgaaatccagtgtcctcttttcgaagaatgtggaaacccccttgaagaccaatattctgaatgtgttgaaagttaaggagtgcgatggtaatgaaaagcatttggggaacccctttgtattcaaaaggaaaaaaagagacgaatatatgtttttgaaagaaaaggtgttgaagcggattgaaggctggaaaacaaagttgttatcgtttgcggggcgtaccaccttggttaaattggtggcactttcgattctgttgtacgcgatgtccacaaacaggttgcctctatctacttctcgggaccttgacaaggttattaggagattttggtggactggggactcggaaaaggagcgattcatggcccttgtggggtggggaaagctctgttctcgcattatgcaaggaggtttggggtttaggaagatggaggatatgaataaggcactacttgctaaattggcttggcagatggcatcgaattttaatagaccgtgggtcaaatgtctctcggagaagtattgcaagaaggattcattttggagtatacaagccagagataacgattcggccttttggaaaggcattcttggttctgctgatattattcgcaaaggagccatgacactagttggtaggggggacacgatcgacatatggaagcagccatggattccatggcttgactactgtgacttcctaaacctcatgaatcaagttaggccgagatttcctaaccttcggtccattgctgatattactctggataatggtaattggaatatgactcttcttaaggagatgtttggtgattcggtgggtgacagaattggtagaattgctcgtttaccgcttgacaacagggacgtggtggtgtggaaagaggcaaatgatggaatgttcaccgtgaagagagggtttgaagcgtctcaaggtaatgggcagagagtagagagtaaactgtggaagaaaatttggagctcaagtgtgcatttcagacactcgatcatgttatggagagtgatttcggattgtcttccaactagagagagattagttttcttgcaggataaaacttggtctatgtgtggggaagcaaccaaatccaatacgcatattttttgggactgtccttgtgcacgggcactctggtttagtagccccttctccattcggggagggattggatttgattggtcaattaaggatagattagagtggctgctggacagaacccgagtgagcattctgctagctttctttccttcgtgggctgtctattcaaaggaatatggaaggctagaaatgagcttctcttcaaagggggcgtggtgaacatccagcagattagaaactccattatgagacgatactcggagtccttcctatcaatggaggcggatgcggctttagatgcaacaacgcccggtgttgttagtaggcaaacaatctgcaataacgtggaagtgttctgtgtctccgatgcgtcgtggaaggaggataaggcaggcctcgcggttggtttgttggatagacaacgcaacaaaacggagtggtttgcaaagcaggtggcggcctcctccgcggctgaggttgagttgttagcaatccaatgggcgatgcagcttgcggttcagagaggatttaagaattatgctgctgcttcggatgcaaaagttttaattgatgctttgaagaaacgaagatgcccccctagttggcagttgaaacctctggcttcggaggtactgaatctttttaagttgtttgatgattgtaatttcttttttatttctcgtagagacaatgttgcttgtgatgatttagcaaaatgggctagacggaatagtcagattagtcagtgtaatggctacatttttagggagggatcccctattgtgattcccaacttttctttgcaatgaactccctttagttctttcaaaaaaaagtaaaagcaatacttactacagtaaaatgtaatttgtctctcaaagtaagatgaagttttacatcacaccccttatatacccttatatataaagtcagataatattaatattataataaaaagtacaataatctataatggcacactatatacagtgagacactgtagcaaaagcgtgggataaaatttgccttctaaaattccttgggggtttggatttcaaaaaatctagagaaatgaaccatgccttcttggctaagtaggggtgaaacatccttaatggtagtcaatttctatgttgtagggtgcttgaagcgaaatatctcaaaggaaaagagttctttaactgtggttattaagactctaactcttggttttgaaaaaacattgttaaaaccaagtccatcttaaaaaaaaaggtgcttgcaaattggtggcggatgggaggaatacactaatttgggaggaaccttggatccctcacatgaagaatttcttccttaagcccaatggttctcctgctagggaccacaaatttgttacggagttgttttctacagatggtggatgggatatccacaagttgaattacctttttgatcatgagactgtttctgcaattttaagagatggtgctccctctagcacgggtcaagataagtggatgcggactcttgaaagggatggtcggttctcttgcaaatttgttaatcttactcaggccttgaaaagagctacccattgtgaggttgctccctcgctttggaataaactttggagcagtaatgttttggagcaacataaggttctttggtggtgcattctctccagcgccctccctgtcaagtctatgattaggaaaagatttcacattgaggatgagagatgccctttgtgtggaagagatgaggaaactatggagcacttatttcttacttgtgatgtggctttctatgcctggcgatcttctcattggggtatttattcgatctgtgacaccggtatctgtatgtgggactgggtcaaattcatttgggacatgaaacacaaggggattgctgtggaggaagttttcctgtatgtgtctcttgtggtcgacaccatctggctcactcgaaatgagaaggtacataataatcttaccttagatgttaagaagtgtattgactttattcgattttcttttgcagatgtacatgctactattttcccttctcctgtcccttgcttgaaggagagctagtctcccactctcaggattagatcaaactgaattgcgatgttaaagtggggcttgatagcatgtgtatagcagctgtagccaggaaccatcttggtagggtagttcgggttcatacgtctagtcttgacttttctgatgcgctttattttctaatgtatcttctctaatattagcaggacttgtaattttattgcccataatgtagctaagtaggcgtttacccacaagatatttggtgacattccgctatctaccatcccgataaacatattatgtaatgaccgtgaagtctaactgttctatttatcaaattacgcttttctctttaaaaaaaaaataaaaaaaaaagacactgtagcaaaacaaccaaaaaaatatatattttatattataatgttcagttggagataaattatacactatatatagtatactagtgataactttctaaaccatttatttttgtttatgtatgctaaataagtctcatgatattttgatagcaaaaatgctgaaagtggtagaccaaattcttgactatgaacattagatagtcttgcccacacagcaagagaagcaagcaatacaattatcactacaagaaataaagaaataaacttaggtgggcataataaaaatacaaaatagatcatgagccccaaacctttagaagggatttcgtttcaaaagccttaattactactatggagccagatttaattgtcacttgtttcctatcttttgaaagagctgtctcaagagataacctaactgcaagtaacttggcttctaaagctcctatgaattgaatccacctccaaaccctttatgttcaatctcaattgaaatcttcagttccatagttttccttgaactcctatgttgtaagactattaacaaatattactatccaattagaagttaaaaatgtcattatcaacttaaattttaaagcttaatcttaaaattagcatggataaaatatataaatgcatagtataaattttaaaaaatatcacaagaaagcgaccagaggacataaatatatcaaataatagaaaattttaaaactacctgaatttcactctgaaagtgacatgttattacattattagagttcgaaataatatacaaaaggcaagatcttcacctttttcatgttggagctctttgcaacttctacgattttgaagcgtaattcttctatgcttctacaaaatgttagttattctaagtaaatcacgaagatatataaatagttttttcaatttttcagtagatctgtcatagctcaaaaacaaatagttcatgacccaatattattgtttagtgttaacaaaataaaatttctatagtaggaaagtaaaacaaaaatagtagaagtagcaatgtatataatttaggaaggaaaggacttatatataatatatataattttataaggcaagatcttaaaaagccaagacaacaataatgtaatcacataaattggaccaagtggaatcgtacttttacataagtagcagtattaatataatcaacttaagtattagaaaagtgtaattacatatgctttatagagatctacctatgaaaataaaagccaaacattaaatgaataaactcacttcttgtatgcaatatccataaacttgttccttcttttgaacaagtgattgttattatacttcctggattggggaagagccaatccagcccacaagcactagcttcatatcataccaaataagcaacctacaaaattaatacaaacttatagcatattgaccaatgtatattataagtgtcacattatgtataaatgtggatgtttgtaaatagatcattggcaatttgaacaaattcaatcacataggattttgaacaaaaaaaaatactaatttaaatttttacacatacataaatgtgaaagaggcagaacgatgcaactcaatcttccatttactactcttaaggaaagagctgaagattatattcaataataagcacaacaaaacaatgctgagtatgtatctattctattaagatgaataagagactaaaataattcataattttatgacatattactataataacttgtagtgtcgagaaataaattgttgataagaagaaaatttttatcagagacatagcaaatcaatatattatatagaattctgcaaatatatatatattatatagaattgtgaacaataaatggtttggatgaagaattctttagaaaattatgtttaagtggtcatgttcagcaatcacttatattaagaataagttacaaatttataaaaataaatttaaaatatgtacattcttaataaaattcttctctcttcaatcataatatacaatatcccaaaatctttgaggtaaatctttctagtttaattattttctcaatttttctttaaaatcaaaattttcatagtttattaatcaatttcttaatggaatagggatgaatgaataagttctcttgaatttggtggaattttttgcagattatatcaggaaaacaaagaatctaaagcaagaacaaactcagtgggacatttctacaaacacttgagtgaataaaaaaaatgtcaaagtacgaacataaattcattgaaagcgaatctaaaacaaagaaattgtaaataaaaacaaaaggaattagtgtgtactgtagatgaagaaagaatcttgaaaggggtcgtctttaactcccaacttctcaatgaacgacattactgttactggttggaaatgaggagcttcccatggatggagagccaaagctagtcaaaataatcaataacctaaataatctgaataagcctgaagtggtgaggat

SEQ ID NO: 224835 - DNA, 6919 bp, Cannabis indica
gagattcttgaacaaaaaaaaaaaaaactaaactttgggcatcccgttaaagtgggcacaatgcaaaatgcacaatccttctaaactaataatcatttatggtaaaaaaaaaatcaaataatcagtttaacaaagaaaaataagattatcatataacaaatatttccaatggtatgcatactagaactatgtaatagatcatacatgtctacacaatagcgtgacattataaaattttgttcagataatttgattcaactgtcaaaactcctcctcttttctcacttaattttatgttcatttatacaatttaagaaacaaatcgaaaagatagaatcctgactcctgagactcacttttcttgtccttaaaaaacaaaatcacttttaaaaatgaaaatcttaaaactctgcccaaatgtaaaaaatatatattatatatcttaaaactaattattcatttaattttagtaaaaatataataataataataatatatcatcaacgctaaataattttccaataaataaaagtaagggaagaaaattcaacaattttaaccttacattcccaagacatttttggggggataaaaatcaggaccaaaaacaaattgattgacaataacattttcaggggaatataaaagggaaaaaaattcccaaaaaaaaggaaagaaaataagaaaaagaaataaaagttctattaattactatcggtttgattcaataaaaacatatgaagaaaaagcacaagtagatttctcagatcttcacctcaaaaataaatgaaaaaataaaaccaaatcagatagcctaagaaacttgggattgcactcaatgcattggctatgattgtaagtgcttattcagcgattcaatacaatattaaaatcaacaaaaaaaaaaataagagaagagtgagtaatgagatacctcagtaagttcaagatcatccttgtccgctgaatcgctaccacatgtaataattttgaaacaagaagtggtagatttccccattctcttactcacagactcacagtcttcctcctcactgtgtgtgtgtgtttcactctctctctctcactcagtcgcggacacagacaaaagcgtctatgtaggtgttggaaattggaaacattagttaagaaataagaagccggacctcaacaaactccttaaatccgctttactttattttgctttggaatccgccatttatgaaccccgttccgtttattcaactccacggccacagacaaatatttttaaccaaaaaaaaaaaagctgtcagatctcttccttcttttttaattattattcttcttatccaaccgttgattcatccacaatacgagaaataatcaaaatatcgagatgatattttactttaattaattttgtgctaaccactactttgagtttatccattgtctcaattttttgtctcagccacctacaatgatgtttactttataattcgaccaagtttttttttataattctaactgttaagaatattatatcactttaattacaacaatatttcataaaaaaataatacatggaattcaatacttaccaatagagatataacaaaaatattaaatatcactaatttttttagcaagttttttagattaattacatattattagtataaaaactgtataatttaaatgtgttttcaattatttattatattacttttttttatatttatgtatcacattttgttgccatatcttcaaagaataaaccatagtgtcatatttgacgatgccaatttttagtacaaaataataaaatatataaaatatttggattatgtaacatgttcatggagatcaatcaacaaataatctttaaaatgtattacttataattatgttttaaaactcaaaatggcctattttattggaataagagacaagaaaaagaaaaaggatagtagataatatttgttttattggggtcatgataagaatgattaatgaattatagttggtgtaattgagaacttgagatcaaactatgactcattggccccctaattattgaataatcactgtgttttgataacgaaagaaaacttatatactcaatttaatactttcttctcaactaaaaaagtaacatgtcaatcgtttctaaaccaaaaaaaaaaaatgatttagattcagtgcatttgacaatatggtagcgtttgtttaccaaacaaaagtattaataaacgaaaacaaacccaaccaaattattgtcttctctgctaactaaataatgagagattattttatacaaaacaaaaaaaaaattaataatgagaaactataaacacctaaggaaaacaaaaagtggtatataatttcattaaatttaattaaatcacatcatcagtaaagtttactacattcttttctcacgaactattcttattgagaaattgattttgtttcttcttcccttttctttttcttaatactacacatttgaagaaaggaacataaaggtatcatcaacaaaattgggtccaattcagcaaaatgatgtaaattgggccaatatggagatgtggggtaggttaaaaaaatggaataattatataaggcaccattttttgtaaaatattttacattttttcgtttaagattttttatatttttacggttttcaaaaaataacacgaaaacaacataaaaatcaaacaaaaaaataatataaaagtaacatcaaaataacatcaaaataacaacaaaaaataacatacatataacaaaaaattaacaacaaatgaacaaaatttcaacataaaaagaccgtattttatgtaaataaaaccaaaaaaatcgtaaaaatatttaaaattccgtgaaaccgtatttttgttgtttttttttgtgcatttgtgaaattaaccctaaaaaaattatacatatacttcttttaatttgtactttctcttttaaaatctattatgtttattttttttttaatcattataccaattttatccataccactttatgataatttttattattctctaatcaaaattatggccaaatctttccacaaacctacacatctttttacaaaaaatataaatctaagtgtgtgagaataatttaatgtacaatactcataaaaaaaattgtatatttaaatgaaatttcatctgaagataaatttaataatgtataagaaaagaaaaatatttttcaacttcagttttcatgtgagtgagaagattatgatttgatgaataaaataaaagcattattgttttgtagtgcctctgtgtgtttgtattatcaatatataaatgagagatattagtgatgataaaatattttgaaatttctttaaataataatattattattttttaatttttattaaattataaatattaatttgtataaaatatatatctaatttcattattttttttttatttttggcactgtgcttctaggtaatgtttgtattatttaacataaatctcatataaaatcatatatacagcaaaatttttattattgggcactagtgtttaatgtcatggtgtgcagtctaactagttagttcgcaataatgtatattagttgttaaattaaattatttttatgctaatattaattatataatactttgaatagtaataataggatcagctctaatgtaagataagttaggtgtatgattttagttatcgaaattgtgaacaacaaaattatgagtatgaaataataagaatacataataaaatataatttagtgcagtaagagaaaatattattttaagctaagaggtttcaatctctattttttcaaaaaaaaaaaatatatttaatgtgcattcatagaggatagaactttgaaactgttttaaaaaatttactgctacaccaaaataccaacgctattgatttaacagtaattaaacaacattaaaattttatcttatttcacacatattttaggattggccttgagtaccacgccccaataagttttagcatttgtgttagtatatttagtattaaaagtaaagttaattaggatttttgattttgaactttgacatgtattaaaatttttattaaattattttattaaaattagataaaagcccttaaatttaataattttaataatttataaataatttaatacatgtcaaaattatcaaaataataatgatacatgtacggatataatattttcttttttgtggatacacatagacgaactcttctcatactccaaaggagagagagtgttaataagggaaacaaagaaaaaaaggaggttgtcgagtatctctctaacaaataattgggtctttcttttgtaataatagttaccgctaacctaccccatctgttgacagctctttcgtccttctgagacacgtggatgaccgtctagaatgacacgtaagcagcacatgggatacctgctccacaaggcgtgccatgtttgagacctgcaatccgcaagtgggttgccatgaccctcaccctctcatgtgccacccaatcattactattatcgttcatgcaacgacatgtcgtttatcttgagtaagccgagggcttctaatcattactaatggtcctaaataaccaaaacatctattttaaagagtctacaataattttttttctcttatttttagggacacaacgtatacaattttagtagcttaactttaaacgcataacaaattgtgtcctctaagttttgttttgtaagagaagaatattacgaagaaacctttggatagttctctctctagaaacacaatgctagagttatcgatgtttcttttcgtggctcacttgcgtcgtcatcgtcattcattggcgttcttatccgttcgaagtcttttacacctagtggcaattccctatggttacttcctcacactttaacgacatggaatgcagttaacaaacagcggcaagcctttattgagaaataggcaaacatagaatggtgatgatgtgttaactgtgagggtctactattctgcagtgtactgcagcacactgaaacaaaggaagatttgattccctgaataattctgttaggattttgtaccgtgtgcaatcattggaaaagttggtaggactagaatattctctagggattcattttatttgacaactgtaaaagagccgttggctcttcccttccttgtatctgtaatatccatattcactataaatagaacatagcagctcgcgattgaattgagctcattttcatcaaaacttttcctctgttattttaacttggtatcagagccaactctacgcctctgccatggcaactcctggtgatgaaaatactccttctgttagcacagaaggtgcttctgcaatccagggaactcagcctactagaaatggagcctcctcttcccaaaacactaatccatacccaaatcaactcacaaccctcaaccaaccattctcccttaagcttgatcgaaacaactacaccctatggaagaccatggtgtctgccatcgtccgtggacatagactacatgggtatctcacaggcgcaaaagagtgcccaccagagtttctacctcttggtgaaccagatgaaactggtcgcgttgaagtcgttgttaaccctgagtttgagcactgaataataaatgaccagttgctcttaggatggctttacagctccatgacagagagcattgccactgaggttatgggctcagcctcatccggggagttgtggcctgccttggaaagtttatatggtgcttattcgaagtccaagatggatgacacccgcaccttgatccaaacagttagaaaagggtctacacccatgactgagtatctcagacagaagaaaaattgggcagacatgttagccattgctggagatccttaccctgaggcacatcttgttgtcaatatgctgtcagggcttgatgctgagtatttgtcgatagtggttcaaatcgaagctagagccaaaaccacatggcaagagctctaagacattcttctgagcttcgatagcaagatcgagaggctctaaacgctcaactcaggtggaaaaactagtcttgtctgtgtgatatgattttgatttgcatgttttgtctcgttgttagtttttttttgttctttgatgacttgccatcaaatctatgttagtggttgagaataacaagttctctatgactaaaggacttgttagtagtgcagttacgtaccttgtacaataattgagtgctcaaactacgaggttgaatgaacctactgcaacaatttctattgttgtgtcttctgaatagtggatgaaactgaatatgtgtgttcttaaggttaacagtgattatacaaccttttttcatatgattttattttgaatttttttgttaaacgatctgggaattaggcggctaattatttgactcgtttttttaattctaatcttggtcgagtctccaactggggagatgtctcgattgaatggtaaactattattttagctgattgttatcaatagaattttataatttattaaaaatatatataccttaaaaaatattgaaaaatattaaaaaaaattaatgattaatgtaaaagtttgataaaaaataaaagggtaaattgcggcataaatacttaatgttttcgattttatacacttaaatacctaatgtttatttttggtggcaaaaatacccaatgttacaattctcttacactgttactaccacttccgttattaactcataaatatagacacgtggagggccaaaaagcattacatttatttattttattttaaaatttaatattcttaatataaaaaattaaatattacttgttttttaaaaaaaaataagagaaaagcaatactaaattaccataggtg

SEQ ID NO: 224836 - DNA, 4888 bp, Cannabis indica
ttataaaatatgctttaaataatcacaattaaatatcgggggtattacacctatccgctccttatgaaaatttcatcctcgatatgtacttgaataacctgggatactactctcgcatatgcgactctaactcctaattctcttcctctaccttgcagtttctccacgacactttaactaacggaatcatcttgttctgcaagtcttcctctttcttatcaaatctccaaattccttacaaaggtacaacttaaagaaaaacaaagtgcccaatcagaactctaaatattacgcttcagattagtgtagcttttctgtctatcttgtgaaacgagcatacaagctataattttttctattactttactagtatcctggaccgcttcgggtcaaaggtatcttctttcacccacttcatcctaatggatgggtaatctaccccttttcccgtacaatatttcatatggtatcataccaccgataacctaacaactgttttgtataaaatctcaaccaaagagagatatctattccaggacccttcaagtttaacacacatgctcataacatatctttaaatatctggatggttctcttggactatccatcagtctgaggatgaaaagcagtgctaaacttcagcttagtacccgaaaccctttgtaaactcccccaaaacttggaggtaaacttagaatcacgatctaagataatcaattttggaacatcccaaagtcgaactatctctttagtgtacaaggctgcaaattgatccattgtgtatgtcatccacactcacaggaagtgcgctgacttagtatatctatccactatcaaccaaatggaatcatacaacctcattgtctttggtacctagccacaaaatccatggttatatcttccaattaccactcaggaatcttccaaggctgaagtaatcccgctggcctttgatgctctaccttaactcactgcaagttaaacattttgatacatatccgaccacatcactttttattcctggccatcaatatagtgatttaacatcgtgatacatcttcgtcgttcctgggtgtaacgaatatggtatagtgtgagacttatccagaatctatcgcttaggtatatcattaggtgaaacacaaaatctattgttacctcaataattcagtaacactgagaagtccttcgttgtaccaaccttgaacttttccttatgttctatcaataccaattcactttgttgtgctatctaaattcagtccaataagtctgactgtagggtgatgttagccaatctctcgactagaaactcgattccagctctagtcatatctttcaccaacttcaaggatatttgcttcagttcatagaattgacctgagcctttccaacttagggcatcaaccactacatttgctttccaagtgtggttgataatcccacagtcttaatcctttagtaactctaaccatcgacactacctcatattcaaatctttctgtatgaaaaagtacttaaggcctttatggtcggtgtagttctcacacttttctccgcataggtaatggtgctaaacttccaaggcaacaccactgctgccaatacaatttcattaggggtataatgttgttcataatctttcaattgcctagatgcatagacaatgacccttttcatattgcatataaaacataacctagccctagttttcaaagcatcataataactcacgaacttctcatcattgtttgacaaactcagcattggcactataaacaatctctgtttcaactcttgaaagctattctcataatgtttagtctagataaacttatgattctttcgggttagctctatcaaaggtgtagaaatcttgacaaactcttccactaatctcttgtaatattcagttaattctaagaaacttttgacctcagcggctaacttaggtcttgaccaatctcaatctgcttcaatctttattggatccatcataatcccatgtttactcactacatgtcccaagaaactcacttgaagcaaccagagttcacacttcttaaactttgcataaagttcatgctctcaaagatgttgcagtaccattctagatgtttttcatgtgcttcctccgatcaaaagtaaatcaagatatcatcattccataaatttcattgggtcgttggttaacccaaaagacataaaccagaaacttagaatatctattccgaatacgagatacaatcttgggaatatcctcttcctgaatccttaactagtaataaacagatcgaagattgatcttagagaagatggtctttccctgaagtttatcaaacaaataatatctccttaataaaggatacttttgttaatcgtcaacttatacaactctcggtaaccaacacaaattctcagtgatatgccctttccttaataaataaaactggtgcacccatggctctgcctcgatataaattatatctcaaagtcatcttctcgatttggtggaaccctggtaactcttttggaaacacatccataattcacattctacaagcacactcttgggtcccactagtacctcctttgtggtatcctctatataatcgatacattcttcctatagcaagtctcttactttaaacgctaatatcattagatgtcaggatccttgcacccttcccacatgtatgaacagagtcttactctctagttcaaacatcaccatccttcttttacaatcaatggtagcattatacttggttaaccaattcattcctaatatcacatccaattatgtaatttgttgcctaataaaacaaccaaaattctgttatctaataagataaccaataatcactattactttataaagtaaccaattatctcttgttctcaaataagacaaccatatctaccctaccttctacgtacattgaaagagattaatcccacttattagagatgatcaattctctagtagataacaacttaccatacctgcttaataacacatcacatggcctactatcctaacatagtacatgttcatgctcaactttccctcaagtagtgccttcatgcagctcaaacattctgaataagtcctctaattctcattcctgccttgacagtaatcttgactaccttgaaatttcttgctaaaacttgtagctgaagggtcatttgaatttctgtccttcaatcattggggtcaaaaccccaacccaaactggtactggctgatagtttccataaatctcttctgatgttacttttctttaatagttggtccttaatcaaaggagacaaagtttaagctgctggtttttacagctgctgtagccggtctggtttgcagcatttggcagatgagaaacaaggtcttatggaccaaagaagagcaatcacttacagccctactcaatgagttaaaagctaatttgaaactaagaattgagatgttttggccaaaaatagtctcaaagatagacacacaatggtttcaaaatttgtaaatacattgtcaatgtatagttgttctttattataggcccttattgggtgctattagggtgtaatcaaatgttcttgtgctaatacaattcctgattcatcaaaaaaaatagttggtccttaatctcttacgcgctaagagccaacccaactacttgatcatataaccacacaacccttggtttattatccatcacaatcacatttcgaactacgtggtcctttataccttgaatgaaccttgcctttctcgaggctttagtaggcgctccattaaagacaaactaagtcaagcagtaaacttggtagcacacttgttctctgacatattgaattagccaactatacaaactcatttgcttttgttgcatgtatagattcattatagtgcttctcataaaatatcaaccaaaatatatcctaggtcatggcatccaaaccatgaccctgagactcaaactcccaccataattatgggttttccataaaatagaggtgcacaacccacttgatcattgccctcgactcgcgtaaaatccaaatgaaagtaactacactcatccattattttgccttcagtggatctagaccaccctcgaaatataaaggttttgcttcctgaatcgcccatacaacgactctgaaagggtttccacattctgtagtgaaaccaaagatgtcaaagaaataagttcattaacaagacgagcctactgtcctctcaactctcttatctgctcaaggtactgtcagatagtcttctgtatgttagcgtacatcgcttcccaattcgatggtagtgaaggattctcatcctctcaaccattcccaaacctagggagttcttagttaattctatcaaatcgctttggaggcattgcttaatacctctgcgatcctcaacttacaccgatcgaaattctcgtccaaaataataatgctaaaaataatttgttcttatacattacttaattattaaacacatacttttatcatgcttttctgttaacacacatagtcatggaatactgtaaaacaaaacttagctcatgcttttgaagttttcacattcatatattacaggtaaaaaaatatttattataccatgagttgagcttgtcttcacaactaatgtacatatctagccagtctttaggacttttaaaaccgcggtcgttcttataccatgttgtaataccctaacccgtaggaatgccacatgtgtggttttataaattggtttataaataataaactaacagtttaaataaaattgtaatttaatgaaaacttaactaattattttaaaatataaaattcaagacattttaaactttttacggtcggggatcccctttaaaatttt

SEQ ID NO: 224837 - DNA, 9562 bp, Cannabis indica
taaaataaaaaccgtaactgaccggtcgattataaaattgtaaaaaccgatcataaccgaccgattttcactccttgaaattctaatattgtgtcggtgcttgggagagtaaaacttagcagaagaaacaatgttttgaagattgtgcatagaacctcgaggaccaaggaaatataagaaacaccattgtactccaaactagaggcttcaatgcattgcagagataatagggaaagacatagaagaaattgataatccgatcagatatcctaagagctcttattcatttacactattctactaatcccagtgtctatcaagtttgacagaagtgctggctcgatttatatttatgtttgacaatatactattacttatatcctattttcactgtccttcaacacagtttttagttttccagataaaataatagtaattcatataacaataataataagtaaataagaaagaaagaaaaaatagtcataccatttcttgcaatgttctcccttcaacgaacaaaaaaaccccaccaaggtttgagaccaacctagaagtaacatggaagttagtatacagatgtgaaaaaatgtatcataaataagttaagtaatcccttaaacacttgatcattcatttttatgagataacaagtgttaatagattcagttccctcatttatctcttgtttacattttagaattttacccgaactaaaccaaaaccgaatcatgaaaacattagcacatgagctcattgatagaccatcaatggtcaacattctagtgtgtcatttaaacaagtataatttaaaatctgcagtacccatgaaaaaagtgagtgaattctaaagcatgattcaagagagaaaaaaaaatgctttaccttagctctcttgaaaaatgacacaaagtcatcatctgttaaatgcccaatgcaccactgaacccatatgacatcatatcttcctgcatctggagtaaattcctaaaaccaaagttgagaaatagcaatttgagccttgaggtgcaaagggaatagaaatagaatagaaaaatctagtaagttctgaccattgtcctgttagtttggatattattcattcttttagaatcgagaatatgtggcgtgagcataagaagattggtaagtgtttttctaattgctggaataatactgcagcatcaggtgtggaaggatacaaactcttcttcttctctgtttttttttggcacaaaagggtacaaacttacgagtaagctgaaacacatgcaagattccataaggaggtgtttcaggacttacttcaggaaaagtgaaggcttatgtggtgaatacaagtgctagactatacaccgagaataagctgcagagttattcattggaagtttttaatctcatgaaaacttctaggaagggtttatttatgaaaaataaaaactgtgtgtggaaccgtaaacaaatggcatgttgcgaaattctggttatcatacacttagtataggaacaatttggcgacattgagaaagaagaaacacacaatgtgtggcaagtgcaatgcataagctagtttagagcttggttaaaaaagacatttgaactacttaagataaaggtgccactggaagaactaaagatagaccagagtcagcatactgtgataataaagttgccataaccattagtatcttacagaatcatgtgcatcaaaattgataagctagtgaacagtaggatttgtttaatgttcttagcccaacttgaggggagtataaaataccttgaattagacttgtctaaaccaagtttgatttttatagtttattatttgatcatttcaaattttatttctttgaaaacttaagctggtagataaggttgttgaggaatatcctaaaaaggtttaaaatccagctataactgattagtacactcttgttgggtacttagaaatcaataaaccagtgttttatttgtaaaattgttcacaaatgaattaatttagaagaaacaaatcaacattttatagacctacctaactgcttaatttcatatatgtatgcttcaaaatcaaatgctaaacttatagttaaaggatattcaaacaaataagatggtattttttcttatgatattacaccctaaatcaagaaatgtaagcttaagttatttatatactttaaacgagaaaagattacctgaagaggcacacagaaaaaattagtagccttgttcatatctgcggtcatatgattctcgggagccaagctttctcgggccttctctaagaaatgtgatacaggctcaagaaggtcaacctagtgtccgaaaacatatttgtgttagtcagtagagaaaattattgacatacattcaatgatgcaattccagcaaaagaaaaaatgatgcaaacttaactgaacaagcaaatgttttccataatttctattccttatactataacatattgaatttttagaagattagttcaggactcaaaaggaaatgcttaggaaaatttccatatagttttcgaaatagaaaaactttcacgtagttataccattttgaaacctaccacttgaaaacatattcaacagagatgaaaaggaaaacaaacgaggcaaacaactgaacctacctcattgaagtatcttattaaaagatttttggtgactctcccaactccagagccacaatctgcaatagtttaattttggtatttgtaagatatgagccgacaaaaacaaccaagtacacatacatttgactcgcctaatatgaaaagaaaaaaattatccacaatgtggtaacagaagaacaacactgatttctacaaagaaacaaatttaatacacaattgcataagcatctaaggaagttaacttgggccacttggttaatcttattaagggcttttacattcttaatttgggaacaaaaacgaagttggtaactaagtctcttcacaatgatcaacgtgatacactaaacacattacattgtgtgaatacattctatgaattaaagctcattctacaacaagggtggcaatgtggatcacgacacgcgggtttgacatgaacacaacacgaaaattattgcaagtcgcgttcatgtcagtgttttgtctattttttgtgtcacagatcatgttcatgttgagccatctaaaataaatttaagaactctatatgacacaatgacaataaaaacattaagttaggttgtaacacgccaacacgacacgaaatttatgcgatcctgtttgtttttataaatttttagtataacgggtcgtgttcatgctaccagtttttcagtaaatttaagacctcattacgacacgaacaagaaacaacaacacaagttgccactgctccaaatatttcctgatcaaagtttctttcttcactaaaccattgataaatttgagaacaaacatttttagttttctgttcacagctacatcaaatcaagaaaatctagcttgtacaccattagatcagatatgcttgtattgtatgacaactcagcttatagaacagaaagagagagagagtaccaagagcaacgagatgacgttggttagttgcagcagaagaagcaatggaaaaacgctcagaaaatagagaattgagaaaagcctcactgcccataatgtcagcatcattaacatgcccatatcctcctaacaccccattaacggaggcctccacaccctttaatttttctcagaagcaaaacatcaaacacttgagctgcatatagaatatacccaaaactacaaggaagaacataaaaaataaaagagaagaagactcacttcccaatagccgacgccttggcgataccattcagtctttttggtggaatcaccaacttgatcgttccacatctcatcggcgttcttgaattggcggccgtgggaatctaagccgccaagctccatggatattggagctcttcttcgagttgtgctttttgtgacagtgttgaaagaattgagttgttgttgttgtggtattaatatcattggccaataatattttagcataattgcaaaaattaattagttcattattatattaaaaaattggttttaggaaaagggtgtttttgttttaggaacaaatgttagagtagtttaacatttaagaaaacaaaataaataaatattatgggattttaagagttgttaggttaaatatggtacttttaaatttaatcaatttatatagtttttttttaggtcattttatggtatttgatatgtcatatatatgtaaatgaagttttcaaatgtcatatttaatgtttttatttgtttaagtagttttatttgtcactaataccgaaaaaattatcggagtttgctattggtgctggaaaaattaacagagcagttgtcggtgctgaaaaagtcgttagagttgttgttgacgccggaaagttcatcgaaattagcattgtcgccaaaaaaattactgaaaaaatcaataagaaactggtttcttgatgatttttctggtgacaagccaattctgatgaattttctgacactagcagctactccgacgacttttccggcaccgaaaacaaagttcgaaaaggtcatcgaaattggcatagccgaaaaaattaccaagaaactggtttcttgatgaaaaaaccagtttcttagtgatttttccgacgacaatgctgattctgacgacttttctggcgtcgacagcaactccgacgacttttctgacaccgtcagctactccagcgactttttctgtatcggtagcaaactccaaaaaattcatcgaaattggcattgtcgctaaaaaaataccaagaaaccaatttcttgatgaggaaactagttttttagtaattttttcaataatttttccagcgataatgccaattttgatgatttttccggcgttggtagcaactccgacaattttttcgacaccgacagtaaactctagtgcctttttcggcactattaacaattccgacgatcaatgtagtttcatttattttattttttttttaaaaaaaaaaaatgaaaatttttttaataaaattcaatcacatttattttaaataccatatatttttttggggtaattctcttatttttttttctattttttatataatttatggatgcaaaactcattaatcataatcatattctccccccctaattctaaaaaaaaaaacttgtaattaaacttttggatcaacaaaacttggaatatacaaaagttgaaaaatgaacaaacaaaaacacatcatcatcgtcatcgtcatcatcatcatcatcatcatcatcatcatcaactaaataagaaaaacacaattttctttctttctttctttcgagtctcgatcggaagaaagagagaggagaattgataatggtgttgaacagtagagtggtggcaagagtagcaaatgtatcagcaaatctatggcaatacatagcttgtaacccagaaagactccccagtcaccaagtcttagatatcctcttctgcctccctcttcgccacctccgccgtctagccctttctctcttctctcctccccatcatcgccgccaccatctctgactcatccatctaatcttaatttttcatcaaaaaaaattacttctttttcttttctgtaaaaatatataaaatttgtggctataaatatatataaaaaagaaaatatttacttgggttgtaatataaacacaaggagagttgttatatattgtaaaaatctttacttgggcacaaacaaaaaatgggtattcttaaagctgtggctcttatcaatggaggagataatactaccaccattagaggctctcttcaattcacccaagactccaccaatggttgaattcattcttttctttctttctttctttcatcattttctattgagtctcttttgtttgtttttttgatgatttgattgttttttaatagggcttactcatgtgaaaggaaggataactgggctcaatcctggtcttcatggcttccatattcactcccttggtgataccaccaatggttgcaactccacaggtacacttctcttcttttctttcaattctttgttgatttttaagctcaatttctcaagtcatgtaccaactcatgccgatcaagtttttaaggcagataaaaattctcataagactattgagatggttgaatttaaaaacttttgttctattttactaagaaaaataggcacatgatttggtggatattaaactttgggagtacgatttagtacaagaataattaccgaactagtaaaattaaatggaattgtacaaaaatccttcaatctaacaatttcaataaattcttcctattaatatttaatgatcgttgaattgtgtgtatggtatttgaaatcttgataggaccccattttaatccattgaagaaagatcatggaggtccattagataaggagcgtcatgctggggatttgggtaacattgttgcaggcccagatggtatgtatgaagagtcttatattatcataattataagtattattattatctttatgattgaactttgtagagtgatgataagaatgttctatattactttttgttttttaggtgttgctgaggtttcaataaaggattggcaggtattataaaatgaaatgttttactttgatttttaccttggcattttctttaagttatgattatttggtctttatcttttgttttgattcttcaatttccagattccactcagtggacctgattcaattcttgggagggcagttgttgttcatgctgatcctgatgatcttggtaaaggtaattctcctatttattgataaaactaagctgaatatttatggtgtttttttgcttacatgtttgatccgaatttcggctttaagtacaacactttaaacagatgaaactagaatagaacttgatcaaacagagaattacctttgatctgtaaatcaagcatcatataaaattttggactttctgtattgccaaatggtaggaagctcttaagaaatataatttgctcacaatatacacgagaattcccgatcttttagtctggacaggaagaaacgctcgctttgttgaacctttagttgccacaagtactacaccacagagtagcctttgctttttcttatagtgcatcctctttaggttttgtgacgataagctgaatgaaattttcagcgttaaaccgcctgttttctcctcgtttaactttatacgaaacgaagataatcaatcttgaggcttgctcatataaaaagctttcacatgagttcattagttaaggaaggaacaaagcttatgacttagagtttagtgtgaacttgctcggcatcagctaaagaatattactagttgaatatgtataaggatttgaatgtatagaagataatacatatactaggattcttcattataattcgcagtttgtgatttcaaactccaactaatccagactaaactatttaagaccaaaccaaatgagtccaatgtcaattgtttggtcaattcagatcgtttataattctgtgattcgatcacgattttataattcttgcccgtggttcaaaccaaaccaaattgtctaattcttaatatatacttaatatgattttttttattaaatattgatatttaagaactatcttaggtacaatattgatagttaccttaacattgtgttaagaatatttatttttattgttatttacgttttataagctttaaagtaaaaataattcagtaaaaaaataataaaatattttcgaattacaaaccacgatttcaaattaaaccaatttgttcttaagtggattggtttcgtttggtttgagcatttaattggtctgattccgttttgaattttataaaacttacattactggtttagttcgaaaaaaatgaaaatctggaccaaacccaaaccatgaacactcgtaacatataccatgattaaaggtttggccttttttttttctttttgctcctgaaataataagaagctgcttatctattatgaatgattgctcacatatgtgaatgctcatctatatgaaatcgattttctagttttgtggctaattacaaatgctaacttataggtggacatgaacttagcaagtcaactggaaatgccggagcaagaattggatgcggtatgtatcttcgttgttctcttcgtgttgggttggaaggttttttatttattgtttctcttgtttatcatacatgattagtttgtcatatcagggaatctaaaatgagtgttagaatcttacaatatgggaggtcagattgagactgatataatgttttcctggattaattgattaatcattgtattggtttaaagtactaatgaagtcttgtttcattcctgaactttctcatatattaagaagccttagttcttcaaaattgctctttgtttataattaaaccactttggcagaacttacttccaaaagggtgcccaagtagttataaaataccaacaaatggcatacttaagagtcaatatgggatcctaacactacccaccttttagaacgtacacagcaacccactggttaccatttcctcgacttcggtcctacttgagcgtgcatgactctaataccattagttacccccgaaaaattagcccaagagaggagagtgtccaattagctataaacgactactaaccaatcccatacttagtcaatgtagattcgaatacacccgttgtgctgaagtccattaagttaaaagacggaatagttgactatcttgaaaccttctagcaagtctaaggtcaccaccactcttaagctatggtcattagagatgaaagaaattttgaagatttgaaaagaaaatatacttccctaatagatatttgatatgtaatttcttgatattggtttggtagtaagcacattattgtcattatatattagagagtattactataaaacatcagtggtagctagcaccactacgaggtggcgtcttgcaataaattttgcgtatatgacattttaggtggtggctagggcagtactaatattgttttctcactgtatttgttttttcttttcctttgcaggcattattggacttcaatcatccgtttaagcctttttttagataatatgcatagtttgcataataaattgcttgaatgtatcttgaacatagtataggcttgaatctttgttgaccttttctattctgggtgtttaaggttactgaaaatgagagataatgttaatggtatattagtgtactaagtcaaatggttaaaactcaagatgtaggcaaacaaagacttgatttagttgataattaagaggtaatgagtacacaatctaaacaatacaatagtgaaaattggtaatgagtaatataatgatacctgcactatgaaaattagacctaaaatattatacacaatgacattaaaaaaacagttgaatcccagtatagatctaattgaatttgaaaaaattgacacta

SEQ ID NO: 224838 - DNA, 7542 bp, Cannabis indica
ttagtctaattcaaagatgattaaataacatatgatttctttcaaaaaaaaaaaaataaataaataacatatgatttagggctaaaagatctgaaaagagttagttaatttttataattgtcattcacattgagaaaaagaatagtaattagcattaatagttgataaattaaatcaagattctttttcttaatttctcattcttgattaaacacttttattgtcgaattttatttgattgtatttctttctttatttttatttttatcaaaattatattcagttcaatttgctatgggatcgacttcacctgagtattactagacgccaatcaaactaggctctctcttttctctcttaaaaggttttctttagcctcctcataattagaatttgtgtacatggcgtgttataacgaaaaatctgatttttgttttcagagaacggcccaccatttcctcgtttggcttatgatcaatttagaaaaataaaatattattatagctttaaataaatatatatatgtatataaatgaacgaaaaaacaaaaatcatccacaagattcaaatttaaatttaaaataaaaaagatacactctatatatcagattttttattagatttttatcgtttacattaatagttaattttaaattaaattagaaatagataatatctacgtttcagtttaaataaaaacaataattcgtagaagaaattaatggaaaaataatctcaaagttcctccattaattaattgttgaataagagattgaagttgaagatggccctccaacaacaagttcttacccatcaagatttgctagttgaaattttcatcaaacttaatgatattacatcaataattcgatgtaaatccgtatgtaagatttggttttccactttgaattcaacatattatcgtcacaaaaaactattttatgattatcaatctacagacaatactcctttcactttcatacttaaatacgataacgtgttaaaattagcagaaccatactatgaatatttttccaatgaatcacaaattctccatcacaaacaaactagtactacacatcatcatcattatctcgacttcttaccttatacgtatcttcgtatattagcaacatgcgatgatttggtactaatttcacgtgatagaacactcaagtatttgttgatatgtaatccctttacaaagcagtggattgagcttcctccaatacaagctgaacttccaaatttatgtatcggaagaggtggattaataatcgatcatggtcgccatcatcatcatcagatgatcaacaagatcaggtacaaagttatggtaatatggccacatgattacaataatactactcgtactacacattgttgtgttataacattttgttctgataatgaaaaatggagcactgatcaaccatacttgttttcaatcccttggattgatttcaactttaattctcctgtttcttacaatggtaacttatattttctactcaatcattataataaggattatatttctagaattatttcttttaatctcttcaattatgatcatacaatgttagctcatgatattgttaagtttcctttaagtttcaacaaagggaagcatttttgctatgacagtatggttcgtcttggattagctaaaggtcgattaaggctctcacaaaacaatttagtagctaattcgaacgatatttctttgaaaatctgggaattagatgatgctactaatgactggagtttggtacatgacattaacattagaactacatggagaaatcgactgaagtacatgcttgattttcatcctaacaaccctaatgtggtattcttgttatacaaatcttatcatttatacgaatatgatattgtggaagataaatttcataaggttgctgaatttccttcctcaacgccggtatacaaccaccctcttttgcatccgttttggccaacacacattcccgctcttcgagtgtcctctgcaacaacgaatacctacggtggatgttcgacgcgatgaagccaaaagaacaagattgattcaaaaccaatgatcaacagaatggataattcttttttgtttacattaattttgaaattgtgagcttgcacaagattgttgaaacttatttttctttattttcatttggggttgtttgctttttgaagttagactcttgatatagttttgaagtaaatttttattattattatttttgcaagattacatttttattttcatgtatggagaaaactttagtctaaattcactggcacaaatgcttgagagagctttgaggcaacaactgttgcttacatgaattgcttaagtacatgaagcttctactgctaagcttttggttactcctacacaggggtcaccgaatgtgtttatcgaaacgccaatcttacaactttttgatccaacacaagcctgtgaaaatgttacaaatgtaagtaaaacccgagtttaacaacattaagaaaagaaaatgtgaatagaaaaggtaacacaccttctcaacaatggataatgctttagtgctgctgcatttgccgtggttaaatctcccacaagacccgtgcggtgttccaaaacttgcaaacttgactgaggaaatgacctgattaggcgatggacactcgagcaacaatacaggcgttcttgactggctttttgattctgaatctgagttccacaaatctactggtggtgggtgagattctgaaatgtgtgagcacaaactctcgacctctctcgtggcaaaagatatctgcattggatcacccccgatttcttcgaataatacaagaatgtttccacttggttttaaccatgatcgaggaacatgatatctgtgtaacgaaatggttgtcaggattgaatagtttcattaaattttacctttttcgggtaaatgatatgatagcttgcttacaattgttgagatggtttcccacagttcttgtagcatttgcttgaactgtaaggtcctctgtaatcacaattctctttgcaaccgctatttggagcaaaataactcggccaataccgcccaatgctttgtccattcacccatgcctcgccttttcccattcccgtgaagtctatcgcaacaggactacttccagaaggggcatcaaagcttgtctgaatcaaaatccattgccttcacattagtatataacgaaactcgaaaactctagtaatctacattgccttcaacctttaccttgtaccatgtcaaaaggttgctttttcggcaaggtagactagcgaccacagcgaaagaaatctttactaggaagatttagctcttcaccttttagtccaacctacacaatcataatgttagttcttttgaaggtattttttcccttgttgtaatgaatgaagacttgtttttcactttgataagttccaaagtaacaaagaagactgacctggtatgtccattgcaaagaagagaggtctaccgacgtaccactcttagcgcttctgagctttacagggccggtgattcccgcgccccttgtgtcaaaaaaggctccatagttctgatgtaaagcatatgatattttcttagaaataatcaaacaatatcatagtgcaaagaactatagaggagacaagctttataggattaatcttagtaaaagaagccaaacctgaagcccaactgtacaaactaagaagatcaattgtgttttttccagaaccaaatgtgactgggatctccaatgaaactttggaatttccactgttgcctttgccacttcctaatagttttcaatagtttaacttcagagtaaaattttaacaattcaagaaaaagaaatgcataaccaatttacatattaatgacactaacttttatcaatcacgggatcccatctcaaaatctattagtgatgactgaaataacccatgttcttataaatgactcgataatttctcccgtccaaatggtggcaatatttagctcaccaatcttgaatcaccttatcacaggtaaccatttatcttgtcacttatttgttttggatctcaagtatcttttgcactatgcagatcttgtgtaacttttcattttttttttcacttatgactctgataccatgacaagaatcataatataattatatggcacccaaatgttcagtctttattttccttatgttaccaaagtggctggcatagttcaagaatatgtgtcctctaggagattggtcactgatccatctcttaagcacaaaggttactagataaagaattcaagattccatgttttcaaatgattggaataaaatatatatttttcatacctgcaagttttccattgataaaagcatgaagggcatggccaagcgattccacatgaagatcagtcttcgattcatcgaggtatggctcatcacctttgacatcaacactgcaaaattaaccaataaaaggataaattctcatggaacacaagattagaggttgtaggggaaatcaattgaaattaaatttcaggacatgtaagccataaacttctataccttaaagagtaccataaatagtcactttggtcggcggtagtatttatttgctccaataatccaggtttggtgaatgcatcatcctttgtaataccaacaggctcctttatccagctccatgccgagcctaaggataacgactcatcaacatcggctatcaaagattgacgtgtgaagcttggaatcatcaccatggaattaatctgtcaaaaccaaattttgaacacttagaatatcatcaaatgatcaaggacaaagtagaaaatgattgattatttgaacaaaagacaaactttcaaatggtaaatcactaaagacaactgatgaatttaacaataaaaagttagaaagtgttctaacctttgcggtgttatagacaacattcttgcagtctggtagaatgctgacagaccatgctggcaaattgtatgaattgccattaaaagtcacagtggcagcagagttggtgcctacattagcaagaaaagcaacacattctgaaccagttctatacacagctgcctgaagaatgaagagaaacatgtcaatttttctgaggaagtttaatgacactacatgttggtgaaaagcttgttaaattgattggaaaagtaaggtctaaaggaacaagtttaatgaccctttataagtaagaggcttctacatttcatgcataaaagaattagagatagcttttccatgaccatccacaagaggaagtaacaatcgagttttcgggtggggggactgacagtaagcaagagaattagaaagggttacctccaagtttgagccaagagaactaattgctgggtcagtggccaccagtgctccttcaacttgtttaatgactttatgcagatcttttagatgtccccacttcggttggttaacaagccctgcaacattcatggaaatctttaaattcactcacaattaatgtcagaactagatatattacaaaagcagcaattttagaccccctcaagaaaaatgtatgatgtatcttgtttcaaaagtatggtaaaatatcaaggcaagtgtttctgacactctcataacaactacaccagaggtacaaatagaaatagcttcagaaccaacaaaagagaaaatggcataccatactcgtctaatggggcatcgtaatcataacttgttgaaataaacgggccaccagtagtacggccaaaatttgtccctccatgatactaaacacagcaacaaaaagaaaaatttgatacatcaccatctttctttcctttgctttttcaataaatttcaaaactaaatcatgtgtattgacaaatgcattttcagtaccatgtaatagttttgtaaagttccacctcgttggaaaaatcgagctactgcaaatgccaagtcttgtgctggtctataaggcacagcaccaccgaaagatagaaacctaaagttccaatttccaactaaaatatgagatttttaagcaaaaacaaaaggcaattaaaggagggatgaagcatacataccatccagtccaattctcagtccacattttgggcttgttgtttgaattcggggtgaattgatcacaataaaagccattgcaagtgttaatctgcaagcgcgtggttccaaattagagcaaggagattgaagagagcatgtcgaaaatggggaagaaagtaagaaaagagaaggctcacaatgggatcaggagcatttgcttgctggcacataacccagggaacccctgtatccaaagatatagccatggctgctgaccatttaatgtagggtttggcagcagctccatatcctgactcaatatttccatactcgttttcaatctaacacaatcaaatcaagtaaaacttttcagccaaaatttcgggtgcttctacagtgcatcccttcattattttctgttttcggcatataaactaagagagacacccgttcaacaaactctttgatccttgtttttgacgagttaaactaatccaaatttcacgaaattttccagaatttcttaaataatatctacaatgtacaccatagaatttttccaaaagttcttatcacaatattaagtgaaagtgaaaccaaaaacaagaaaaacaacttttcagccaaaattcaattgttaaaaattctcaagtgaaaccaaaaacaaggaaaagaaccaaacctgagataaaattataggtccaccttgagaagcataaagtttctcttgtttcatcaaatcaacaatcttagccgtaaaccgcttcatttctgcctgaaataaatctttataaatacatttttataataatggattaataaaagagaaaaatattaaaaaaaattgacagtcaaagtatcaaactttaaaaaccttgaaaggttcattatctgatcgcagcacaattcccggtataaaatgcagccaaagaggaaacccactgttcaaaatccaaacaaaaaacacattaaaaaaaaatcaccattgaaattccttcaagctaatttatttgagtaaataaattggatttatttatacccgtaattccactcggcacagacataaggaccaatgcgtagatgaacaaataaaccagcttcagctacagctttcacaaatcgaaccaaatcttttcttccctcgaaatcaaactgtaattttcccaaaaagggtcagaacaaaatcccaaaaagatttcaactttaagtttactgtaacagaggaaattactacaaaagagagttaaaggttcgttttttttcttctttttcctgcattttcccagcagccaaacagaataagtacctggcctcgagttggttcatggatgttccagaaaacgtaggtctcaattacatctaaacctccatctttagatttctgaataaggtctggccacatctgaaaaccagacaaaaagtagtcaaaacacataaagcttcacatagaaagaaaaatgaagagagagagagaga

SEQ ID NO: 224839 - DNA, 8782 bp, Cannabis indica
ctaagatcctggtaaaaaataaagttccaacactataaaaataattagttctagttatttctgctactagcagtctaggttttagagagctagtttttaatctagtttgcatgtggtgggtacgaattggtggaataggaggatcagtatttgtgggaactgatgagacaggcctgagggatggggttctggttcaacaagggaaacggaatgtgattcttgtgttgagatagagggacttcttggaaatgggggatataatggtatagggaatctaggaggaggagaatttgttggagtgacaacaacagtagtggcagggactggtgtaagtttgggagtttgagagatattagagtgttgaataacttgttgaggaggactactagtgggattttatggtaaatgaggtaaaggtaagtattggggaggtggaggagagtgttgtgatgatttaggaggtgtagaaaatagctttgagtaggaaaagtcatgttcatcaaaggacacactacgagctatataaatttggccagatggatgaaggcatttgtagcctttatggtaagggttgtagcccaaaaagacacagatactagttttgaagttgaacttttatgtttgatagggtctaagaaggggaaaataagcatagccaaacactttaagaaagtgatagtcatgtttcttaaagaataaaagctcaaagggagttatataatttgctttttagacaggcaacctattaatcaagtaggtgacagtagtgaaaccatcccatcagtaaacaagaggtagttgagcctatgcaagcaaagtaagacccattttagtcgcatgcttatgctttctcttagccctcccttgttgttactgagtgtgagaacaagggtgtctgaacacaatgtcaagtttggctaaaatgggtgcaaggggacagtattcacccccaaatttgactggacagattttattttagttgaaaatgatctttaaacataagagttgaaatgtaagaaggtggtagtggtgccagatttagcttttaagggaaatatccaagtatactttgtgtagtcatcaagaaagtgtatatagtatttgtgtcactcagcagacacatgaggttatgaaccccatgattgagctttgtgtcctaaataaaactctattttaatctaatcttttctactcatttatcaataaagaaatagatttattttcattacttatttaatgtgttatttagttcatgtgatcatttatttatttatttgatttataaattcatccaaattcttatcacattgatattcttatttattgtgttgtcaacacagtggaaagtaatcaagattgtgtgattaaatgttttcttgtgatttatcagtacacaaggtttaactgataagataatctacaatgtagtttacttgcaccttcccaagttgacttttgacctagagtgcgtggtttcgttgctcaaatgcccattccgccttgggtattcttcgtattttggtaccaatcaagggaggagccctcgtgttcagactgattcttcatcaaaatacctaaacgacactcaaatgacacctggtgtcaactcccaacgcccaagttgactatcaacctaacgtttgtggtttcattcatctaaatgcaattctattttgggcactatgctagttttccaccacgaaaaaggtgtaatactcgtggaaagttaattcacactttggcatgtcaccatgtgcccagggtgacatactagcactcaggtgaccaccaatcatcacctcatgcgtgaccgagctcaatcactaagagacaatgaccaacttcactgaaatcataactatatcttagtggtgcatgtctcatagtcatattacaattctaaatatttcacatcaaaaattggttcctaagttgaagtgtgattttggtatcaaagcattaaaaaacgatccgacagtccaaatccaatctcccaaaactgaagatcaccatccaaagtcaagatgaaaattttgaacccttagatcatgacatggcatccatcaatggtctcaatcttctcaaaaggcatattccttgaatatttcttattttgtaatattttattgttgaaaaatcctcactcctataaataagaggttcctcgaatttatttttcacatttacattcactccacaaattagagattctctctctagaagctctaatctaattctaagattttccaagtctttcttttataaaggtataaggtttttagtgattaataaaaaaagtatactctattatcgacttacatgaggaataaactactataaaatcatagtgtgctatctcattttgatttctctttttcttgctactattgctaatcacgcaatccagagttagccattttttaacgtcaaccgtacctttaggctatgtctagtaggaaagaagaagagtaaaatagatgaagaatctataaaaaaaaaaaatagagaagagaaaaaaaaaaaaatagagaagagagtaactctcatttgtattgtttggtattataaataaagatggaatgatggaaatgaagtaaaattaccataatatcattttaatataaatatttgttatttttaaaaataaattttgtatttggtgtattaattttatctttttctcaaattcttcctaaaatgaagggattgtatttttaaaatttggaaggagaatgtctccccccacatctcctctctccttttttgctaaacaaagaattctacctctcctttcaactctctccttcccaccaaagatagtgttagttctcacatgagaaagaaaagaaattgtaattagaacaaaaattttgaaaaacttgacatcatatattgctcgcctcttactcattgtcatccttcccagtactaaataaacaacaaaagatacaacataaactacagattaggaagaatgtggagaaaattgagcaagtttagactacaacaaatctactcttcctatgcaattacacaaattcaatttcttgcaccatatcttaccacggtgaagagcaacaatgcaaagaactccatttgttagacaccttcagaaaagaactggtttcgatagttgacaagatgataatgataaggatgttaagctaaatgtggatttcaagcataaagctgccccaaacagttgcaaacttttcaggactatgatcgctcttgcattttggctctagcgaaaaagactccagccagaagtcctacaatttgcaaattaagttgggtaaatactacaaaagcaactcaaggtgtatcgttttgaagtttgtgagggattataccacattacaaagaccatttattggagataacttaccaaagaaaatgcttgcggaattctctaaactggtcgggactttaaaaattaggataccagccacagacagggggatcttatttagtgacccaacaaggctgcacatattgatagggtcaggattgtaaattatagtctacaaagataaataatcactccatagtgaaaattaaaaaataaaacaaattattccaatacaaccgatgtttttttttaaaaatggtcgggtcgaactgttaaaaacatgttaaatggaatcggaagctagcacagttcttcccattatatagttggacatcaaattagaaaaatatatttaacatagatcattgtatccaattcaagttttctaattccgtgcataggtttggataattaaaaaataagcatccatccacatgttctgatgaaacttttctactgttaagaaagagtcttaacatttaatttgcatgcttaccatcaaaaaaataaaaactttcaaattaaaacaaaatgacttggtcaaagtaggatggaccttgataaataatttatgaattactaatctgtattacctgtatgtggtagcacctgtttgatgaagaaaccacatagaagtgaaactgattgccagacccagaaatccactgagtgtcattaccaaccagaaagttggtaccctcaaaagcggtctgcaattaggttgagaactgttagattcatttatagtatctcaacttatggcaagcacagttcagaaggcgaggctagataagatgggtttatgaagcctgccaaaacttgtttaaaaagataagctttattgatattaattaaaagtcaacccttaattacagagtttttatttattaccatgcaaacatttaatgaattaacatattattctcatcaagagaaggcaaagctagataagttgaatgaggaataagaaaccaaaaacaaatgtaatgaagtgtataaattaagttgggaaaaattagcatctccaatggggtgctaaattagtgaaatatagcttactttaggaaaaacttgctctaataatctaccaacagttgtaccaaatttggcacaatctaacatgatataaattttgcatcaccataaatgcagctctttttaatatacttttatacctttttttattattattagctttagttatcacattaaatactaattcttttagttcattattttattattatcattaactatcaccaataaaatagaaagaaaaattataatattttttaataagtattaaataaacactaataaaaaaagtactaagttcgaatcccccctcaatagtaaaagaaaaaggtaaattttgaatcaaattttactattttgcattagagcatagctaaatattatgccaaatatatcacatattatctttggtagcaaatatagcacaatatttacatattctattagagatggttgaaggcacattactgcattggggctggtagagtgtgttggaaaaggctggtaggcatttgtttcaaggtatgaatccccatagactcaaaaaataacattggagccactaggagctctccaagtcaaattgccagggccaaaaatttgaagaagaaaaatgaaggcaccaatatctgtgacacactacaggtacaatccggttcttgacacaaacagagtacaggtattgtattcatgtctgaaacagaattacaattatccaagctattcgatatgctcgggtgtctccctgagtttgttaacataattacaattatcctagatttttttttacagttagatttcttcagcctcctagagtaggtaagcctaataggtggagtatcaatctgtatcctagcaacatcagtcataactacgaaattgttatgaattctaaactagaaataagaatatgggtgggcggatgatttagcactgaagcctaatcattatgatgataatcgaaaaccgctagatacaaacttgaatgaaatgcactaatgatgaattagggctgggttgtgaccatctagaattgacaaggtaaatttaagagacccaccctctctcaagtcagaaccttactcccaaaaagaaaaaagaaaaaaagcttaaaaattctcccgttttctaagtctccattatatacaactgtttcagtgccaactcagtggtaaaccaacatgtagagacccataaacaagctacctatcccctaaaagacacatatgccaatggatggaggagggcctatcaaatgactacaacatcttttttcgctttatcaaactcataagcttctattcaaatgcatgcaagcaaaatcactcctgaggtgaaaggtgaaatccaagagagctagatacatataagttgacaaatatgtatgcttattaactttggttatccattatgtagttttaaatcatagaagatcatacagcacaaaatttactgcaaaatttagcttatgttttataagaatcaaaggatccagggaaaaacagtagaaactatcaagagttctttgtttgtagacatcatcatatcaagaaaggatgctttaatgaaagcctgctaagcagactgatcttatgtatgagaaattcattttcttgctcttgcaaaagccttaaaggagtgcagtttacatctgtaacattaactaatgaaaatggacacattacaatgaccaaattacgagaaatcaggagaggaaatttaaaaaagtacatatacttcaagacttagttaaaagtaggtaattttttttttgttttttgaatgtcaattatatgatatgcatcaatcctcaacatcagtaaaataatgtatcaactgcacaagagagggagagacagatagacagacagacacaggggtaggggagagaaggactcacgtttttaaaagataatccacctcattgaaaatgaatataagaagaatccccaaaggcaaagaaagtgtgttatttagcatgaccatagaaaattcattcaagttcccagatttggtgtattgctttgctgtgtccatcaccctacggagagtcaactgtacagataaatataacaataaacatcaacattctaaattaacataaagaaaacatccttaataccagaatattcttagatgattcataagataaatcgacaaaattacaagcaatcacttgtgaaggaaaatacaaggacttatttgcgtggatatctttctttgggtagttgaacatgagcacctacccaatgttaaaatttgtgtttgcgcactaaaatttctacaggatctagcaagtgatttgaccactcatcattttgaatgtaaaatcataactttaccatctatcgccaaggtcatttgataaacatatttacagtatttaccacaagccaggggaactaagggacttttaaagtgaataaagctatctacaaacataaatattctggaagtgtataaaattgaacagttacatcaagactgtgaacttacagaatatgatgcagttaaaaagcagttagcgatctgccatgcatagccaacagcatgaaatgttaaatcggtaactcctccagaaattgctgatatgatctgcacaatggaaaatcagaattataaaaatgaatctataaacagtgcagtgataatttcaaagtagtagttctgtgactcacatgtgaacgccttctaatgtcacccttataaattaacaataatatcaagtgtttataatattttaattttttgtaacacttagttattggtctctgagttggcagaaagttgtcctttcaataccatataagagtaaatcccatgcctaatgaataatggtttagttttaggttctctcattaagttgtgctcaaccatagataaaagaaaaagtttccacaaaattactggaatagccaatgtccaactaaacatttaagtgaactcaagacataaataaaagggagaggggtaaagagaatgaagatactcagagagagaacaaaatgcaaattgatatgataataataataattgaaaaatgaatccattgcaagttcaaacataccatcaagaacaaagcagtccacactcggctctcgtgatgcttgctaaataaatacatttccccaacagcagttatcacatttgttacattctttaggactgtgaccatggcaacattaatgtacttcaagctgtaaacaagaagtacaaagtctattaggtataatttataatcaagctctagactagtacactctaaataagacatatgagtaggtgacggtcatgctacgcatcccatccctctaaagggactcaccaggcagcacaaagaacatcaaatccaaaaaatttacattcatgtttatatcctggttaataaaataaagcatttaacaatggtatggcttgtgctatttataaccaaaagtatttttgcaactgggaatattcttttagacattcactcctatttcaaatttgtttacaaaatggcaaatgcagttcaaaattttcaagtttcttgccatcaaaggcactttacaaatgcagcacgcagtagctaccaactgtaaaaacttcatacctacatacctaaacatgcttgtaacaagcatcccaacaaatataacgttcactggcaaccagaccttaatcaatttccatgtcaacggttctgttgatatgacacccagaaaactcagtacagacactattattactgaaataagattctgcatccacagaagagcaaaaagtagttaagacattaaagtttaagtcaaaccaagtgttcaaatggcacttgactgaaaatccaatatttctttggtcatagcaatgaacatgtatacaatatactagtcttacaagaaacctcagtaaaaggtagattacctggtacagcatcaaagatatcccagcattaaaatcatagccagatagcatgaacttgttaactagtatcatgctacaagaagagatgcaataggccaggccagacaataatgccggattctgtaatttgactcctttagtactactacgtgtagatttgttcctttctttctccgtaccactttccaagtcagtaccattatgttcaaaagacttcattgcaaagtatcacctgcgtaaatgtggaaaaaaaaaagttaatacaagtgttttccttttggcaaggaacatgagagattagaaatgatctgccatatgaggtgaaacacaagttcagagattagaaagagaaaaaaaaacagagaaccaatacttgtataccaggtatgcagaaagaaatttcattaatacagaaaaattaattgtcatttaatttcagagtgtgatatcgagtgcaattagcatttctgtttcaaatatatatatatatat

SEQ ID NO: 224840 - DNA, 4361 bp, Cannabis indica
ttgatatttttgaaaaagtatttccatattatttattttttagttagaaaatttctcctttattattggtgtaaaataaatttagcgatctcaaataataaattttattgtaaaatattaagtaaaagaagatggaaaaaaatatgtaaaattttgcattataaattttcattgttatattgtctccataaatttattttaaatttaaacaattaatacaatattttcaaaaatcaataattcaatattaatactaaataacaagtttaaaacgcacagattagttagcaaatatatatatgcataaattttataataataagtttttatttatcgacaagaagatttttgacattttaatataaataaactaagttcttacgaaatcttaccaccattaggagagtctgcccgcttgttgtgctatgtggcagttgatgtcccttatgggttttaacggtttttttcaaaattttacccagaaacttacagtttcttagcagtttccttcagttataaattattttctccatttaactacctgattcttccttgtagtttcaatcctttgccctgttttttcatatccatcatctcaccattgtgcttttttcgttagtcatggatccgctcaccagtaagatgaaggcaaaaattactctaactgaagatgaggagtctgtgtttgaatttcatgatttagaagctattccaccttcgctttccgttgacacagttctgtatgcaaagatccttacaaagaagaaagtgtggctgtctactttgcaaaaccagatggctgagcattgggatgggaggtaccctgttaaagtttctgaatcgtctgaaatgttcatgcttacattcggatgtgagggggataaaattcgtgtgcttcatcgtgaaccttaccatttccaaaatcaccatattgttctgcattctcctgaaattggaaagaatttcacttctgaagatctcaagttcactcccttctgggtgcaagtttatcgtcttcctttcctaagtaagactaaatccttggctattgttcttggtaacattattggggagtatattgatgtgtttgaggattcacttaatgagggttggggaccttttttgcgtatccgagtcaaaattgatgtttctaaacctctaaagagaggtcgcatgatttccctaactcatgttcaagataagtttgggtggatttccgatacgagcgcttgccgaaatactgtatggagtgtggcaaaattggccatccatataataagtgtcaagtttatcttgagcaattggataatggagaagaacctgcccttgagtatcagcctttcattaaaggatctccccttaccacactaaagttatgatcggtacagaaccgatttctctaaagttgatgtgtggccattattgactcgacttgcaaaaaaaggactcacttctgcaattccacaattgcaatcgcgtggtctgtctctgccaagacaactattggaaggtgaatcctctcagcaaaatgcaatcaaggatgcggttaccaatgtgggtgttaatgttcctgcacaaattgttgattcaacacctcttacttcttcatcaccatctgttatttttaagccttccaccctcaatcataatgctagcatctctcaacattcggctgggatcaattataaccgtggaaaagcaccactcttggcttaagactctaccaataatttcacagatcttacctccatttttatccctgcaatatcagcatcattttccaacaacacatttgcaacttatcccccgcctagccagttggcttctgttacaaacaagcctcacatgtcaacacgctcaactttatttacaatgacagatgcccctccttccatccctgctgctactgacttcatgattgagaaagaaaatttgcatccgaatgtacaagttaagagacatagtgatggtctttcactgagacaaactttgaagagatgcagaggaactatactgaatgacttcacttcagccttgtcagttgaaggtgatgaacaccacccagtttctcccaattacatggattttgctggtgctaacgacaatacagcggcaactggtttgcagtcccgcaagcagccatgaaaatagttagttggaacgctcgtggtttggggaacccgagtgctgtccggaaactccgtttgcttgtcaaagagcaaaccccctctgtgttgtttgtaatggaaactaaattagcttgtaattcaatttcccgttttcgtaatcttttacattttagtaatggtctagaggttcctagagttggtcttagtggtggtttaatgttgttatggaaagatgatgttgttgtaactttgcaaaactttaattccaatgtttttgactgttatatgggtttccctaatggttcaagttggcacttttctgctttttatggggctcctgctactcaaaatcgcgtacatacttggactcttcttaaaagactcaaagacatggctcctttgcttccttggatggtcataggggatttcaatgaaatcctttataaccataataaacaaggggggagtttgcgaagtgaacaacaaatggatgagtttcgtcatgtgttggatcattgtcatttacatgagttaccttttactggtgaccctttcacttggattaaaggtcgacacaaggtggatacaattaaggaacgtttggattgatgttttacaaatgattcttggaacaccaactttcaacctttaacaactacacaattggatttcttttcttcggaccatcgagctatagctgttgacgtcttggctatcaatacaaacaaggagaaaattgccaaaaaagacaaggttttgttttgaaaaaatgtggcttaaggaagaggaagctgctgtcattatccgtgataattggtcagctattccttcaagtgatattaatcaatttcaactcaaccttgcctcctgcactgatgcacttcagcaatggcacactcacaaatttggcacgatgaggagagacatttcaaagatgcagaaatcagtggcagcattaaatgatgctgctgtccgcacacttgctggtgtgaatcgactacaacaattagaggctatccttgatgaacttttagcaaaggaggaagaatattggcatcaaagatcacgggtggactggctgcaatgtggggatcagaatacaaaattttttcatgcccatgcctcttcaaggaaggctaagaactccatcaaatcgttaaaaaatcatcttggtatgactgttagcaataaggatgaattaacagatgttgattttgctcctatttatttcaagttttatttgctacagagggaattcattgagaatctctacaacaattgttaaatgcaattccttacaacaattacttcaacaatgaaccagtcacttgtggaaccattttcaagtgctgaagtttttgcagcgttgcagtctatgagccccgataaaagtcctggaagtgatggaatgtccgctatgttctactaaaattattggaatatagttggaaactctgttacacaagttgtgcttggtgttctaaatgatggttaggatatgtcgaaattgaataagtctatcataaccttgataccgaaagtggccaacccttcggatatgcatgactatcgtcctataagtttgtgtaatgtcatctacaaacttatctcaaagactattgtgcttagattccagaaagtccttccatttgtgatttctgaaacacaatctgctttcctctccaacagactcattactgataatattttggttgcttttgagcttatccatcacattaggcataagactcaaggaagaattggatattcgacactcaaattggatatgagtaaggcctttgacagggttgaatggaaataccttgaagcggtcatgtttaaaatgggttttgctccatggtgggtgactttgattatgaactgtattactacaagttctttctctttctcactcaatggagaagttgttggtcatgtccaaccttcccgaggtttacgacagggagatccattatccccatatctatttcttatttgttctgagggtctttcacgtctactacaatttgaagaatctcaaaggcatttgaaagggctatgtatcacgcgtactactccatcggtctcacaccttctcttcgctgatgatagtctcttattttgtcaagccacagatcaatctgctttagccatcaaacaagctcttgatgtttatcacaaagcctcgggacaagttctcaataatgataaatcggtgatgtctttctctcc

SEQ ID NO: 224841 - DNA, 6707 bp, Cannabis indica
tcgattactcggttggataagaatcttcctaccaggcaccaccgatcatcaataccttcatccctttcttccactgtgacagtgacatcttccaggtcttcttcatcaatatgaaacatcagagtttcatcctccagggctcctgtatggcgactagatgaagccatattgattgacgatgaagcaaagcaaaaatccaattccactcttcccaggaaacgtcacagcaaagagacaagactcaaagacacactcttactgaactatagaataaacagagaaagacaaaagcaaatctcactcacagacaaaaacgatagacacaaaaaaccatgtcaatagacatgaactacatataggggatagcatataattcaaacaactttgttacaaaaaaaaaataataataattaaatattttaagttcttattatattattactttaattatttttattttgtagcataatggtattttacaatcaattaatagcttaatagcttcaagattctaggttcgaactcatgacctcttcctttttcccatccctccctcactactaaactagccttagtggcttttattactttaaattaagtactcaatacaaaataaactaattcttaaactttatacacataaataataatatatgtaaagagtgatttaaagaagcttatgaccgaaatttttacgtagctagagcagttaggtccacaagccacttattagaatcttgtttgctacaataatagtggtgaatactactataaggtgacgctttacgaatagttaaagatattttataaaagttattatattaaattgtgtgagatttgatacttaattacaataataataatataacattttagatggtactaaatatcattggtgtattttagtatttttttttatttctctaaatcatgacgcattattacaacacatatgttctataatttagaattacaagtaataatattgtaagccatctcaaagtaagtaacaatgataaataaaaattgtaatttattttgtgatattaaaaagtattattcccaaaaagtattttaataaaatgatactctaatagttatgcaaatgtgtcttaaatttcacatttgagatactaaaaattatgtcaaatttgacagaaaatataagttaaacttacatcataatatgtattatatattttatttatatttatatttttgtcactaattaatatatttacaacttatttatttatttaataatttttttatatagttttaataaaatttaaatactcttatttacttttttagttaatttacatcaaatcaattgtattgaagcataattgtaaaatttaaacaaataactcattgttttaaaagtttacacctttacaatgctgtagtatatatattctatcatgctcttggccatttattgtaaagtaatttactgtaaatttgtagttatagagtccccatgaactcaattctacacacaccccaggccaccacttgggggctccatggttcaatttctcccttgttcaactgaatccaaactcacagtaacaagactaaatctttcaagaaaagctgcagcttcacggcgtcgtattatctttggtggtttatactgactagctgataccccattatcaatggctaccttggccagcttaccatagctaccaggctttacaacggttagcaacaaagagcctacttcgcctttatctcgcttaaccctgtaaagtcttcccaagttatcctcaattatagagcaaatctccctaagaagaacaataagtgactcctccacaatcatgcattcctctccaatttcaactagcactttcaattgcttcgggtttagctccgagtctaagaagcttgaaaactctatgatttctggtcccaaggcatttttcatgacagattgacaaatttcaattgcagacatcaagcccctctcggttattatgtctgaaagagacttaggtgctctcattataaactcaacttctggagatgagttgtggaaaccaacaacttttactatatcacccaaacggtatctatataatcctctgtaagtagtgacaatcacttcatacatttttcctacttcaacatcagaaatgtcaaccgtttgttcgccaacacaactgatctgattgaaatcaaatggaagaaactcaaagtaggctgctgtaggaagcaacacgaatcgggttgtctctggaggttgtgtaatgtccaagttaatacctacacagcattctgaagcaaaatagtcaccacctaacagaggtgtctctcctgcaaagtgcttaagttttggataatactgtttcatgcttccagtggtaacacacttgacatatcttatatttggccataacttcctcacaattccaccccaattattttcttgacatattgatctaactttgttggcaagttccacttgaggcccaccaagaacctcaataactgaatctctcatagcaacatcagaaatttctgaactcaagaacccattttcaagatcatcacatagttgcatccacttggattccaagagtgaaaatgcccggatcaagcctatggcatagggagcacgaataccatcaataaggtcagagttcctaagtccacaaagaatatgacaatacatttggtgctcaacattggatccaagaatgatttctatagtactagaacttgaggcaaaatgagcccaataggcagccttactactattattccgaaaagcaaaagcagaagcagccatcaccttaaaaccaagtttggtagttgtgacattatcagcataaataaagccaataaatttattgactgagggtctcggaggaaacaatctggtaacaagtttcatatcgatcaacccataatttgattaactaatacccaaatgcatataacattaaataatcaaaggtcactcaaacacataccttctaagaattacagcgctgccctgatgagccacatacgaggccgattttgaaagatgtgaatcatagtaaggaatcaacttgggtttcatcgagctagtgccagagcttcatgacccaacaatatttaaatttcatacaaacttatctccataacaacaaaaaagaagttgaaagaaaaattacctataaaagaagcagattagaggatcaacggacagaagaggttgaccacgatcatgatcgtgagggccatcagcgagccgattgatgtcgtccgagtaatcctcataagttgacaacggtacgacgcggcgaaaggtatcaacgtcgaaaggcgcatcgtagccttgcaggaggcgctggagataacgtacgccaccctggtgttcgagtatggagtggagtgtttcaagctggtggcgcgtggcatccttagtggagtcctcaagctttttcaggagtttctcgtcatctgccatctccctctaaccgagctataagtgtgcgcaggatattactgtgcgcttcccgttcagtttagcagcggccgtcgtgactaggtaggttgttggtgaagccagcaaagtttgattaaatcaactttgaaacaaaagagtcaacgccaattttcccgcgacattgagtatagtattagttaagactaattagtaaacgcacccttttaaaggatgtattgatccactaaaattttttagtttaatttttgtaagttatatctatttaagatatcttacaaaattttgagatattcgaaataatttacaatatagaaaataatatttaaacagcttattttacacgcgtataaaataaaatagtcatacatgtaacacactgtttgaacgtagtttttggcgtgttaaacttttccgaatttcttaaaagtttgaagaatgttttaaataactataacgtacatgattttgaaaaaaaatttaactaaaagattatttcagatgctaaaacagataatagtgcatggagtacattgtagaattttccctaattttttccctctaaatgtactaaatttgaatgtcaaaacttgtgtgagaaaactcctaattagcctattagtaatgagttgcgttcaaaatgggccttgttaataaacgggccgaaagcccaaaacaactgaccttctctggttcatctaaaaccgttgtttaagtattatttatacgtatatataatattatttagggatttttatcacactaaaatattagttggaaaaaaggtatgggtatcttcaagaaaaccatgcttagtgaccaacaaccagaagaacatactcatcggtgcaagaatgttccgcctccgacgaccggtttactcagcgcattaccatcaaccggcgacattgctccagtacagcgaaacgttctgcgtcaaccgccgtcgaccgacaatccggtaacggagccgatgaaggtgcatctaatacttacggcaataccagagctctgggatgccttgacaataaagccgatattagcggattcgaattgagtgagagcttggggtttgagagctccgtaataatgagaagcgttaatctcaatgatgattcgtatcgggcggtactggaaggactaccaccatcatcaagatcgattttaaaaccgagaaatgaaacagcaatgtctgaaagaattgtgaggagaaacagtattggttcgggtttggagaatttgccgccatttttgtcgtcgatggatgagtttggacggccaagatacgttcttgagagagtgaggagtgatggacggttgaagatctttatggggaagaataagcagcgaagaggagttgttcgtacgccgagcctagacggagaaacgaccacgaggcttatgcttccttatactagtcctgaccagtgaccattactactgagtacccatttttctctttcttttattgttttgccaatattgctttcaattcatttttggcgggaagatgaacccataatatatattctctattttatttataatattcatatcatatgccctatttttctttttcagtttctttgcttgttataatcaatatttttgcaagaactaataataatacataatgatcattcacaaattggttgatgtttcaatatttcacggtaattttgattaattattactacttaattcattagtgttattaatttctattagtcttacgttttaaagtcatagatcagatttctctgttctttcttgtgttctcctttgtcttccgagtcttaatcgaatgaaacttgcttcaatataacaattaatggttaatttgacaagcatatatattctgtttagtaaggtttttttttttttcttaaaagagtttataagttttgattattatactaaaaaaatatatatttatacttgggaacgagcaaatgcatttgtacaatttattgaaatgtggtgaaagctttgtaaagtgtcattttcagttggtcatgactgttccataatcttctattccacaaataaaaatgtgtattaatttaacatgccagctcaaaaatattaacaagaattgctacttcacagtgagtttttatgttattattttaattaaaaattatatttataagacaacattaagagctagcaaactctcatccctctaaataggacaaatctaattgaatttggtaaaatttcatcttatatccttaaaaaaaatatctcttaataaaatttaaactcctaattactttatacaattaaatactattattttcaatttctattgaaaatatcctctttttcatttctctctctgtctcttccttttcctcgctctctcttcctctttctcacaccaccgataaacccagactcatgcaccgagaccaccaaccacctccaccgaatctcctctcctctcctccaccactgaaacctcccgatctaccaaaactcatgagatattatcatgcgaaccatgcaacatagaatcgatttctgatcttatattaattagtaaatttgattatattgaaatgaattttatttatgatacaaaacccaacaaaatcatggtgggtgtgaggccgtcaagctccatgattagagcaattgagtcttttgacccagttctagccaaatcatggtgggtgtgaggccgtcaagctccatgattagagcaatgttatatattgtatataatagttaattttaaaaattaattaataattaattatttttgaaatattttaaaatatttctcttaaaataattaaataaattctaactatttaattacaattaataaagagaggtttaaatcaatttaacaaaattaattagtaattaaaaatagtgcttctagttacataatggtaaattaatcgtcaaaggaggatggtgtgaaattcctaaagctacatcaaaaaacaatagaaaaagagttctttatgagagagattgttctagtatagtttatctcttttatttcaaaaattattattttagaaatacccaatatttattcagttcacatttcatttaatctttaattaattattattattatttttgaataaacttagcaactttattaactagcaatcgttaaaaataatagaacgcacttcgttggaacaatcctctaactgaagcacacaacctgtagagaaaaaagaatctcttgctaaaacagccaacttgtttgcagatcgtt

SEQ ID NO: 224842 - DNA, 4715 bp, Cannabis indica
tatgtgtttaattttataatcgttttgtaagtttttctaaaacctaaaaggcgtgtgaagctccctgtttcctctcatggcgaagaagaaacgggtggtttcgaagcccaccaaaatcgtagcagtttctgagaaggacgagatcgactcaacggagaaggatgaacctgacctcccttcgatccaaaccgaagtggaagagcaacctgcacctgaaatttttcttgactcctgtgagaacctagaagccgatttagtggatgagagtccgattaagaagatagatggattgaagccagtaagctgggcagaggaagctgagaatgatcattttcatgccaaagcaagggatatctggagtaaatttaaatcgaatcaggttcgtacaccttctactcgtcttgaatttactgaacctatgaaagtaggggatcaaattgatgcaaaattggatttggaggaggtcaaaactgaggcctcgtattggaaaaactcgataatttgtattgtgctaggggctaaccctccgttcagggtttttgaagggtttataaagagagttttggggaatttgggaatcgagaggattgctagaatgaattcaggattcattttagttactttcagagatgaagagacaggggatctaatattggaaataggggtcattcattttgataaaaagcctgtaattctaagaccctagactactgatatggatgcagcaaagatggtgaaatcagttcttgtatgggtgagattgaattgtcttgggttgcaatattgggggaaaaatacattgagtgctcttgtgagtactataggcaaaccaataatggtttataaggtcacattgagtagaactatgattaaatatgctagagttttggttgatatttagatctctgattgtccaccaaaaactatagcctatattaacgaaagaaagcagttagcgaaacagacgattgagtacgaatggcttccatctaaatgtggggcgtgtgatctcttaagacatattatagctaactgtaataaagagaaggggccagtggtttggaggaaaaaaggggtgatagatcagaaatataaggcaaaggatgctatgaatgatatccccaatactgagattacaaaaccaacagcagtaaacccgaagcagaacatgagcaaagagggaatgagaagcaggttagagattcagttgaaactgaagattcaagctagattactcctaggaagagaagctccaaacaggctgttacacctggtttagaagcttcaatgaaaaatggttatgaggttctatccaaagctagggatgaagacttgggcatgaattccaatgaaattccatggaagtctggaacataatgggatggaatgtcaggggaatgaataagagggataagcagagatcaatgttggaagtgtgtagagaaaataaagttaggcttggtgccctctttgaaactaaaataaaacatgaaaaagtgagggaaatagttgacactagcttcccgaactgggagtattactcgagtactactattagcaatagaataatgttgatttggcaatcgaagtttgttcgtgttgaagtattgttggaagatgcccagttcattcattgtagggtcaaagtgataggcttgatggaggagttctgctttactacagtttatggcagcaatatgttatcagaaaggaaagtcctttttgagaagttagctggtattggggtagttaacaagccttgggtaattcttggagactttaacacgatgttttgttttcaagattggaatggaggtaagcagatcatgcctaaagatattgaagatgctcaaaactggctttccctaggccaagtggaagacttgaaaagctccggggcctatttcacttggtctaacaagcatgacatgggtactagagtttattctaagcttgatagggtcctcattaatgaagactgaatggatcaattccctcacacataggcttgttttaaatgggactgtatctcggatcatagctactgcattgttaagagcaatagagttggtaatgtgggcataagaccgttcaggtactgcaaccattgggtgttacatgagaaatttcgagaggttgctataagctgctggaacagatactcagaagctaaaattgttgctgggttgattagaaagttgttgagattgaaacatgtgttaaagagatttaatagggaggagattggtgatgttgtgctgcgttatgaacaaagcaaagctgagtatattttggctcaagagaacctagctaaaaatcctagcaatggcatcctgcatcagattgaaaacacaaaggccttgattttgctacagctgtgaaacactactcctgctttcttaggcagcaaagtaaggtttcgtggcttcaaaatggtgaagacaataccaggtattttcactctatgaagaagaggaagctggagaataggatcactacattcgagatgaatggaagagttgtggatgattatacccaagttgtggagcatttcctcaaccattttagaaacttcatgggtaggcaaagtactgctacaaagaggcttgattgtcatgttctttctcagggtccggtcctaacaatagatcaacaggctagacttatcagaccattcaatgtgaaggatgttaagaaggctatgtttgggattcatgttacaaagagccttggccaagatggttttggatcaggatttttcaaaagtttgtggaaagacataggggctgatgtttctaaggctatccttcatttttttgaggagggcactatgccaatctctatgaaggatgtcgtcattactttaattccaaagactttagatccaaaagaagctagtgattttcgcccaattgcctgttgtaatactttgtataagtgtatctcgaagatgatttgctctagattgactgaagtgctccctagcccagtgagtgacaatcaaggagctttcgtcaagaacagactcctggcccataacattatgattttccaagatcttctcaaacgttacactagaagaaatgtctcagctcgctgtataatgaagatcgacttgagcaaggcctacgacactattgactggcaatttgttgaagaccttctcaagggtttgtgctttccttcgagatttatccattggttactcatcttcttaagaggtacaacttactatcttttgcttaatggtagaatccaaggttcttttaaaggcaagaaaggtctgcgtcaaggagaccctttatccccccttgtttttgtcatgataatggaatatctgtctaggttgctttctcattatgcaaacaaaaaagggtttggattccacccgctttgtaagaacatgagattaacaaacctatgctttgctgatgacctcataattttctgtaaagggaacttaaagtctgtggagtttgttaatgatgctttccaggagttttgtcatgctacaggtttggcagccaataagaagaaatcccatgtctactttgggggagtgaaagaggagattaaaagcaaaatcttggaggtgattcaaatggaagaggggtcttttccgctcaaatatttgggtgtgtctctaagacctactaaatggagggcttcggattgtggtgtaatcttagataagcttagtatgaaacaaagtgggtgggctagtcgaaacttgtcctttgctggccgagctcagctaatccactcggttctcttggaattcggaatttttggatgagccttttcatcttacctcaaaaagttgttgtagctatagacaagaagtgtcaagattttctttggggtatgagtggaaatagaagcaaacttcatctcccatcatgggagaaagtttgtcttccaaaacagtttggtggcattgggttcagagaagggaagaagtggaacttggccatggtagctaaacacttatgggcactctcgagcaaacaagataacctttgggttaaatggatcaactccatttacttaaagacccaggatatttggtcttgtcctataaaatcagacctcaactggtatttcaagaaacttttgaagatccgaaatgtgacaaacatgggcttgctgaaccaggcgataaaagggggtaggttcaaagtttgtagattttatattgaactcattggggcagcgaagattgactatgctgctactgtttggcacaagtttattattcctaaacacaggttcattttctggcaaatcatcaatgaacaattgctcacccgagatcatttgagcagaattctgaccatccctttggatctttgtgtggtttgtgagaatgctttggaatctcataattacttgtttgtggactgcatttataccagaaagcttgttgatagtgtggaaaattgggctggctgtttgagttggccgaagtgcttcagggagctgcaggagagaaagtgcccagccaagcccgatctgcctgagctggttttgaatgctatatattcagctactctataccagttgtggagaaacagaaatgattgtctctttaacgctatttgtcactcagcttcctttcttagtaaagagattaaatgtatggttaaggcaagagttgttgggttttattgtatcaatgttaaaggaaaagacagttatatatggagggtagtgaa

SEQ ID NO: 224843 - DNA, 2690 bp, Cannabis indica
gtatgtataagtaaaatatttatgcaccatttagtatgtggttgaatgaaattttataattaattttgttgccccttttatcgtaatatacattgccgtcccaacgatggccatgtgtcaagtgggtccaaagattatgaaatacttaagatatactctaagagaatttacttggatttgatagtcatatccgggagatccctctgaaagcaccagctacatcctgatgccaagatattttgttatctccgagagctaggcaaggcctccaaggccagccatcaggtcccggacatgacttatataagcacgttaaatacgacatggaggaagcgcttgcgaatggatttgaaaatacatgtaagaggcattaaattcattcttcggcaattacactctaatctatgagctttatgacgactgcataatgaactatcacatcaatcaaggaaggcaaagagcttatcttacctaacatcttgataaaacctatgcaacctgctatatagacatacataccattttattcaagcctaggaacttgtgcaagtaatggttcaatgatacaatagtgaccttaattttgctctctttatgaagctataaataccccaaaatcaaggtcgggaaaaggggtcaaaaaaaatagtgtaagcatcctctgtatggaaaaccattacagtagcagtgacttgtggactaagactcatttatgccccaaccatgtaaaaactattcgcgttaaattttttctaatcatttaaacagctctcattagttagttgtcaaaattctgttcaatactttagtgcttttattgagagctgtggaaggttttacgtaagaagaatatcaaaaataaattctcgatacaatggtggagactaaaaaccaagcacgtaaaccacattcagctcaaggcccaagggtgctacacaaagaagaagtggcttcgtgagtcgatgtagaagcagaagaagatgaaaccaatgatatagaatacaataaaaatcaagaggagtacgaggcgtatgatgatagtagctacaccgaacatatggtgttaagatagaaaggcgttgatcataaagccgagttggcagagtaaaaggagtagaataggataatgaaagaaataatgatcgccatgcataaggcaatggaaactacaagcatccatgtgcatccaaatctcaaaccaattaggcaagaaaaaataagaggagtcactactgccagataatttgaggcacaaaaattgagagccaagtcctatttggtacccttccgaaggctccccaaagataaacccaacaaccattcttgaaaagaacaaaaaggctatgtggacagtttgcttcctaaaggaaaaggtccacataggggcaggtttccaaagggaaatgatggccctcaagatcgagtagaccggaaaagtgtattcgtgcacaaggagccagggaagagaaaggggaaaaaaccacaaagatcctcctattgattggagatagaaactaagcgcaaaacacggtgatcttagaaatttcttggagtagaaaaaataagtaatactagtctcagaaagttacctaaatgagggaatctcagtcgcactcgccatcctccaaaaagatatagctaaagtctcttgcagacaaaagggagatgatttggagtctgattgtgaggactgggaaccttgtgctagaaacatccttgaggaagagtttccaactaatttcaaaatgcctgaaatgacactgtacccaggaaactcagaccttagtgaccacttatctcagcttaactgtgtgatgatagtcatgagagtcaggaataacgccaagtgtttgtgtttcccgctgacattaggagggttttctaaggagtattttcaaaagctagaacctagatctgtggattggttgaaaaagttgcaagttaggtagagaaggtagtccatgacatccagaaagataaaccttgaagttagcgctttgaccaaaatcaagcaactaccagttgaaactgaaaatgatcataaaaagatttaaggaagaaacctccaagactaaaaaggtggatgatggatagcaattgacattactacaagctgggatccgaacgggaaccattttttggaatgagctcaagcaagaaggagctgctagccttcaagactttcaaaagagggcccaaaaatacattaatttagaagaagcacaaataactactttcggaggatattatcccactagcagaccatggtatgctcctgaaacacagtttctaggaactacccttccaattgtatcatcgacaagcgaaatgcctagtgtgcagttctcagcaaagggcaaggtctggccgcccagtactcttccatggctagccaaacctgcaaagggcatggtctgactgcccgtgatgcttccagggccagccagacctacaaagggcagggtctagtcgcccgtgacttcatagtcgactgatgctggctgtgtgatgacaaggggtagatgacaccaaatttttgagtttggtggatctagatgtctgaagtgatttatttcattccttaaatttctgttttggatgtttccacccattactgatccttttccgttgaagtcgacctctgggcacgtcgttccccttggggatgaagtgttgtactctagccggcc

SEQ ID NO: 224844 - DNA, 2304 bp, Cannabis indica
atgggctaccgaaaaacaagatgcttcttagtacaataggtagtccgaagcaatctattcaagttctcaaccactgtgtagtcccacgcctacataatctcagaattactacgtacgacctttccctaggtgatgtgggattgcacagcttacccggtatttccccttacggatcacgggactactgactgtcacatgaagagtcattaagctgacatagtgcctcgctttgtgctccgagaagataacaacatgaacctcgcagaacaggtccccacgagagaagtcaacctgagaataggccacaaaacatatgtctattagttagcgactctctccattatagaagataggtccctttgctcccatgaggggtatgagccttccaccaggatgcgtcagtccgagatacgccttcgacccgtggatgttcagcccgcacatgccaggctattggcccacttgccatgcgtttttcccatgtaggatgtcagagtttgtctcccacgtcacactaccatgcagagcgtgcatgtccttgcgtactatgctaaccaatcccctggatagggacgagggaaatccaaatgagatttgccttgagatgacatgtgttcaaagccccacggtgtagccagtacaatttgacatcggtaaaggccacatggaaaacatgccacctaccattccaacggtggaggttcatccctatgaagatccatccaaggtagcccatgccatgaggtcagcctataaatactccaacaaatgcacaagagaaaggatttagatctatccttcggatgttcaccttaagatcaaagaccttttcttcaccaagaaaacacattgttctgtaatcctactattaactccagaatatttctactaagcttcttcttcttcaagaggagcacgggagaataggagcaaagtccattattttgtatttgtataaacaatctccagccaaagagcctaataaaatggactcgtggactaattaacgcctgaaccatgtaaaaatctcttggttgttattgcaatatttatacctttgttactttcttatgctctaagattattcagttattgaaaaactcggggccagatcccccaagatatcactatgctcagatagaccagtgcaagaggtactagggccagccaaaggaggtatgacccgatgtggttacgatgactaacaaagaaaggttgtcaaatgaaacaactctatccaactagaaactccgacaccggcactggcgtgagggccagatttgtctcctgacaactacttctcctgccattttgctaggtggtaaagtttctcagaaacaaattcctcgatggtgcctgttgagaggaaaacatcagtatcgtcaacgtttgctgggttactagtgaggcctggttatggtactgttggtaaaagttgagaacttttgtcaaagttcactccatgccgttcttgtcacctggtgttgctgcaaccctagaagtacatcagaggggagaatcttgagacattataaataagttagggagtccttgcgacatgcttctcccactggaagtccgagcccatgcttcggagaccattgaatgccctgcgctttgctggaggagacagactgcctaggagatccttggggtgtaaacatgaacctcctagaccttcccaggactcaggagacgcgcacaaacctactctccacgtgtggaaggttattgggagtgtctcacatcttcaaccatctttcctagaagggcaggatcgcttgaagtctgctttacttcaaccgactcttcaactcattgatcttttcaagcgaagtctaagcttgaatttttatacaactacaaccttcctttctggaagtcgaaacatgttacattaaaattcaacattactctcatatgcacattgtttttcatgcaagaaaattcattggagctgcgatacgcctttaaccctccttctcagattggaaggactgcttgaagtgtgtcctaccctccgtgataaaagaatgacagagataaaactgaatggaagacacaccgaaaaaaattatgtcagagaaaccagtatatatttatatacttatatatgtattgatatgcgtttgatgtataaagttttttgaaaggtaaaaagtatcgatatcctatgtcttgcttgcgtgtatcttaatatatgtagacatatatatactagttgaatgttatgtgccgagatatgtatgattagtctatattttttgtttaaggaatataatgtatttttttgaaaaaaaaaat

SEQ ID NO: 224845 - DNA, 3566 bp, Cannabis indica
tgtatgtaatatttgagtgcacataagtacatatcacatttctcaatctcccataggatagatggtgtaataagtttggataaaagacataccaagagccaaaaatgcagccagaaatgtgacaatagtccaaggagtactaaaatgatcattcaaaacttgagcaatccaagtcaagcatttgttgtgatagtgcttctctatttcatttatcacattctcatacacctcatggtttggaacaaggaatttgcccatctcattaaaaagttttgcaacttctttgtcacaaccaagaaggttgtgaaggatatgagaagatctcaactctttcacgtcgtttggataatcaatgagcgagtctaggaaacttatgtatgatgacacttcgtacttggtcttggtattgtctggacacatttcgtaggcgattaggtttaagaatttaggagccatcgagtcatcaactgtgatcggtggcaattctaggtcagctgtgaagagacccgaagagaatcttatgtctttcaaagagctactcttgctcggatttaagtttattcctgcggccttaagatccatcacactacgaaaagtctgttgtttttgctcgtcttcgtttttctctgtaacacacaacaataattgtaaatttttagaacaaatgtttaaaaaatatataaattaaatataggaaggtatatagagtaagaaatatagggcttcatctcaaaattaatgagtgattagtgaagtaataacttataatattagatattgaatttttatttttttattatactgtgagactctttaatgtttatttggtacaccgtattaaatcatattgtattaattcatattattagtatgtaaactttgatttatatcaaaatcttatctaatttatatgcacatactaatactaaacacaatactatataaaaaatgatatttgtaatgtactatataatataataagatgtaatatggtataccaaactaattctaactaaaaaaatatcaaatgagtatattatcacagaaacatcaatacaacctaaccacaatcaaaagacctacattaatgatttattatattatatactataaaattgtcatagtttaatatattatgtcatatgcaaattaatgaattatatgtatatatttgaatagtgtaattaatgtgcataatattagatcttacttgcattgagttgaggaggtactactttatccaaagataatggtggagtagtgagtttgtatttgagttgttgaggtagcaaacaacctagtatgttgtcataataatgatatagtgatgatgatagtgacctttttgtcttttgtggatgagttggttgaagaagtaacaaacgtagaaaatcaagaagatggacaggcatctcagttggaagaaccatcataccctttctatacttttcaggtgtcaacacactataagtaagaaacatcaatatggaattttgcaatttgttgacaaaaccaccacctttgctacaattctccatcaacaattttagcacaagatatggtatttgattctctagcaagaaaaaatcaatgaaaaacaaaagcaacttggtcatttttaatgtcaaataaatcgcttaactcgttttgaacagtgctgtaaatgaattggagtgtgaaacatccatccaagaacaacatccaccccaacgattcgtcgtcatgatcatcttgtttgttgaaatagttttcgagcacttcttcgtcgaaacactccttcaacacttcaattttttccattattgttttgtaaagttgctcgtgggattgttgaccgctgttttcgacaaatttagctgcgaatttgaacttgaatttttgctcggcgagcttgaatttagggttgccatgatggattggaccgattgatatccactttgggtcgtagtacttctccaaacccttgtattcatctctaagtacttgaggaactttttgtatcttcgtctgttggcctctctcacggtctgatctcctccttactatcggtttgggctgttcattcatcttgtttttcatcaactcgtcgtgtagtttagaacttgctgaggctactttctcattgccaatagctactatttcatggtgagtactagtcattttcaatatgtaaatcttgtgtgaaatgataatgatatgagtagtttaatagtataagaaatgttatacacatatatataagtgatagcatgtgttgagtacaagaaaaatatttaattaatttggtccctgcgttaaggaaaattacgcgataatgtctatgtattttgttaaataacaattcaaatgttttgactcgtaaaaataaattgaattaatacttgtaaacttaatttcggttaaataatatttttaacaaagtgatacccttaacttaatttttcatcagtaatttttaatattctaagccgaatattaatattttttaatttgattatattaaaaatatatttagttgaaattaagtgtgcaaaatatcatttaataaaatatatgggccaattgtataatatgctaaatatatataggagccaaattttatttatgttcattaatttattattcttggattaaagaatgaagattggtatataaaaaagaaaaaaaaaaaaaattgaaaaggcacacgtaattaaaattattattgaagatagatggaatatttttacctctttgcaagtttgggatttgtactattattgagtgaacactcttactctttggttaagaattttaatttatacatgtacatataattaaccctagattataagttactcatgaaacatatgtaattagtttttgattatatatgtaagcctatgtacgttcatatttaatttcctaattttattatgccttgtcattaaaaagttatatacactacaaaaaacagttacttttagtgacaactttttagtcacaatatactttttttgtgactaaatgtgacttttagtcacaacaaaatgttactttaaacataacatttagctataagttatcactaatttagttttaatcacaacaagtattgtaactaaaaatatatttactgacaaccaattgtaatttttgtgactaatacttttagccacggacctttagtcacaacataagaatcatatgatttataattagtcacaattttttcacttttagtcacaaattttgttgtgactaaaactaaattttttgtagtatatataagtgtactttgagtattgctcataaatgggtagtattagaaaaatttgaaactttatgcttaatttctcaatttaattagaaataactctttcaattttacattataaaaagttttttggcaaataaaaagataaaaaaattgaattatttaacttaaatattttgtacataaatatatttttaaatagtgtaaaaagacacatttttttgatatatttttttttaattaaatagcagagaaatttaaatttatcttttattatctaatagtttagtacatgtttggcatcataact

SEQ ID NO: 224846 - DNA, 8137 bp, Cannabis indica
caacatgtttgataaaaagaacaagacgctaaaaatagtttctattgctaactgatgatataatatgagaagtcaatgacgccaatgcttaaaatagtatcgttgatagataacatcaatgactaattgacacgcgtatattttattatttaacgctaaaagtcaattttgtagtagtgtacaagtggttacgtcggaccttgtctgggagtgaaacttattctaaataacttaaaacccaaccataacatatagacagccagaatagtaaaaaggtttagttgcatttgcaattttgcagagcacattaagattagaactggaaggaatagctaattaattttaatttccctttcttttgactgttccctctacatttaccaaaataataataataataaaactgtatgcaaaatatatagttcaatatacagtaatccaataataattatagtaaatttattaaactagattaacagaaccagataaccacaatctccaaacaaaggtaaacccaagctgaatcttgctcatcgcattgagctcgcggcgttgaccggaacagtacaccacgatcagggaaagtttaattcatggcttcttctcccatttgtttttcaagttaatcagattcctgccgttatattggtaacggttttacgaggattcttatggttgaattgaatcaccaaaaggcaatgccaaccagccacggcatgcttgaaacaaatattatctcaaataagtcctcgttattactatttactattattgttgttaatattatttcctgtttttccattagcatttgcttaatcttgtcatgtatatgaacttcaaagtcttcaactatggaatgaaattaacacccaatgcaccattggaccgagaagaaaagcccaaacctactcaggaagcaacacatagagataacactttgtaagtcatctcaagttcccaaataaataaataaatggagttatgtacacatgttctcaatcatcaaactcttccttaactcatctatactaaaatgagttatgataccttacttaacgaattatggtattgcttatttttctcaattcaagggattggaataacatagtacgtacactttataattaaaaaaataactaatgattggttacttttctttttgtgttattaattctttttaaacaatgagagacaccaatttgagacagagtgagaaagtcatatattcttgtaagatttgacaattgagaaagaaagaatcaattgtgcattttctcattaattcggaagaataacactacaatggtttatatacagaattaagataatacactaaggcaactgagatagttacaacaaataattaactcactaaccgaaaagctaacaaactaatttggacacaggcaactggactatttttttttttttttgaaaaataaaacgttcattgataacaaaaaattagactttacggtcattacaaaggatagtattaggtatagaggcgggatccactatacccttaatattctgagcaaaagcccatctagcaacgttgtgtgatgcaaagttacaacatctggggataaacaaaaaattacaagataaaaaattcttagagagttgattacaagtagaaatataattatcaaagttctagatggtctggactcctttaagcgctttaataatcctttcaaaatcactctccactaagataaaatcatgcttccatgaagcagcagtttctaaagcaagttgacacgacgtcgccgcctcgccaatcagaggatttgtgaaattgagtatgttggcaacaccccacagaactgtccctgagtgatctctagccaaggctgctatgcacatggactcacaaccaaccctaacatcacagttgattttgatccaatcttctgaatggggagaccacgcaggagacaccgtatccaccgccgggataagcaagcaagcagcataatctataaaacaattagagatagagtcaatgacaattttaatgttactcggagagtaattgtgcactttatcattttgagttctccagatggtatccacaacgatcgaggcataaaggaacagcttgtccgtatttacccctatgttcctcaagttccacataaagttacccaatcccaaacactgcccccagaccaggagccgaaaagattccccacggagatgcttccatagatggtacacaaaattacaatagaggaacatgtgctccatagattcttcatactccccacttaaggagcaagtaacctcgtcaatcgtaattttttttgccaggaggccccgaatgggcagggcgtcagataagatgcttcaccagagaaccttatgtcgttccataattttcgagttccagagtttatttcacagacttggcgcaaccacgtagtcaggagccgtttccaaggcttggacaaggtaagcagacttagtagagagtcgaccattctgaccctttttccaaacccacctgtcacctcccaccccactaggtttacctcctttaatgatgttacgaacagttttcgagtcaaaaagagtctggagcttgggaatatcccaatccccatcatccttaagcagatcggcaaccttaattacattcataggtgtcgaagtaatgggtttcgcaaggaaatccttgttttatagcacccaaggctccgtccagacatttgtatcctttccattcgcgataaatttgcatgcacctttcaacaagatgcctttggatttcaccatcttccaaaaccaagaatcagaacccttataagagccctccaagaaaggcttctcttttagatatttggctttaacactctacaacacagagattgctcatcattaagtagagcccaaccccactttgttaacaacgcctggttcatctctagagtcttacgaaacctgaggcccccatcaactttagatgacataaccagtcccaagccttcaaacacataccacgattaccctgttcacagccccaccaaaaatccctaatcataccatcaattcttgaggccagctttttggatagcatggtggtttgcatcgtgtaaagagccaaagccagtccaactgccttgattaaagtagcacgttcggccttagactgggttttcaacttccacccatgaagcttcgaggcaaggttctcaataataaaattgaagtcagcatttttttgcttggatctaaacaacataaggcccaggtaattgatgttggttgcaaccatattgagaccaagctcctgcatgatccctcttctcataccctcactagtcttcttactaaaaaaatggaggtcttaagcttattaacacgttgtccggaccactcacagaacttctctaggcactgcaagtaacccttggcctcattgatggttgccctacccacaagaataagatcattagcaaagaagagatgggaaagtcgcggaccatttctactcaactttatcccccttatggcctctgattcaattgctctctctagaatacaggatagaatatcagcagcccagataaacagatacggagataggggatccccttgtcttaacccacattcaggggcaaaactacacactttccccccattcagatgaatgttaaaggtcgtagtcaaaatgcactgatgcacccagttgcagaacttgtttggcactttaaagctacttacaacatgatcaatgaaagcccagctgagcttatcataggctttcaccaggtcaattttaattgcaaacaagccctcttttccttttttaagcttaaatgagtgaatgatttcctggaccaacacattattatcattgatactcctcaccggaacaaaagtcgcctgggtagggcagattagtctagggagaattggtctaatcatgttcacaataatcttagagaataccttgtaaatcacaatacaaagagaaattggcttgaactgagttactttcttcggattagccaccttaggaatgagaattatattagtcgcattaatgcccttatgcatagtagtagagagaaaaaaatcgtgcactacatcactgaaatcctcccccaccgagctccaatagtgcttatagaaaagagcagacatgccatcgggcccttgggccttcaagctccccatggagaagagcgttcaccgaacctcctcatggtcagggattaacaataggttgctttgctcacttaacaatcaggtcgtccagccgctctaacgggcccttaacagtgctggtgaaaatacccccaagaaattggagaattcctttctaatgtctcttctattactaatcacaccccatctttgttcaagatattctccactacatttcgtctattcctgatggtggcagtggtgaagaaaaattttgagcatttatccccctctttattccaagatatacgagatctctgctgccagtagagggctctctgcctaaggggctcattaagagtcttcgtagtctcaacttcctcggcccagacccttgaacccgtaggtaacttttggatatccttcagatggaattccaaattagcaatacaagtatccactttactgaattggaccctttgccatttactaagggcgagtctggtggcccccactttcttgaagattctggccggggcccacaaatgagacacaaagccccaggcatcctccataattagcaaactttgagggtctctagttcaccaagcctcaaaacgaaaagacctatacagtctggaatccaggttcaaagtactgaggcatagaggacgatggtccgaattacaggtatgaagggaattaaccgccaccctcaagaagagtctaagccactcttcattcgctagagctttatccagggccgatttaatgtggttcgcgccatctttgtggttatcccaagtgaggtggtcacccttcactggcaagtcaataagctcgaatctattgattaagtcggaaatgaaaggcatgaattgatcctttcctcgcgagaaaaccttcttagaatcctttaacacaaaattcacgtcccccaagattaaccaaggcctgccaaatctttgacctaaattcatcaaattgaccagaaatatttcttttcattataataaggggagccagacacgcaagacaacaactaggggtggcgctcagaatccgagtacacaataccagaaatataattcttagacatactcacatgctcaaaagtgaaatcgttcttccaagccaggataagacctcccgcacacccagacacaggaacaacaatgttaatataaaagtgtaaatttttaagggaacgtaccgcactagaagcatccactttcagttcgaagatgaagatgaagtcaggttagcatgtctgaactattggctttgagtttcagaactgtagaggtttgccccaaccctctacagttccaagcgacgcctctcatgtctcgtgtggaggagggttctacattaccaaactgagtgcccacagtagatcccacatcttcaattctcgggatctcaatatccaacaatcgagccttggccttccacgtgattggccagccaagatcggtttgtcaacttgcagtgataactagccaaggctttgctattcgacttagcattactatcatcacaagttagaggctactccgaatcacaagaaacccctaactccctactagcttcctcgatcactcaacacgggccaacaccgcgagggaagtcacagacaacccttttcacccttctcaaagcaaaattaggcaagatacccaacgagtgcgagtcaacatccacttttctcttttcaacaagggtagttctcacattggtttcagaagtgggttgtcctcctatatcaataaagcaagcttttctcttattttgaccctgagtatcaaatgctgccagctccggaagataacactcttgggcatgaaagaatttggaaagagatcttctttcatcaagattatccgatcggtcctgccccacaacagagaggcacgggtccccagtaagcatcttctcatttaaatcaacattacacaccggcccacaagggggaacaccacgagactcaccccgtgatggcccagcaacattactcctcctcggcccaatagaagaagctccatccttcaacatttcctcaggcccacccgtggcacacaaggggagcccatctaatgatcccatacacacaggcccagttaagcaatccactaatcccccccccccccgaccccacatctcacaccatccttcttaaccgccaactccacccactaggacctttcaaaagttttttcaaaatttttcaataaaagccctcatttttccttatccctgtcaatgccattctccagaataggtagagggtcagccacctttccaacatcagaaaacccagtcacggcctcattaccagatttagccaaacaatttccattcacgccaactggagctttggggacccaaacgactacagcaccgttgtgggttgacaaacgagaaccccgagctatcgttttaactcttctcgaaacacgggcctgcaagggcacccaattcttggcaccatcaccgtcagaaagagtcgcagtcgaaggaggcgatatagtcaagggaccacgctagagaccccgagccaaggaaacgggtttcctagagttaccattaaagcagtctaagtagtttgagccaatgtttaaccatggaccgaacaggggggaaagcacgtccttgggcgtctgtaacagagtggggtccaaaagagagcaacccaagcactggtgaccaagacgaccacagaaatagcagaaagctctgatcttttcatatttaaacttcacccacgatttcacaccattgccaatattaatgaaacacccagagaaaagaggcttctccatggaaattttgacaagaactcgtagccatttcacccaggaagcaggtttctcctcgtccagatccacttcaataacactacccgcaagagcacccaagttattaccatttaaatcaaaaaaaaaaatccacaggaagcttgtgaatttgtagccggaggcgggtatgagaaaaagataagccattagacccaaacggttcccaagatttaagtaacagaagggagcctctaatattccaaggaccttggttcagaacccagttcctatcgtccaccttctcaaaaacaagttcaaaacagttggtgttgttggtggacactagaaccgggataacaagagcagggcatttccacatgtttttcacaaagtcattaatgcatttctcatccacgtgcacaggggaaaacactttaccaatgagacccagagtagttaagttattgacagttgatgcacagggagttaagtcgatagtggcatcagcaatggataaattcctaccaacgaccacctcatcatttcttaccaactccatggccaaaccaagaccaactaaacccgcagcacacacaaaacaaagcacaaaacaacactgtgcgagggaaacaaaagacagggccagacaaaaagcacaaaaccaaatagaggaggtgccaagaagtggggtaaaagaaggcacatatgaaaaggaaaaggagaaagaagacaaaaagaaaggcaaaaaaaagataacggaaagatgaaaatttaaaagagagtgacagtgtaaagatgaagcaaaagatcaaaaggagaccacaaagacacagacaataagacaaaggaacaaaaaggaagaaatgaggtcaaaagaatgcaaccacaacaaggacaccaagatgatacacccaagagacctaggaaggagagaggtggaagaccatatctcccattgcatcttctaaataatggcaactcaactagattagtttcactaataagccccctcaaacttagtgtggtagagaaaaccacacatagtttgtcccttagaaacagaaatttagagttggagatgggctttataagcgtgttagcaagctgatgatcagctggaacatgatgcaccataatttctttttgactaactttgtctctaacaaagtaaaggtcactct

SEQ ID NO: 224847 - DNA, 6400 bp, Cannabis indica
ttttttttttttgagatgaaaatcctaaaactttaccataaagagcattggctcttaaaaaggatgaagggggatcttattaaaaatttacaaagtaaatttagtaagattgtgggcaataacattaactctcttagagcaaatgagaaagacttacattattaaagagagctaaattacaataaatctcgtaaaactaagtctaacgacgattctaaaaaatattattgttaatcttacttactacattaagacaatcattctcatactaaatattatccagatcaaacaaatggtattggactccagcatgacgcaaaataagagcttcaacaacttcaaactaaaaatatccaaccatgtgtcaaatagccgagtatagacaaccccatgaatatcacggataactatactcatactagagaagcccctcgccacatctaacattggacaaacccaccatagaaggtacccaacgagacacgaggattgttatccgcattttcagcattggacaagtggaatccaagtcagcatctaaggcccattagtgggtctctcaacgaagataaagtgggccaagcccacttgtacatgtctttccaggaacatatcctagcttcgtgaccataaagtcttctgcccttggcgaaccatccccggaaacaattccggtaccacgagatcgaagggacgagacaacgtgttcctgaaacaccttccaatttccctttttattcctgcacataataaggaaactactgccaaatcgcaacagagcatcgtaccaggttaaatgaggaaacttcgtataacgaacattaagcaattaactcatagattaattgcccataatcaaagcacacggtgttgaccaaatcaagccaaatccaatccgcctagttagcaaatcgtctcccatgggttggacttcatgagacggatgaagtgtattaattactgtaaactccctaatagagggaaaaggaaaaatgaatgtaattctcaaactattataaatacccatcaaatcctacagattaaacttgagaacatatattctttgtattcctaaaggcttttacaagctaaataactactgaataatactgactcgtggactaaggctaattaacgccccaacgacgtaaaaaaatctttgtctctttttactccttctcttttaattatttgtttcttcagttctttatccatttttgaaaatctcagtaaactagcctgtgcagctagctgcaagaaagtacttggtctatataccacaggagtgtagtaaaaggagttcgaagggtccaacccgaagtgagtctgcgaagaagacccaaaaatcaagatacaccgagtatactagtctcatagatactcgagaaaatgagtacaatgcaacctgtaacatggtacattactggaagcctctgccaatgcataaatacagaaaacaaagaagtgattcaagcaagaagtgagaatatcatggggatatcgatcacaccacaaatgaatgtgactatttaaaagatgaaattgtgggattagtacggaatggacacttaaccaattgggtaaggatcccagtcatatatctaggacaggaagttgcacatggaaagcttttcattccaggatagcatggagccataaatcctcctcgggggtaagtcatccacaagttcctagaatacaagctccaaatgcacaagccattcaaggggcactgaatgctctagcagcagtagtcgctatagctcccagtcccataaatctgtaccttccaagagttgcattgccaatcttagatgatcatgtggcaactatctctggtggacctcatattgccggaagcactcaaaattcccaaaagagatacttgaataagttgaatcaaagtgaagcttgccacttggtacaatcaccttttcagcgtctaagacggatgaatttacaatgacttttacgaggatgacgccaagcatgtacattttccccacattgaccctctggtgaaagaagctcagatagcaaataaaagggtttccagaattcttgtggataatagaagccctgtaaacatcatttttaaaggagctttctaagtcgttgggcaagtgaaagccaatctactgccatgcctaattcaactacaagattttaatagagacacactgatccccatgggtgaaatataactccacatgagcatcaatggggaagtcctcggaagcaatacagtatcatcattcaagtataaaaaatttatgatagtcgatcgtctcactgtgtacaatgccattttgggaagacaattcttcatggattttaaagtagtaacattcatctagcatttgtgcttaaagttcccaagtgatactggaagcattaggaaaatcagaggagatcaaagaagcgcgtgtagttgctacagtgtttcaaccaaaactgtactcgtggtccaggaggggaatgactctgaagtcgaaacatcttccaagccagcactaggggtggtctagaaagagaacttgatccacgagctggcgtggaacatatcatagaaccaatggaggaagtggaagaagtatgcatagatgatggagatcccaccaaggttatccgagtagggaagaacctgccttcgacagtgaaggaaaagattatttccacagtcaaggaaaatagtgacatgttggcctatttcaataagccttgcatgattgcgtatggtggtaaatctgatccaatgtaccatctaagagctttcaacgagctaatgaagatgcaaaatgtgtcatgcaaggcaaggtgccaatgctttatggtcatacttaagggagttgcatataagtggttcaaaagccttgtgccaagaataattacatcctggaagaaatttttggaggaattccttcaacagcaccaggcagcaagtaattacgttatgcgtgtaacaagtatcaccaatgtgacgaaaggagaacaagaatccttacaaagctacatccaacgcttcaatgctagtcaccaaagtggggaatatgtctgaagatgaactcaagttcgccatagccgctagagtatgtcctccaagcacactatgggggaatatgctgaaaagggaattatttggcatagaaggcttctatgagagagcagagaagtacatccgtgtggaggaagaaaatagagtatttcaaacgaatactagccagtgttattcagaagctcatcagatctctacaaggtctattaggagatgcccctaacactcgtaagtcggtgcattcaggtgaagcttggctctacaacccgtaaaaattagatatccaagatgatcctcaaagtaaatttccattatgcaggaaagcattcctagcaatggcaagcttgcctttagtacattatactaaattaaaatgggaacctagtttgaccaccaaacataacatgtatttgagagatccaatgtctttcttattaatgaaatattaagttttcacctcatatatggcattcaacactctccgtcggtctgcttgacttgcttactatacttgtcaaccaatattttcaaattgaacgaagcagtgtaaaaaaaagagaaaaaaaaataaaaaagaggaatcagatatgactctaagagtgacgactctctaaaaggaatacgatcttctggcattcaacacgcactttaagtgccatgaatacaatgtaaggggtcgagcgctgcctaaaggccataagctcccttatatccaaggagtaatgattttcaagaattcaaaatgcacttttaatgacataaattcaatgtaagaggtcgagcgccacctaagggcgataagctccctcagtaaaattttgaatcttaataaaggttaagcgcgacccaagaggctaaatagctcccctaacatctaataacttgaaaaaggttgagcgcggcccaagagggtaaacaacttccttacaccctataagtagccggtaaaaggtcgagactgctcaaagagtctatactcccttcataataaggttacatcagaaaagaggttgacaaaagactccctcaaacaaaggatcttaaggcacaagtgcctaaagagacaactatagaactaagcagaagggatggcgcatgctaaacttagtctacaagagcacttaaaataatcttatagactagggggaaaatgttaaccctaaaaattagcaaggcagattttcaagattagtaaacgattagtcttgagaagggaaagaaactgactttaaaagtcaatcaagtagggttgatggccactcaatcaaatgctagcttgagagccacatggccatgtgaagaccatggtcacttgaccatgatttcaacaagtcactcggccatgcacttgaggaagtcactcagccatgaactcggaaaagtcactcagccatgcacttggggaagtcactcggccatggacttgaggaagtcacttggccatgcacttgaggaagtcactcagccatccactcggggaagtcactcagccatgaacttgaggaagtcactcggccacacacttgaagaagtcactcagccatgcttccaagaatgtcactcgacctgtagtttaggaagtcactcggacatgcttagccctaggtcacttggacatgaccattcaagagatcacttgtccaagatgaccttgaagtcacttagccaagccaagggagaatgtcactcggccatgcttggccctatgtcacttggccatgaccattcaaaagattacttagctaagatgaccttgaagtcacttagccaagccaatgaagatgatcacttggccatgttccaagctttcacataacccagccatgctcttgtcaatgacacaaccatgccaagtaggaactttcctaagtgttgaagatgaaggcaacgaaggtataattgcaaggacaaggcatgcatgcaaggtgggtacaaccatacctccaacaaattctgataccaaggagatacgagtagtggaggcaccacacctggaagtgatgacatccagaccaagagtgcacacaaccactaaccttgtaacttgggaccacctaacaccagacaaaggtacaaggcgcaagaccaccacctgcaacctgcaacctataggtcatggatatcaccatgtcccttacgaacactaatgtaccacatatcattagagcctataagtacccctcttgcagatataagaagggttaaaaattattgtaatacttcactccaagaaagcatttctcttactctatttttgctcgaaatatttctttaagtttttgaatttttatattttcgtcttcattttaagtcttgtgtctgagtttcaattttctggccttaagttagttgatgagtttttaccgtcaacaaatacccttaccatccttcataaaaggttctatatagtataattttgaattagggaaagaaagtttacctttgaaattggaccacaaattttttgatttatcaagaaattatgggttcaaacccacaacatgaacttcccattgaactacatcaataacataatcccttagtcgatccttatcaatgccaccatcatctctccttcaacctcaggtttatcagccacttcctttgcccacaatttcaaattacacattgcttaaaactcaacaatcacactcgtccatgggcctccagccagagtcatagcttgttccaaatctaatatctcacatcgatcatccaacaaactacttcaacaacaacacctatagaggggagctctatcgaagaaataggcttttgagacaacgacaagcgcctcgtcgtggaggtagttgtcctgccttgcatgccttttttcgagcatcctcgacctctcatcttgtcattctatgttcttaaataaaaattttaggaactatgtcatttttgtttatataatatttgcacataaaattttagaggaattttatactgaactcttcaaaaatagatgcactgatgtatttatttatttaatttttttttttgtatttttgagatccatataattctaatcttatttacatatatgacaatccatatcataattatttataggaattttttttgttttttttgagaaacttagaataattgaacgttctgaaaagaaattaactagtttgttatatgtgtgcttcttttattttataagcattttgagatagatttttttcgcgaggtgatagactatttgaatattattttttgtattacaatttatttaaatttctaaaaactttgtatgatgttttaagtaactacattatatatcatcatataaagataaattgatattatgattatttagatatcgaaaaatacaag

SEQ ID NO: 224848 - DNA, 3546 bp, Cannabis indica
attttgacaaaaaatcagttcatggtcctatttgtacaattttaaaaaatacggggtccattttatcatttaacaaaacagagagtttaataaataacttttgcaaaacaggtccaaaatagtatttaccctaaaaacaataagttaaaacatttctgtgcaaccaaacatattctcctaactttgtaaatctaacttacttttctcatgtacaaccaaacacaatcatacatgattcaaacaatcacattaccctatttaaagtttgagtaatgatatgtgtatacataaatcacacaaagttgacacaaacctatatggtaagtcacttttgtaggatccatcttaaataaaaatagaaataattacttgaaattagttgcaacataagtgtattagtttgtgtgtaagttgtgtgtgcacatatcattactctttaaacatatatagtttcacttctgtgtaaagagaactaatggagtgtttgtttcaatctcaggtttggcaggcttagcagccacctatggtttaaacctgaatgttcttcaagcttgggtgatttggaatctatgcaatgttgagaacaaaatgatatcagttgagagaattcttcagttcactaacataccaagtgaagcacctttaataattgaagattgtagaccaaaaccagagtggccaacagaaggaagaattgaacttgagaaccttcatgtcaaatataatccttctctaccagcagttctcaaaggtataacttgtacctttcctggaaataagaaaatcggagttgtgggtcgcacagggagcggaaaatcaactttaattcaagctctatttagagtagtagagccctcaggtggaaggattcttattgatggacttgatattggtaagattggacttcaggatttaaggtcaagattaggaatcattccacaagatccaactcttttccaaggaaccatgaggactaatttggacactttgcaagagcattcagatcaagatatatgggaggttggaaccaaaataatctttgttcataaagatcttatgattgtatcatattgtatcattatttcttactaaatgtaatctttacatttcaggttctaaacaagtgtaggctagctgatatagtaagacaggatcagaggcttcttgaagcacctggtatgatatgaagatttagttgatagatttttatttgttatccttgttgaaaaacttctttttaatcctaaaatgtataatatctttcagtggctgaagatggcgaaaattggagtgttggacaaaggcagctggtttgcctagctagggtgctcctaaagaggaggagaattcttgtgttggatgaggctacagcctctatagatacagcaacagataatgtgattcaagaaacaataagagaagaaacaaatggatgcacagtcatcactgtggctcatcgaattcccactgttattgataatgacttagttcttgttcttgatgatggtaagccaaaaagtataatcagatagcaaaagctttattttttatttttcctttaaacctttcatgttaacatttttgattcacaggcaaagtgattgagtatgactcgccaactcgatgcttgagaatagttcttcttcattctcaaagttggtagcggaatcttaagaagatcgtccacaagaagctgcgaccgagatctatcttgagatcaggcatgaacccctctctgttcttccatcctagactgaatttcgatttcttgtacatggtgatattcgtccatcaacttctctctcaccttctaacatcataacaacatagattttagccaatagaaaacttagtttagaaattattggttctgagataggtaattcaaaattgtaatctttcactttcaataggtgtttgtgattaggttggtagcattgaagaagagcaataaagctgaaataataatggccttaattttttatgattttgtttttgggagctaatacacaaagtctccctctcagacagttaaacatgactaagacaagccaagatgtgtactacagtaaccccattgctcattgtccatgcttttggtaaagtggtagatactaagaagttgtggacattgtacactacttttcactttgtcttataaatatctaaccccatactgaagaaccaattcagtgggcacatacgtccactatttgagtgccctgaaaaaaagatgagaatcccaaaagcaaaagaaaaacaaacaaatggaaaaaaaagctttgggttgtcaaggaattcagaaacaggacaatgcagcttccatattggcctgaactgatagtgaaatgaaaaagatagcgcatattgccaatgggaacaaacaaaagtatcattaagacaaaaataaatacaataaagagggtgatccagaatctaaccgttttgaaaagataaacttttgtcgtaattaatttccaagaaatggattaagaatgtgagattgacatatgataaaatttggtaaccatcattgttttgtgagatgtgcccaaaacaaaaatggtgtcatatactcaatgaaagttcatttgtcaaaaaaagaaaaaaatggtgtcatatacagttacaaaattttaattaaaaaataaaaacacgtcatctatacaaaggaatggtattgggtttgggaagaagggttcactatgatcttctgatctcctcggtcagaccaagaacgttatctagttgaaaagctaataaccttttactgctaaaggagaaaatggtttttatagaaatgagacccaataaacaaccattaatgaatggagaaaacttcaactcgactgtaacaattttttttcattgtcaagaacactttttttttagctaattaggattttttttttcccgaactttgacatgtacatgccttgaagatttttgtctaatttcattcaattttactgtttcaattattgtttatgtactaaactacactcaccaaacttaaatatctaccaaattatgtccctcaaactttaatatgcccctcaaatgtactaaattatactttcatctatgttcaaatttttttattaaaattagacaaaatccttaaatctaacaatctcaataattcaggaagaatttttaacgacaaaaaaaattcagaaaacataatttaatacatgttaaagttccgagagaaaaaattttaattagccaaaaataaaaaataaataacatatcaactttactggcaaagactgctaccaaaatagaaataaaaaaaaaaattacttggactaagaaatataattgacaataaagtcacatcattatcatgataggccaaacttgcaagaacattataggtttcgaccaaaatttgattgataatatcatcggtcaagattattactaaaaacaaattataaggcttttttgagatctaccatggatctcatcaataaatgtaataatatatgagcagcctaaaaagaataacaataatcgagtatatgaatgtgatttgaaaaa

SEQ ID NO: 224849 - DNA, 4246 bp, Cannabis indica
ataccatattggagcttgtgttgtgttgcaccattgttgagaagagtgaaagaaagacaaagatagagaaagattgaaagagaaagacagaaagaattttcttattgaaaataaatcaacacagcagtatagcttatatacaatgctctagtgagctcgccagaactgtaaccgaaaggtacagctgtacaaagagtgtaacaaactctaacaaacaaaactaaccccttaaccaacttaactaacttcctttactgtattatagcaacttgtcattcatttcaaatggaaatgaaatcatccatctggttgagctaagatggcattgaacttcaaaagtcatcctgtatcacttgcgacttgtccacttatcatgcactcctcgaccatatatttattttgtttttgtgcaaatgatcattcatttaaggtggcgagattatataaccagagtagaaacagctaaaagtgttgcatttgcatatagtaaaaatgaatgatcggcaatattaagtatattatccaaaatgataagctctccttcatttcatttaattactctactaccttggaagtggaccagagtctatatctacatgtatattttccatgagctctattgactcaatggcgttaatgttgttgttagttctagctacctgcattgccaagcattgttttagttctgccactatctgagacatatttggtcgtcttgtggaagtgggagatacacaggccatagccacttctgcggttttccaagctgagttcttgttgaagtcttgctctaatcttggatccataatgtacttgatgtcccctttggagagacaaaacttagtccattcgataatatgctcttttccattgctcttaaagattgcttgtcgacctgtgataatttccaacagagcaaccccaaagctaaaaacatcactcttctcagtcaacctgttcgagatgaggtactcagggtcaacataacctggtgtgccaacaacaagggttgatacatgagtgtcatcttcaagtgcaaaacttctggacagtccaaaatcagagagtttggcttgtaatttttcatccaataaaatgtttgttgtcttcacatctctgtgtataatgggtggcttacagccacagtgcaaatattccaaccctgagcattcaatgaaaaattcattaagaatgagaagtataaaaactccaaaattacaatgctaaagattgtgtgagcttattcaataccttgggctgcagccaatgctatttcaagtctctcttcccaactcaatggatcttcatttttatctgcatccatggtaatgaagagtatgtaaggttccataacaatgaaaacatcgtgttaggatggttagtatgatgaaataccagataaatgccatgctaagtccccattaggcatgtattcatagacaagccccatattaggtccttcatcacaataaccaactagagctgtcaagtttctatgataaacttttgtaagaagtttggcctgtgaaaaaaacagttgcttatcattatgctgaacttttatctatattttcaattatcaacaagatcatgcaaatgatgtgattgagtagtgagttacctctgtcctgaactgtgtgaagccttgtgccgatgaacgagagagcatcttaacagcaacttggctgcctttaaagtaaccatggtaaactgttccaaatcctccttttccgagtatgcgcgcaaagttggtggtcatacttaggacttctgagtaggtaaactgatgtttcttaagctcaaatgcttcaccaagttttttagattctgactcaacattgacattcaatactgttttatctgataaaggatgtcaaagaagacacataaacaacttaattcattacatttcaatgaaaatcaatacatgtttattaggaaaggattatcaaccttgtttcctctttttaaggaaccagaagataagtactacagctgacaagaggccaaaaaatccaccaactgatgctaataccgggacaagaatcttgttgttgtccttagccttcttctggcatggaactgatgatagacaaagaaatgaatttccatccgttctttgcattcacaacataggaaaattttgatgttagttttgatattttttgtattcatccgaacacatggaccatgagaacaacaactgacctcaatagcattgaattgttctttagcctttcttggagtccttttgggagtgttccagagaagttgttttgttctagatttctgttaaagcaaggaaatagtaatagttagctactgtataaatataaatcaagcaagtgaaaatgtagcttctaaacaatataacttacaaaactctcagagttggcatctgagacagaaaatcaggcactgccccagttaaattattgtttgacaaatccctgaattgagaaaagataaatgtatagttgagtgtacatgtgttagctttttttttttcataagtgagatacttacaactcctctaacaaggtcaggttgaatatatttgaatctatctgtccagtcaatccatttgaagacaagtttctgggacaatcaatagagaaactctaagaaaatgggcttatatggcctgaaatttgtgttgttaatgatttgaagcaacaacttacaaagatataattcttggtgaatcaaaattagtgaagctgcaattcagaccctcccacatgtaatttcttggttcacatggatctccttgccaatttttcttcagattataatttgatttaacattcataatgccatcaactaaagttttcaatagtaggaataagtaaaagaatgttagtgaagaaaacaagagaatacaaaatgagaattcttgttagaagttagtgcatttaccatcattttggagtgtttctgtattttcaagtattttttgtgtgtaaatctcaatggcattaagtaagggtggaagagttgagttttctgttctgtttactataatctgtaaacttgacccccttgtgggatttacactgtatattgtacttaaactcaagtaatttggaaccaatggcccataaaacaatgtaccatttaagtatatgttgagttctctagtttcattcttgctatacttttggagctcagcaaaatgtagataaatataaaaatcttcagggttttggtcaacagtactccaagagatgccaattacatcagtttcattctttggtgcgaccgcagttcccataacaacagctggtggctcataaaaattttgtttaaattcaggtgatgatgatgtattggttataatattccagtcttgaaagttcaaaggcttccatattcgatccataacatcatctctaaacctaaatgaaacaaaagtacattaaccctttacattttcctttttgactagggaaaatgactataatgatgagagagagagagagagaaggaggtcatacctgacttgattaatatcagacgatgcaccacaatctacccttgcaaaaagatccaaggtcccagtttgactaacataagtattttcgttcataagtctcagctctaatgctgatatgaaaggtgtcccttctcctgttttaaccaaacaaacagatatataatctgactgtgaaacatgtatgatttcatgttctattgatttggttggattttccactttcactgttctccacttgttcactccgaggtacaagtcaaactccgggttttgactcaacccatcatagtttccgtacataaactttgctcggatcagatatgttcggtttttgccccctcgaggtttaagggtgtaacaatttctttgtcctcgtggaaaaaatctgagattattcaattgttgttcgaggttttcggtattgaaaggaggagaaatgtttattatttctccagtgtctatgtaattaacatctgtagagtacttaattcctgttatttgatcaatatagtcttctgtagcaccacaatctatgcttatgaaatctacagaatagaagggatcatagaacatgttaactgattgtaacactagtaataaaattgaataaaacagtattaaaaaaaacctgattggtcagctgtaacaattgtgagaactatagcagctttcaatattgtcaagaaaaagaagagattagccatttttgagtgctcgatcccaaaacagattattctttttttttttttt

SEQ ID NO: 224850 - DNA, 11267 bp, Cannabis indica
agctctaataaactcctcatcccattccccatttcctttcatcaagtcgaccacatacatcccctccggtagcgaaggtttatcataaaccttgaatgtaaccggcctaggcagccacgggtcttcaagaacccgaacagaattcccattccctattctccacctataccctttttgaatgattttcttcccccacaccaaacttctccaaacaaaggaagcatgattcccacttttagcctccaaaaccccaacatttggaaaataacttgcctttagcactttactacacaaagagtttgggtaccgtatacatctccatatttgtttggcaagaagagcttgattaaaaagacccaaatcccggaaaccgagaccaccttgttccttatgtttacaaagcgtagaccatttgcaccaatgaatctttgcatccttttcagaggaaccccaccaaaaccttgccgccatgctatgaatgctattaatagtttttttgggaagccgaaaacaactcatagtatatgttggaatagcttggacgatagccttgatgagaatttctttacccgcagccgagaagaaagaccccttccatcccttcaatttattccacacctttgtcttaataaactcaaaatgttgcttcttagttcgcccaacaaaggatggtagccccaagtacttcccataattatccacgaccttcacacccatcaacgcagccaattgactcttcaacggagcagaaacagttcgtccaaaacacatttcagacttatgaaaattaacaacctgacccgaggctatagagtatttttccaacaattcttgaaaccacttacattcactttccgtcgcttccaagaacacaagactatcatcggcaaagaacaggtgcgacacctccactcgctgcctaccaaacaccaccccatgtattcttccttgttgttcagcatgttgaattagacaagaaaaagcttcagcacaaagtaaaaacaagaaaggagacagcgggtcaccttgtcggagccccctttgtggagtaacgcatccttggatctcaccatttatgagaaaagagaattggacagttgtgaggcagttcatgatcttcctgacccatagccgactataccccaatctcagcatcatggcttctaaaaatctccactccaccctatcgtacgccttagccatgtccaacttcagagcaacttttgatccattacgaaaacgattcttcctcatcacatgtaaactctctacccgacaatggcattgtcatggataagccttcccttcaagaaggcactttgagactcagaaaccacaccgcctaaagagagtctcaaccggttagccaagcatttagaaacaatcttgtaaattacgttgcataggctaataggtcgaaactcttctaccttctgtggtttatcaactttcggtatcaaggccactacagtatcattaatacaccccaaatctgccccatgattgagaatattcaaacacacggcaatcacctcctccttcagttgcgaccaaaattgttggtaaaagagcgccggaagtccatccgcaccaggagccttagttggattcatctctttcacagctttgacaatttcttcctctctaaattcggccatcaagttctcattcattgcatcagaaacctttggttgaaccacattaatgacctcatcaaggacagccccattgatatctgatcccgtgaaaagtgttctataataatcttccacaatcttgcacactagaaccttatcatcttgccaaatacccatatgatcttgaaggcctttaatctcattcttcttacgccgcgaagaggccttgtgatggaaatatttagtattacgatccccccatttcaaccacaaggcacgactccgttgccgccaatactgttcatctttttctagcaaaccattcagcttatcctccattttttgaatagtctcccataccccaggattttgcatcatagtaagttcatgaagggccttttttgtttgctcaatctccctagttaatctctgtttcttctttttgttccaatcattcaaagctttgccacacttattaattttacaacgaaaagcatgtggccgacctctactaccactctccttccataaactatccacaatttccgtacactcctcctcttgacaccacgcttcctcaaaatgaaagcggcttttcctcttagttttcccacatttattaccgtctacccgaattggaatatcaacaagcaatggccgatgatccgattcccaccaatcaagcaaggaaatatcagccccttcaaactgagctaaccactcctccgtacacaacccacggtcaagccgctccataattggggaagtaccatgttcattacaccaagtcagatcatgcttcactgaactgaaatccataaaccgacaatcatctaaaacttccttgaagccgtccatcacccccggaagtctatctctaccacccactttttccgacaagcttacaatttcattaaagtccccaacacaaagccatggaccctgaacttcttttcgcaaatcccttaagagtcgccaagaaaagtgtcgctgactagcatcaggatttccataaaatcctgtaaaataccatggcgtaaatccattacctgcaatagtagcaagaatatgtcccggagaactggataaaacttgcactttaacatcatctttccacattaataccagtcccccactcaaccccactctatcaactgtccacaaattcccatattgaataacactacaaaccctccaaagtactccatattatattgtagttataatatgcatcttgtctatgtttaagaaattttgaatactgtcgaaaataaaattcaaaataatttgttggacaattgcatctgaatctttgaattctatgttcggttttataaattatttagaattaaagaatgcctacaataaatataatatatattatcatataataaaataaattaatttaaaatttctttatactaaaaataaaaatgtccctttgataaaatatctttaatttactttattaatatgatgctcaaaatcttgtcgcaccaattaatcatgaaatgttatgttagagcatcttcaaggtgcacataaaatttagtgtcacactatcattaaatttagtgtcacactatattttatactatttattattatatttctttttaataaaatacaatattatttatattatattataacattaatattatatacattttaatattaaaaaaaaaaacaaagtttaccgtagctacagtacaactgcatatatggagtactatagcaaatcaacattttattgtcaactatgcaacttagttggagatgaatataacaacatatttaatgttttgctgttatattagagatgccctaacaggatgttaattaagtactttggagaactcccaacaactattcttatttattttttataatacatcatcgaattttacttttctattttacatcatacttttatacttttatgcactaccttttctattttgtttccttcatactcttatcatttagatcataattaataaaattagaatgaattataacaataattattaaaaaaaatgaataatgggtagtgtttttttagtcatcaagaaaagaatttaaacaaattaagatatttttaaaatagaaaattgatttacttcatctttttacgattattttaaactagatgctcatgtacaattacggagccactcattttgttagggatgtagccctccctaaaaaatgatatgaatttttatatgtatagcatgttaaaaaaatttaggctaattaggtattttttttttcctgaaactttgatatatactaaattatgccctctgaacatttaaggtcgttaaaaatgccccttgaactattgagattgttgaatttaaggacttttgtccaatttcagtaaaaaaaaatctaacatggatgaaagtttagggatcatgatttagtatatgtcaaagtgggacatgatttggtagatatcaaagtctgtggagcatgatttagtacataaacaattactgaaatagtaaaattaaatgaaattaaacaaaagcccttaaatctaacaatctcaatatttcaaggagaatttttaagggctagaaaaattcagggcgcagggggcaaaaatcctaattaaccacaaatttatatatacataaatattatcaatttgcctcctcattttctaattcctccctccgttagtgctcatgtataaaggttctaactcaaaaactaatttgacaacaagtagtgtaattcatagtttttgactatgttatatgataattgaacaaaaatagatcttattattagatgcctagacatttcgatcaatggaaaccatgtagtggattattgcttgtatagttacattgtatttagtcaaataattaattttacagtataacacatggtaatgatttcatttaacctaaaatcaactatatttgtgtttgtaggaagttgagtcatttgctggtcaagtggctgaatatgaggatagagacaaagaaaaaccaaaagatagatttacacgaaatcacaaacaattaatgatcaatggagaaatatggatgaaagcaacatcacaatcatgtacaattgtaggtgcacttattgttacaattatgttcacagctgcatttacagttccaggtggaaacaatcaagactctggctatccaatatttttaaataaaatcttgttcaagatttttatgtcctcagatgcaatatccctcttttcttcaaccacttcagtgttaatgtttcttagtattcttacctctcgctacacagaagaagattttttatattccttaccaaataaaatgatcataggattatgtactcttatcctatcccttttaaccatgatgatagccttttgtgctaccctttctatcatgtttcaagcccaattatggattcttgtacccgttacttccttcgcttctattccggttttattttttatatgggttcaatctcgtcctttacgtcaaatgattatgtctacttatggaccaagtattttcgataggaacgtcaagccttggttgtacaacaacgatggctagaaacaacaaccgacctagttctcatatttatatttggtttacttgtaagttttacgaaagtctcattacttttatatattttttagttagaatttagaggtgtgtaatgatacattttttttaataaacattatatttggttttgttggaatatgtttaattttgttattactcatcaagcactaacgaattttatcaaattaatccaaaagaaaaactaggttaagaaaacatataatggagtaacaatgcaaaatcaaaccaaaacttttagaacaatcccacaaaaaatgcttaaaaaaatgtgacctttaacattggggaaggtgactgtggtgtcaaaacacctgccaagaatcaataagatcaagaatttattataagccagaaatctgaaatctgctaagtaaaattgcacaagttgtaacgagattcatcacattttttgtggtgcctaattctcgagaggaactgccctttaacaaagcttcactaaaggagatgtataaccgagttactaggattgaaaatcgaattagaaatctcgacagcaatggcatcttgcaccgaaattagctcaccaaccctcctctctcttttatctacttacaaaggaaacacttctaagggaatcaactctttatataggctagcacaaagagttgaccttgaccccgaaaggactccactaaactaaccgactaaccaacttaactgacaagttagttaagttgttttgaagtagaaatcgaatgtcaagtttctaaaaccccacagtgactcgttggtgtcaatggcttgaaagattatcatatttttatgagcacaagttcttctagagtatttctaatctggaaattgtgttcaaaaagcagtagaataaagctcaatccacttcatacaatatataaatataatcctattcttagtagataatgatatgtaatatcaaaatatagaacagttgtgctgaaatgaaaagaaagagcacaacagtagtaaataaaagccagcagaagtagccatttatacaatgtaattgattctccaaacagaagttttatcagattcttcaacagttttctttgaagcaaaagttataaatatatgtaacatttcttttgataaaaggcacccgaaaacgtgtgcttttttttcgactgcataaaaatgcagaagaaagaaaaacacttgacaccttacaatctaggagcaatagcggtacgagggctgtcccattctgtcacgatgtggttgcgggtgatctccttgagcgaacggcaaccacttaacgccatggtcagctcgaactcatcacgaagcatttgaagaactttcctcactccagcctctccttcagcagccagtgagaatacaactggtcttccaatctgatacattgaaacataacaatactaaatcagacaaagtgtttcgtataataatggtgttaagaaaaggtttgcattatgtacttacaaatattccagaagctccaagagccaatgctttgaagacatctgttcctcgccgaacaccaccatccaggaaaacaggaattcggccttgtgcagctttgacaacctaaaacattccccatacaaaacttgacattagtatactctgcaagttaaggttatagaagctgagatttcaggacattacctcttccaaagccgtgatagttgcagggacataatccaactgacgagctccatggttggagacgataattccagcagctccagcttgaatggctatcctggctgcatttttttttacagaaacaattaatggacatgtcaataaaatctagagaaaaaaaaatgatggtaagaatgaaaaggagttggtatgaattgcttactgtcttcagcagtgatgacacccttcactagaattggcaggctggtaatagtctggagccactgaacatcctgtacattgattgatcaagagaattctcagtagtgctactacttctaccccgaaaagatcttataccgaaaacagaacaagaaaaatacactaccttccagctgagggacctgtcaatttgtccagcaacatatgaagccagtccagagtcactactctgcagtgtcacccaacaaatgaaaattcaggacaaattatgttaaaacaactcttgtatgttttgttttgttaccacggttttcctccgccataattgaggaggagtctcttatttttgttgaaaaaaatatgttaaaacatgtaaaggaaaataaattgaaaggtcatatagttctcacctcatccatttttccaaggtccaaaccctcaaagttcttcagagtcaaaaatggtggcaaagtgaatctgcaatagagccataatattttgtatcattacactagtttcacagtgagagaatctagctaaataatctaacaccaactcttgtttagtattagaaaaagaaattggttgtaaatgaaaactacctgttcttgatatctgcctctcggcggccaagtcttggagtgtccacagtgagggcaattgccttgaaaccagctctctcggctcttctgacaagttgtgcaacaacattcctgtccttgtacacctgaacattttgaaccagcatttgattttaagcacgggagtcagaaagcgtaatccatgtcgaatacactttttgcaagaaaacatagaacagaaagcttacatagagttggaaaaaccgaatcccaggtcctgttgaagcaacttcttcaacactggaagtagcccatgaagatagagtctaaaacaacatcattaattcataaactgaatgaggttgccataaaaatattgattgaatttcaatagaaaattaaaaaacacttgagaaaaagagaccaaaccatgattgtgccagctgctgatgctgctcttgctgttgcatactcccctgaatcaaaatcacatcacaatatcagccataattcccaaacaaagaaacttgtgtaatagagttaagtgtaaagaacacccgagttcataccctcaggatgagccatcttctgcatagcagtaggagcaatcatgattggcattgagattttgaatcccaagacagttgtgctcatgtcaatcttggttacatcaatgaggatgcgagggcgaaacctatttcaatcaaacgaaaaattacatggaagcttaaacatactatcaattttccaacactttctgaagtaaaactaagaaattacttctcattttatcaaatgaaaacatattacagcaagtggaactactgcttacaaaatccttgagaaagcatttcggttctcttgaagagtccactggtcctcagcaccggatgcatagtagtcataaaccatcttaggcaacttctgctttgcaatggcgtcatactcggtaacattagtgatctccatcttaacaagttctgtatggtattccttgaattctctgatcaagaaaacaaacaaaacatgattagtttaataaaatcaaaaaaatgatatcatttttcatgtttggattctaacaaaatattgagatacagtattttaagtactcacttataaaattctaggaaaatattttcctaatcttttctctaacaaaatttatacttcaaaaaaatatcaagatccaaacaagaactaaagataagtataactcatcaagagaaagaatactaatcactcttaagcttagaaaacgacttaatctaatccaaatccaaactttacactaaatttgtttcgaaagcataactgattaaggagaaacagagagagaaaagctatgaaagcgactaaagttgacaaactcaatattccaaatgcaaatatggcataaacacaggatgacaataaatgaaacagagtaactatggcatcaatttcaagctcctgtaaatcacagtttcaaatcccagctttttcatcaatacttgtacaacaaaacaatcattctactattcagaagcaaagacaccatgacaagccatagccttgtactacaatactcttactttgctaacagcaaagtatgtaaggccccactttacatgtaaactccaaaagcatataagagattatgttaattaaaagcttattaagaagagaatttagagttatgtgactaagaaaatccaaacaatcaaacatgtaatataaacccatttcaataaggaaaaagctcagtgagtcactgtatcaaacatgtaatattcataaatacacaagtcaaaattttagtagtagaatggaaattaactcaatttaatgaaaacccaagtctaaaaatatgaacttgaatcaatggtggagtaaagaacaaacctttatggctctcccactaaggaggaggaagagaaactaaaaatggatgaatgaaaagctcaaaagataaaactttggagaagaatggaaaataaaaggttaacaatgtgatatatacaaacaaaaacaatgaaaaaaatagaaaaatattaatataatgacaaaaaagtctgtgtcatatctcatatgagagagagaagaaggactaagtggattggtttttcaaggtaggcatttgagaccaaatctgtttcatggaaatgtgagaattttatgtggagacagttttgttgatgatcatttctctccaatactcagaaaataaaattaaataaatatattttttaaaaaaataaataaaaaataaaaatgaagataatgaaaaaaaaaaaaaacatatcatattataggttgtgtatgaccacaaatggctattgatttggcattttcttctctcttttgctaactcagttacatgtggcctcataaatgtggttaatttaggatcatataataaaaaaaatatatagagagaaatctaaataaaaattaattaaaaaaacttatgtttaaattaatttaaaaaaaaattatttttttatttacacataaatatttaaatttaactttcaattataaataaatatttaagtttaattttttacagtaataatacttaaattataattcttaaacttatgtaaatacttaacttttaagtattaaataaattgccacgtgacaattcctgattggtccaagtcatgaatttttattttttttaaaaaaataatttaaatctaccaataaaaaaataacacgtgaataatgacttgacgtttaacggtcagatacctaagtattattacggtcaaaaattaaacttaagaatttatttacaacccagaattaaacttaaatatttataccgcaaaatattcttaaaaatataattactttgaaataatttattttgaaaaagaatcctatattgaaaaacatgttgtgattcatgtggggcactaataatttaatgtcaccttatattatattatagatttttttcttttgatgaatatattatattatagatcattatatacagtggtataaggtttttgtttttagcttaaaattataaataaacaaaagtttactgaaaatatgtatagaataaatcacataatcattttggtttttggaacgtccacttttgtagtatttttcttttcttttctttttttgtacaatttttttattttttggtaatattattaactaagcattaaattggtatttgccaaatggggacagagtaaagttgatattaagatctttatttttttcaaataatattaaaaaaaaaaaaaaaaaacaaaaaaaaaagaagtcgaggaagaagatgtgatttactaagaataattactattttaatttttctattttgcaccactattctctaaacataatttagcaaaacattacctataaactaaaacattagagaaaaataaaataatggtaaaactaaacattttgccaaaaaaagtagtatttttttttttgaattttgtaaggagaaatttaagagcatgtttgatattattttctgttttttgttttaagaaattgtttttagaaatgagacaaaaaaatgtttttagagtttttaaaacacaagtcacgtttggttagtgacttttaaaaataatatggccaaaaatgaa

SEQ ID NO: 224851 - DNA, 12566 bp, Cannabis indica
ttataccttttattcaacaaaaatacacacaaacacaaattagtgaatattatcaaatctacttattgtaaatcttaaaacaatgatacctatcaaggatatctaattattcattttttcgaacatttatagtctctattgaatagaacgtgaaagcatgcaattccttgtattaagaagtattgaatcaaagctagcatcattttctctgtaaatgctttgctgctagagccgagaggcctccttggggtgttgatggctgtatttgggcttcagcagcgatctcttggtttggtggcttggctaggttgtccatggctttttagcattttggtgggactttcatggtgagggtttgtctgtttggtagcagtgggcacgaacatcctgctaagcattgttgcttcggctggtgcacagtagtgcttcaatagcttgtcatcctcagtttaccttttaggcacgattgtacttgacatgataaaagtacaattactttgtttcatgttattactttgttgtccactttcttttcagtttagcttgacctctagagctttgttcctttttcactaaataataaagaaaaagaacattaaaaagcatggactacttctcataaaataaaaagtaaaatacaaatgaaagcatgccctaagacgtgggactttacgacacagaaaccaattaggtagttcaactaaactctgttccaaggaatcgaagaaagttcaaaaaatttacccccacgttatcccaaaggaagaaaaactataattctaacaaaaaaagatgcatttaactttttataaaaaaataatgcaattgctataatgccaaaaaccaattacaaatgacggaaacattaaagagaaagcattgcattgctctaacaaatccctctcttgtttcccaaatttctttcttttttgctctgtctcctatatctttttttgctttccacctaaaagctgtacaggttagcctagctgtcatatatctacaactataatcggaccctactcctggtgttaacggctttcctcccactactactcagccttcgacctccaccagcccaatcatcgtcgtcgtcgtcatcatcatcatcgtcgtctcctcctctggtcattggcagtggcacagcagctttcctcacttttctaggggttgggcgtttcctctttatgtttgctgtgtaagttgagtaatcaacagtatcttctttaagtgcgtttttgaaatcctgtacaataacaacaccagtgatcaaaaagtgcagagacagctctgacagatctaagagatgaaattgagagagagcaaagttcaatcattgcttccagtacctgatatatttctactaattcctgataagttgtgggcaaggttgtccgtgtgtcgctgatgttaaagggaatgctttgcctggaaaatacatctccagccttaaggggttcatttggagaaaaagcctggtatcataaaaacaacgacattattcactactcccaccattgaaatacaaaactcgcttgtctagtgagggtctttacctgacaacgtgcatcattcaagctataaactatcttaaggtgtctctttaacttcagaagaagctgcaaggcaatagcgcacagacaatccggctgtagaacacagaagatgagagttacaaaaaaagtgttttatctttaacagaggaaaaatgataaagtataaattatacgttacctggattatctgctcctcttcttttgatatgccagaagattcaccctgatctgaggtaactttcctatcttccggctctggttttactgtaccattcaaatccactaaaatcatatgattatgagatgctacctcttcataatttgtctcactcatgttcatataagccatctcattatgaataataggctgggcactggattcatctctaacttttccattctcacgagaggcaactctttgtgaaagatgcaaactcaaagctttcagttttgcttcgagggcaccagccctaacttgtattactcgatttatagcataaatcaaatagaggggttcatcaggtaatgtaaatggtagcaaggctagaacttctgtgcagtgcctgggaaaggaaacaaaatcgttagttcacttggaccgaaaggagctctacaactagaactagacatttaacttacatcaagaaaggtattacagaagtgctccaatttggattatcaaatttgcggacaatagatgacataaatttgttccttgaaattcgatttccgcgaataagcttgtagatacgagaaactcctagccttgcttgagtcaaagaagcaggatcagttttcccctttgcattgctagaaggtttggtggcgttcacatgcccagaactcgagctaatggattgtgtaaatagaaaagacatttgaaggccatcccctaagcggctctcaaaaaacgcagggtacctataaaattgtttttagttcaatgtaaaaggaaaaagagaaaaaaagaaagagccaaaagcattaagagaggaatacttttcattcatattcatgagtaaatgatgagccaactttgagttcacttctaaaggatctgtctctaatgctatgaggtatggaacacacgtaattggatgaacaagaccttggcgcagaacaacttcaacaatctgcattcaacatataattatcataattactataataaacgtgtgataatgataatacaaaaaacatataagaataataagtgtgccaaccattctaataatcataattactataatacgtgtggtaataataagactaatcatataaatgacatcaaattagtgcaaaagggcataatacaaaataataatcatatctcgaaatatagtcaaggataataccagacttcacacatttatttgatacaaataccaacaatttaaaatagttttttataacaacataatagacagggtttttaccttaagagcagtttggcgaatttgttcattaaaatccaaacatcttcctaatatgttatcccaatacaactgaactataccaccacagatattagtatctccagcaccagcagcaacaggtaccacttgaccaccttctacagagtaatggactgtcttgttgtcaacagcatctgctcccaattgactttccgcatcaagaagatactcatacatattttgcagtgattgcatctgataaatacaatgattagcaatgtgataactgctacaaagtaatattaccaacagacaacgttaccttaatgcgatcatcagagcttgatgacagggtcacctctaacattttcccaatatctttttccaacatgaattcaggccttgcaattagaacaaagcctaatgcctgcaaatgtggaaaggaacattatgaataaactacatagataagaaagtagggaaagagatggaaaagagatggtagctcacctgcaacgctctaacctttagcacaaaatcatccatatgaagatactttttaaataagttgatactgtgtgctacatcaaccactctactaccggagctactcaacaaagaatggccatatcgaatgagcaatccaagacagaaaagagaccggcccacctgctgagataagcaaaagtaccaacatttataattattcatgaaaaattgctgaaaggctaattaatataatccagaacttatagcaactacagatatgtgctctttgaggctaaaatgccaaaagtcaagttagagatctctaagaattccaaaacacatatatgcagaaacctttccagatttgatcctttatgtactgcctattgagaatcttaaattaagctatagaaactccaggtgttgtcaaggtcctgtgcaagtcaagccccacaagcagtgaagagaaattataccaatccacaaaaatactggagttcaatgacaatctatgaagatgcaaataagctcagaaacatagctgcttgcccacaatcaaagttcaggcttaccaacaaagaaaagactgaaaaaaagaggatcaaatccaaaatttcattataaaatgggaagtatgacactagagcacagtaaacaccatacatatgtcagaaaaatactaaaactgcaaaacctcaatttcactaagacaataaaatgcaaccagaacaatatatattttcattcttttcttgaacagaacaattaaaaatacgttcttctcttgattctagcaaccaacctgcttgttctcaactgccaaagcatctaaacgtttgaagaaaacctgaatgagatactctactacagtagcaccttttccagcaattctactcacagcacataggcacctgttcaaatgtaaatatgagagatatagaaatgcaagtctcacatgttgagtaaaaatcagcatggacatacacattatcattacagagtgtaaagtaaaaagtaaaatctactgctaacatactatgatacacaacattgaatacaggcattatgactacaagtggggaatgccacacataattagttcacttttctcccactgcaccccagtagagatgacataatcttctatttaactacgtacacagtagttttacagaagaggaatcaaaactgtcttcggagtaactactgcctccttatataaagtagtgtgcatacatggaaacagtaacagttaagaaaatagtaatttagaaaggaaaaaaaaagcaaacaaagttacttgatgcaagcatggacaacagtcaagaaggaatgtcgaacaatcatatgcttcaagtcttgctctagttcttcaataacactttgaggtaactttcgaagtaaagggagcacagaatcaatgatatagattatgctctccaataactttgccaccgctttattatcagactgaacacggaaaaaaaaaaacgagtaaaagaccaaaaatttctgcatttcattcaactgaaatatacttctgtgaatttgtatatgctcaaacttggaaaaaaaaataaacgaaagggacttacatgactcttaagataaggctgaagagtgaccacaaactgtgaagggtctgaagctggtgcacatattgttggatctacagtgcaaaatgaatgcaaaaccagtacatatgaaagtccacgcatttctatttcctgcccactcatttcctccacctaaccgaaaagaaattctgaaagtaagctttcaaatccaaaaagccaatagtctagggtgtttatcaaagcacacaaatcaccatacctgtaatatcctttccaataagcacttgcacattaactcacagcgcttacgaactgatgcaagtgactgtgggttgataccaattgctttagctgactgaggaaaaaaatcaagcactaagttacgtgtaatgacagtgaccagatattgatggtttggcatcctcttcatcatctcaacaatctgctcagtttttctggccacctccaatggaacagaacttccaactccatagccttgcatttgtgaaccagaaggttcttcaaaccaaaactcataaaatgtcttgcaaacaaggtcctgaaaattgggaaaaacaacttgataagcgtatttcctcaacgccagtgctcagtttattcctaacaactttctgcgaagaatactggtcatatatacatatcatcattgaaaaaagtttttgacatgacatacttatctcttgagaaaatgtagcacaaccccctatccacccccaaccccattatttttttttataacttctattacctgtatgcttgattcttcatcaccaacccgtgaaatgatctcaatgcaagctctggtgaattcagagaagtttggatttgaagtacacatatcacgaatgattttgatagctcgtttcctgacactaactccagtgtctttgattctttctgcaaccttgtcaaaatactgcaagaaaacccttactcagaaaaaaatgaaactaaccatcataatagttaactgttaactagagcatgggagtttcagtaacacctgcaaaccaacatcaggatgagaggcaatatgcctgccaacaagttccaatgctgcttctcttacagatattgcagaatcacagaatcttccttcaactgccaattgtacacgtttgtcacgtagtacctcaggatcagcttctacaatgatgctgacctgcacatcataacaagcaagaagaatgataaatttaaagttgttaaagaaagactaaaaattctaagagaatcctccacttaccgctcgcaaagccttagctcttattacaggagaatgctcccttaaaccaacctgtaatttgaaatttcaaagaacaaaaatgagaagaaaaaaaagtaacagcaatgtaatttgatatttccctttattgattgttatcaccttattaataacaaagatgtagaaaaagagacagttaactaaccaaaagcatgttaagaattgtatcaaaccctctggagaaagaattgttttgtcccaaagctaaagtaaccttcttgactaaatctcttttcaataatgacgaaacagagccagaatctcgcactatttcatttgactttagtctagcaacgtagtacattaacttctgttctgaatttggatcatccttgtaccacaagcagagataaaacctacaaatacatgcataagtacaatgaaaatacttaacaacaatataaataaaatataaaaaataaatcaattattacgtaccagcgaacaaagagatgagcatcatcagctgagctggcctcttgaaggtaatttaaaagtaactgctgaataatctctggttctgtaatagaaaaagaagagtcagactttttctctgttcgatttttatcctttttcccatcatttttgcaatgtgacttgcagtaggactgtaaaacaagaagttgtttcctgcaaacgcatatctggcaatgccatcccctgttagaaatgtcattttcttttactcccaagcaatcagcatgaaacattctttggcagtcttggcacatcaaaaacaatctttcaactttcccttccaaacaaatagcacattcatctttttgatcattctcttcagtctcatctttcctgtcaatctcctgtaatatccaaaatttttctttgctgcaaaataaagcatcacgcttcaaccttgcagcaattgtaccaagaatatcaatggccatagaacgtgcagtaatgtccttggattttgggccagcattctggagaagtaatacgcaaaggacctataaatagcactgactcagtatggaatgcttaaacctaattacaaaaacaaaataatataatgaaatatgttacctctaaaataggcgcagaaccaggatattctggaaggtttagtgttgtcagcagatcagtaacaagattttccatcattaatttcaactcagatgcttcctgagctttcaaattagcaaggcgctgaagtacacgagtccaaaataaacagcatgcttcagtagcggcctcaagacattttgttggatagttagcttcaagtgataattccaacatgggattaccatttgatgtctgccttaatgtttcaggaaggtttgaactacaatggaccaactgaataagtaaagcagttatcatctgaatctgcttttgttcctcatcaggtaagtgataggctctcaaagctcgcttggacattggcaacttacaaaggagctgtagtaattcatctatcacataagtcctgtgttgtgagtatgaatagaatatctgaaacaccataaaatagatatcagtgacttacaaaacaatagtactgagaaataacattataccaatctaaaaacatattcataaacataaatgagcgtgccacacgtgtcgcatgcttgaagagagaacaagctgcaaaggagatgataatggtacagatgtctaccccactaagcaaaccaattgccttgagttgcaagagctgaatattgtccactaagaatgtcgtaaagcttgttttcactaattgtaagatacaactatctgacaacttctccatcatcaacaaatctttaagcaagccaagaatagtgcacatcttttgaagcatggtattaacagaagcagaaaccctacacatacagagtaacaaattagaaaaaactcctccagtaagtcaatattgccaaattcaatgtcacagacacagcatagataagcacacttgtttactgctgatctcttcactttaacagtcttagcagaacgtcgtctcttcgttgctgagccaaactcaggatcgtcatcttcatcttcctcagctgtagaagaaatgttgagagtaagactcaatatcaatccaacaactggagacacagcatatagaaaaagtattgccctatgggtgcaaatatcagataagttaataaacaaaatatgcagattaatgcaaattaggatatatagttcaatgaaactcaaactgttctagcataacatcaccttcaactgtcccattatcatttggtctatgaatagcacggtatgatggatcataagcacacatgatatctgcaatctgatgccgggaaaactcgagaactctttcaattatctggcttcaaaagttcatgtaagtcatctccgtaactcataagtaacgagattaagctaagtaaactgaagcattaagatcataaaatcaaccaccctcaataaaaaataaaaaaatgaaaaaaagaattcacctcttctttatatagttgctttggcatctcattatgagccatcactgccagaacggcatgaatggactcgagcgcgcaaaaaattgatgaaaagacatcagaatcagactgaaaaaataaagatagaaagaagatcatgcaaaaggctatgatgtttacttcattccaaatccagaaactctctgcaacgtaataagctcacctaatatttccaaattcaaatgcagttttcaacatacaaaaataaaatctaacatagttttaaaccaaaaaaaaaaccatacaatatgcacaagatcatgcgacaatgaaaagtacgcctcaaacttacatgttcgtaatcattaatggacaagccttcagaccgatgtatttgctgatccaaaactgtcaaaagtctaacaagactctctacaggaagcaaatgtagaagtttctttgtacgaatagacattatctcatttacaatgtctctaatatcagaaagaggcaaggataaccattctgcttcatcctggtcatctccaaatatttcagctttgccacagaagtcatccaccaattcacaaaaactgctaataacagcatctacaagaaaaccaggaaaaataatatattagtaaaacaagcaaacatgaaagattattgatttaacaaaaattttaaaaacctcaaggtcaaccttgaatctcagttggatcaggttcaactgatgttgaagtgttctcagtgactttcttcttggctcttgtttttctagaagatgacattgatacatcctataatttacaacatctaggttaacacacaataaactcaaacataaactaccaaaggtagatgcatgtatatctttagccaaaaataacaagggtggtgttatacatgagcaggagcttcactaaacagacgactgcgagttgtgacacccctctgatcatgacttggaataggtaatgctggctcgaaggtcttctcaggtactgtaccagcagagatctggtccttgagaggacctgagaaacttgaacagtgcaagaaacaataagaatagtacattgtatatgttttaagactaactatgtcaaggcaaagcaacagggggaaagcaagaagaagaagaagaaagaaaaaaccagaagacaacaacaaggctcaagcatgtgcacaagcaatcattgagatacaataatatcccagagtctatatttttgcctaacaatacagtacccatttggcattaaaaaatgtataatagacatttaagtgttcgcatatgatatataaaaaaataaattattataactaaatatgacggatacagaaagatacaaactagtcgtatgttttgcaggtctgattcaaactgttgggtcaaaccaaattcatcatactatggaataagtggctatgtatataaaactaaggaaatcaattaaccaacatctgaagtaccagtcaatatcaaataaaagtaaccaatcattgctttcgtagattcaatttaaattgcgaactcaaaagcactactactaacttctaagcaagccatcaaggcagctaaaaagcaatcaaatactttctttacctggatcacttaagtcaaatgcttctggattgaatctaagcacttcatcgtgaagatttaatggttccaaataaccatatgaaactgctctggagtcctctctgaggttcctgcaaatggcacgatatatgagaaatgtatagagacctactgtaaccatgatatataaggaagatatgaccatttgcttctttttttccccttcatatagatatgtgatggtctaccaacattccttttcccgtaatgtgggaggaatcagattaaaaaccttaaccaaaagctcattaagtatcaaattttgctctcaaattgccattttaaaaataaattaaaaattatcccacgcaatcaccagtcaactcacttgataatgccattgaatcttattacatcaaaggttcctttacccaaaataatgcaaaattatttataccattaattatttaagttactgtgaaactaataattttattggcctcgctttaatggtaactctataaacaaatgattcgactacataagtaactaagttctcattaatcatcaaaatccgctttaagaagaaaaagaaattacaaactttacatgagaccaaatgcaaaagaaatatcaaaattcaaattacttatacgtaagctacctaaaacagcatttctatttactaaaacaacgtaaatacacaaattcaaatgtaacaacgaatcaaaattacatttccagaaaaacatcactcactatacaaaatcaaaatttcgaaatgtaacttcatacaccaaaatagaaaattcgaatagttctgaggaagcaaacacttacaagtaagaaacatcagtttgtcgaagcagatcagcaattttacccgactgagcaagaacttcactccgatccaacgcccaaaaactattccgatttggcacgtcgaacaaactgagctcggggtctgaagcaccacagaagacgggaagagaaggcaaaggcaagcatggcgcaacctcagagtgtatagtattggtgagaccgatgccgcgttggctccaggccacgggaccaaagccggagggttgctgataactcatcgattggtcaaccggtgagtccccaattggcaccgtaagggcatgtatgaaggtcggacaagtggcttagcctgtaaatacgaagaaatccaggggcttttacaacgaaattagggttttcttcgcagagagagtaactatgagtaagagcaagagcagtttgaaaatactgaaagccctaagaattagagatttgggaacagaatttttatgtgggagacaattggcggggaaagtgagaaaatggaaaataaatctttttttcttttttttccctattaaaatttgagaagatcgaaaatctgtagatgggaaaccaataagaaattaaaattaaaattgaaaaatatcttacaattacggaattctcctttggttgaaaatgtttatttatttatttatttatttatttttgtcagattgaacatatgtttattctatcctaacacaatttcaaattaaattcttaatacgtgttagcttgctgtggaagctttacccatttcagttaggagtgtaaacggatcgttcggatctgatccgactcgatccggatcagtttaagaaccgtcatgtccagctaaactaaattttttcggattccaattttatttttagtatttttgttttttttttacaaattttatatttttatatattaatttttttttaatatatacattttacaattatcctcttaagtgaatacatgaatgttgtacttaaaaaaaaaaaacacatgaatataagatgatctcacatgacattattaggacaataaaaccactcatctcaaatatcccgaccactcaattcacatgattgatgtgggtggtcgacaagtttcactgtagacctatcaaccaacccgcatccactaagtggatcgaaatagttggcttaggatgaatagcatagttcttattagaaatagaaagaaaatatgattagaatttagaaccgtataaaaatgtatttcaaaatactaatatcttaaaaataaagaagagacgaagtgatcagatgagtcattttaattttgttttagacatagctaaaatatatggctacatgtaaagatattgttcattctttaaaatatattt

SEQ ID NO: 224852 - DNA, 8627 bp, Cannabis indica
gcatccagactaattcagtgtcacaatcgcaaggctgaaacctggatgcataacttgaagttgcttgttttgccaaagataccgatgttttgcttggaagtttcttcttgaccatctttagcagccaaagtaactatgtacttcttttctcgtattttaattggaaatttaaatatcttgttatgtcaaaaaagagataaacctttcaagggatgtgacggaaacggttgctgaaacgaaccgttttatttgtttaatttgaaagaaaaccgttttattttttatcagctttattttgcataagttttggtggaaacggaattgttttacaaatgcattattattaattttattattaaaatataatgcattttatcaatttacttaatgtaatgaaatgtaattgagtctttgagctttctcattttttttaatgttatgaaattgtctttagtttatgtactttctctttatcagtttattagcttttagtatttaatgaaattaatataaccgtaagtttgtaataaatagctatctcaaaaagaaaaaaagcctataacaaatagagtaataacacagcaaattagcaaaacaaactctagtccgtttctatttgtcactctaatttgtattatagttaacaaattaaacttttttaagcttcttcgttaagtaacagaaaattaagataacaagtgttaaaccaacaaattctttacaccacataggccctttttatatataaggataaggagataagggaatatatatgtatggatgagtttttttagtggttacattttgtaactatagtctataggtgattagcaacaaacttatggaaattattgcacactttattcataaaacataacccaaggtgatttgtagtaattagctatagttttcaaccatgacttttggcgttcaatatgtcgtgggggataccttacaatttagaattttctctctcaaatattgtagggtgcaaggggagaatccgatgtatatgtttgtacatgtatatatgtgtgtgtatattatttattatacatgtgtgttaagtgtataagtaaagagatcatcttaaaaagttcagtcaattgccttcttcttttccttatttggtgagactccaataacattggtttcttttagtaatctagatcagagattcacataaaattctttgcttcatacatcgatgcactcttgatgtttatatttgtctatcgagggaggaatataacatcataacttttacgaacctacatttgtatcaactcaaactttgcccatttggtatctgtcatatgttattttcacctagcatgtaacttgttacactttatcaccaattcaggtcactgatgaagcatgcatgctttattgcagatatgtatctgcccaaaggttttctgaagctttggatattattcattcaggtgcttgcatccaattggataacgggcaggttatacactttttatcactctagtacataatatatttaatatatatggtgaaatttatatttaatagttcacatggtaatatgtggtgattacaaaagaattggagatgggcaataagccctagcttcgatttgtttacgaaagaaaggtcctgataagttgtttaagcttatgaaaatctagttaatgaattggacagttggaaatctcttattagtctttaggctgatgtgtattagttgaatgagttgtattcactcttggtcaatgatgtggcaaatgtttttgagtatatatcataggcttatggtttgtttcacttacgctaggagaggaaataggaaccagacacaggggtaagttggatatcattgctaagctggctgttagagtgagtggaggggtgtttttgtaattccttgtgtaagttgagttgctcttatagaatgtatgtgaactgagtgagggttatgcaagaacttagtaattcttagcattcttggagagcttcgactctaattttccctgtagagctagtgtctgattttcaattactatcaataataactaatttgttcaccacttgttactgttttattgagaattgttgcatctgtgtactgtttcattagatttcctattgttttgcttttagtttgtcgatattacaattataggaaggtcttatcattttttactgagcaccgactccaataaatgtcgccgacaagaatggagacacgaatggaagggattattggtggcttgaaggagcacttgaaattgcacgaccaaagcttggtcgtgatcacgaaacaacttaagatactcacgaatgggcaagctcccattgctgatgaactcaccaccatcatcggcaaagcttttgcggtctcccaaacctccggttggcgaatgactggtgaagcttcaccattgtcgggagcaactggttccaattctcgcgccagcgaaggattaaaaagaacgtaatttagagctagtaaaattgaattacctatttatttagaggccaatcctgatgagtggactcatcaggctgatcgatattttgggctccaaagattgtcaccaacagaacaacctgaggcaggtatgttgtgcttagaagggtagcattgagttggttcaggtgggaaacctaaggcataccatatcgacttgagaggaattaaaatctgtactcctacgtcgattacgccttgctcatgagggctttgtcaaccatttctttgctcttcaacatgttgcgattgtgcaggaatatcgccaacaatttgaagccttggctgcgttgataggtgcattggatcatgtagttttacagtttgcttttgcctaagggttgcaaatggaaatttaggccacattatgtgtgttagagcccattggactaattcagaccatggagttagcagagtccattaaggtcattcatgccttagctagaaatcattgggctgaataaaacaagcccaatccggcccaatagtgctttaattattcttgaagctagcaaaggcacatgcaccatgtttcctacctcatcgacgacttcgacatcctcgagtataaaattgatatccacaatggaaaattcagggtattgacgatttactaaagttgaattgaaggaaagaaaagattgtggtgtctgctttaagtgtgatggaaggtggtactgagggcatgagtgcaaggcaacggagttacaaccggtgcttattgcatatgaatccatggagggttcagagctctgatacttgaaattcgtactttgccttgcggctcaattttcgatgggaaggagtctaaatttggctttccttgtgaaacatcaattgaaaaagtattgaaagagctttccaactcaattggaattgtgttaattcgagttgtacctaaaacactgtgaagtatgcagtcgtctcctggttagtttgtaccctgtgaccaagtgagctatttttgttcacctgggcgtagaaatacatgattttgacatattttggattgctaatgtgatattggtgcatcactaagtcaaatgcttaagttgtgcatgatttcctggagaaaaacaagattaagcacctaggtggtgcaggtgctgaatgttatgctgcaccttgatgttgatttgatgtgagacttcctaatgtaatggtgaattggccaaatctgatgacaattctggagatttggtgaagacgttccgtgttttttgatggagaaacgctctacatgcacttggtgatgcattgagatcacctgggcgcatggtgtcacttgggcacctggtgtcaattcacttggcgcatggtgtcacttgggcacctggtgtcagttcacttggtgcaacctctcaggttatgcgaagttagggtatttttgatgctgaagaagcatttttccattgctagtgtgacaatttgatgaattgaaccatatgcgctaggtgaatgttaacctggatgcatggtccaactagtgctggagtaccaagtgggtacgacagcttcgggtgatattctaagttgccacaacatctatcttgaatagaactagattttaacatccccttgctcttgtgtgtcggtaaattagatggcaagcctaggtatgcattaggtgtccacctaggcgttggtactagggttagggccacctaggcgccccctggtgcatggtgacttcttagcttcatttgaggcatgagcacttgtattcactcccgtttgaagggaaatgcgtaaaatgtcacgaaaccctagggaaagtttactcaagtgtccctgcgtggggtcccgactcagactttgttccttagttgtccgatggtcttttgagcagaaaataagttcaaaactagttctaacacaaaaatgaatccagatggacatggggtccaccgctgggtgctgcgtgtgccccacttggacaccggatgctaaaactcaagtgcatacatcgttccttggtcgatttgtgagaaccaagatacagtttggaccttggaaccgaaaccctagctgtcgtgctgcctagggagcaagaagctcacctgggcatcccgtaggtaaccttctcatagtgtgtgagttttgaggctcgagactagagtgtggctagtcttttgcgttctctgctgcgtttatggagtcaattgccttttgcgttgagatgttgaaccaaaaccgctgcaaactagggcaaagagcccacttgggtgctgggtgctcacctggggcacatgtggtggtgtgatgttcaggtggcatcttcggtttttgattttcattcctgtgtcaccacgacctttttgtttagactgttgaagaaaacactttgaaacgaaaatgtcgagatccatgtgttcacctgggcgcatgtgttctgttgctgaaatgttagttgccaagattatttggccaagtaacaaccccttttcaagcctagtattgttagtcaagaagaaagatggtagttggttcttttgtgggttatcgctctttgaatcgtgaaattgtggctaacaagttctcgattcgtgtcatcaatgagttgctagatgaattatacgaagcacatgtgtcctttaagcttgacttgcgctcgggttatcacttaattcaagtccgaccagaggatgtgcataagaccacttttctgacacatgagggccattatgaatttttagtgatgcctttttggcctcaccaatgctccaacaatgtttcaattgcaaatgaatgagatttttaggtcttttctgcatcgtttttgtgtttgtctcctttgatggcatactggtatgtagcccagataaggtttactcatatggaacacctcaagatcattctccaaactctggccaatcattagttttttgctaatttgaagaagtgttgctttgggcagcgataaattgagtacttggccatatagtttccggtcatggtgtggtggtggactcttccaaggttcaagctatgttagattggtcattgcctacatcaattaaaagataaggagtttccttggctgtattggttactatcagaaatttgtcaaagattatggtaccattgccgagcctctcacgaattaactaaaaagataattatagttggtatgaagaagcgactgcagcattcactgctttgaagacaacactgacaactatacctgtgttggctctcttctaagccagttttggttgaggcgggtggtttggggtatgggttgggggcggtcttgatgcaggaaggttgtcctgttgcttattgcagtcatattttgaagtcctgtgctaatatgaaatccatttactagaaggagctgagcgctattgttttggcggtgctcaagtggcgtttgtacttgttgggatgatggtttgtagttcgcaccaatggagtttgaagttctttttagagcagcggttggtgactctgggccataaaaaatgattggtcaaattcttgagctatgattttgtgattcaatatcatctaggagcagcaatgttgctgctaacgctttgtctaggtgttacatatagtgtgccttactcacctccactactgttggattgggaggaggtcagccatgacccatgatgccttcttatcccgcattgtgactgaccttgaacaaggcaaggatatttcaggtatcactcttgagcatgggcggttgatctataaaggctatgtgattttggaaagatttatgatctcactggctgacgtactagcttataaccaacttgttcttgtaaccgaaaatccctagtataagaatataatgttactcttgattgaagccacttgggagaaatttgatgtaatccgtgacaagtttttaaccttaaaccttgaggacaaagttgagatttggagcagggggaggttaatgataggcatgccaggcctatggtttatttcacttatgctaggaaaggaaataggtactagacacaggggtaagttgggtatcattggtgagcttcgactctcaattttcctgtagagactagtgtctcattttcaattacaatcaataatagctcaccagttcattctttacctgttacggttttattgataatttctgttcgtttactgtttcattggatttcctactggtttgttaatattacagtgaggatcttattaatatatccctagtattggagagggtgtggagaaaattagtgaggttttagactcattgtggagagccctaatcctctcaaaagattggaatagtaacaaacctatctcgaaagcttgggattgtaacaatgttgaactttataatatgtctgtgaggaaattcatttattcttgtgtgattatctaactagattatatctaattcaagaaaagtcttttaaatgggatagggtttatgttgtattaaatttggatgtccatgtcttaaagcttatcttctgtagtccaaacttttaagtggtgaccttgtatttgtacctgacatgccattagttaatctaactttattgtgtttacaagatcatagttttggatgtaaaagctctggctgaagctttttgatcctgctatctaataaaatagtttaaaaaagcagtagaagaatgagaaaatgaattaaagaaaatggaatcttagagcagatagcatttttaggtaaaaatgtaatgaaattctttagattttatctgttgttacatccgttaatttgataccctcgaatccatctcaggtaacatgtggagcagagctagctgtgttgtttgtggatacacttgtcaaagcaagagtttcttatgatgatgaaacccttggtaagttcttgctttttcatgtaacaattcaacgtgtatcaaatttcatttgttttttccccatattaagtactttctgccttcatatcgttttttcccctttgatgttaattcctcatacaatttgaattcgtaatcgctcaacatgatgatgtatatatacatattgttttacttgttagtctctttattttttctgatcttgtcttgtccgtgtttgtaatatgaccatataatattctcagaccgtgtcaggaaaatttacaataagtttcctcagatccctgtaccacaacatttagctgatgatgacgatgtacaacagctttctgaagcacttggggcagcaaaaacacgtgtagatggttgctcatcatttttaaaagctgctattaggtgaggatttactatctggttggtagtgtattaaaaaaatgctaaatccttttgtgagggtatatcattccaagtgttgttttaggacaaggtatgtcgttcttgaacaaaaaccaatagtgatacatgttttatgatatgcagggttgtctgtctttgtcatatatgaaagagtcttttcagaatttacaatttgatgtttttaattcaacagatatatggtctgcttaatcagatccctactatctactcgtatgctaattgttttttctggtttcctagatggtctgcagagtttggagcacccagaaatggttcacctgaactgcatgttatgctagcagagtatatatattctgaatctcctgaggtggtaggtgtgacagcgaagctttttgcttcaaatattttattgttgatttagcccaaaaacttgaaagtataaaaacgtgagctttgtaattcatacatgtcatgtggttaagtttggtgttattattctgacaaactcctacatcttttctgtctcattgttgaataatttagattattaggtggaggatagtgcaattattttaagtgctgtaaaacacatatatatatatatttagattcttcattataggagttttattgctattcaatttgcataacttccatcttggatatagtcaattaattttaattctatcacaggatatgactcgagtatcaaatcatttcattagaggaaacaacccaaaaaagtttgcttctgttttagtaaatttcatgggcaaggttagtgattctcttttctcactctacctttgtgtggttcattgattcaagttcataaatatgctatgaggtgtcctgtatccactctgttgttaaaagtagatactattgattcttgt

SEQ ID NO: 224853 - DNA, 2208 bp, Cannabis indica
aaacatgcagtaacttctgaaatgccactcaaattccattacctaaaaagaaatatttaaggagaaacttgtctcaacaaacttgctaccaatcaatagcagccatcgatcaaggtcaccccaaaattcaaattcatgaaaacattatgttcatacatatatttgtgtacccatctttcgtagtgttgaagaagcaaaaacacatgaagtttagttcaggaatttgatcaaacacataagggcatgacaatcaactaaagcaaaccatcaaaccgaaccattattgaatctttcaatgctgaagttaacaaaataaggtgaacaaacaaaagtaaaaaaactaatacaagttattcaaaaaatgttttatatatatgaaagaagagtaaagaaatatgagatatgtatatatttactctgacattgttgggatgaaccatgatgaatacactgccgactacaagctcagaatcctccgatggatgggattagtatttagtgggggtgaagaagaagacgatggctactgtagcgtcacagagttaaaaaagcgtaataatgtatgttttgggctggagaaatggggaaaatccaattttaaaggtttaggtgggtagaaatcaaataatattagaagtaggacaacaagtcaaatgttttgtaaccgtattatattaaattagattatatattatatttttatataatattatgttacactttaatttatactaaaatgttatatatttaggtgtatataaaaattaatagtacatgtagttttacataaaaatattgtataaaatacaattcaatataatataatacaataagacttaatacggtgttctaaacaaactcaaagtgggtactctacctaatttcctttcttttctctttatttagaaagatgactttattctggaaaaaatgacaatgaattagtatttgtgaaaatgatagtatttatgaaaacgacatatgttatgcaaacgacaacattgattgaaacgacagcttcaatgagaacgattttcttgataacgacgatttttcagaaaataaagaaaaaaaatagaaaattttcttaaaaaattcatacactttttaagtagcttttgttttataaaaattgaaatgttgtattgtacaagaagagattgttaattaagtccacagcatttgttgttgttgtcgttaaggagaatgattaagtttaaatatttgttgtcgtgctttttattaatattatgcatgaactcaattttttaatgtaacaattgaattataatttctcaaacttttttttaatggaaataatactttattaaataaccatctccgttactaaaataggtaacaagttagttggaacaacttccaaactgaaagtacaatcaagatagaatatagaggctctagcaaagttgtgagccgacatattagctgatcgtttaacaaaataaataacaacattttttaaaaccttaagcatatccttacaaacattcaccacttgaccaaacatggatcgcatcaattgagcttcgtaaggcttgaacaaccgaaagacaatccgtttcaagaaccacatgtgtccactgtcgcatcttaatccaacttaacgcctctcggattcccatgactttgactatagcaggaggaacttgaccgtggaacaatttttcgcacccttcaactaacatgccccgagaatcacgagccaccaaaccaacctcaaactgtcgggtttcattgaacaaagcaacgtcaacatttaccttaatatcaacatgtggaggcacccaacacacaacagcatcttgggtttatacataggttgcaaatgagcgagtagcactttatagaagaactgcaaagttcagttaaaataaataataattgaaccttaattataattattttgtaaggttttaaaccttaattttaatcagccagaactgaaattcaaaaaataaaaataaaacacaaataaatactttcttttttgagagaaaattggctcattgattaccatcccatcttccgaacaaagaaatcatctcaaagagcatttaaggctaacaccaaatgaaggcactcttaatgacttaaaatcaaaccaaaaagaaaaactctaaggaggcgtttggttgggaggaatgaaaatataggaataggaatgggaataggaatggaataaaattt

SEQ ID NO: 224854 - DNA, 6365 bp, Cannabis indica
tatataataatattataaaaataaataaaaaaatattctgttaattaataggatattcgattaaaattaaggtacaaataaaaaagtattgttaaactaaaattctgttatatgtttctaatccaaacaccactgattggttatcaagtttttttttcttccttccataacatctctgctgtgttcagcagaaaaatacaagtccagctgtatacatgtatatattataagggcacgtgtttgactgtttccttccattaaatctttgcctaatgtatgtattaggatacataaaaagagccctttttcttgaatgttcaaaagcaaggtaatcacattggtctgccaacttgaatgaactcctatatcaaaggctgctgctgctgctttattttttttcaggtcagctctaaccaggaatgcttattgaagctaatagtataagactatggcaaaatttgaatggctcaaactcaaatagtagctttacctccttggttctgtaagcacaatatggtcatgtcacttttaaactaacggtacctatcaattcaattctattaacttaaacagaagctatctagcaaaactttcagcatttcatattgttcaattgaatctatctttcaataacacgcctttgttttaaacttcgccacaatcttgtctatgcctctgtcatttacactctctctatcatctcgctgtcttccaaatcctccaccacctctactccccttagaactctgcctatcgctgcctctgcctctacgctcgtcaaaatcttctcgttgttttccaaatcctccacctctgcctctactccccttgaaattctgtctatcaccccctctggttttacgttcattataaccatctcgctgctctccatatcccccgcttctacttcccttgaaattctgccgatcaccccccctgtcactcattcttggtccgttgttcttccctctaaatcctttaggacctttactgtgatacccttctgatgatccatcaaaatcatcatcgtcatcttcgaacaagtcctttctactattcttcatctcactggatctaaactttgtgtctttggtgaaagtatagttgctttgacctcttgaacttttaccactgctatatgaatcagcttttcctctgaatctacttctaccactgtgtaaatcatcatcttctgattcagatccataatcatcaaagccagaagtttttctcctaccaaaatcagtagttttacctccccttgatttagtattataacttcggttatcatccacatcagagtacagcccagcctcgtcttccgaaccaaagctgagacccttggacggaccgatcgaacctctacctctacctcttggtctagaatcagcaacgtggctggatttccacttgggattagctgacagctcgttatcagaatctaaatcaagatcatctgaatcatcagatccagagaatgatcttctacggctgaacttacctttgttgtcataagaagaggatcttatctgatgacgtgcatgaattactttgtcagactctagactatcttctgatccagagtaaccttcaatatcagaaaaatcatttgaagaaatcttacgcactgaacttttattagtatctatctcatagtggtcaacgtcatcttcttcatcatcaaaatcatcaaatcctataccaggtctactagtatcagcatcagaatattctccactacggaccattggctctctactagctttgttaaaattatcttcagtccttccaaaatttcctccctcacctcggttatctaagggagaacctttacccatgactgaagagtctgcatgctcaaaagcagcaacatctgctccgtctgattcatcatcatcaaagtcaaaattccatgcattagaaacctctgaccgattagctgtcttatcaaacctcatattagagccattctgcctttcttgcattttgttctctaaaaattcatcatgtgggcgtttgcaatcacagtgaaaacattcagtatttctcctatagtttaagaagttacacctgacagataacagaatcaacagtaagcaaatttggtaatactaaaacagaataataaattgcatgtcggtagagcgacacataagaatcacaaagaggccaagagctaatgtaaatcaataagtaaaaatgaaaaccaagagtaaacaacagttcatgagcagattttggttaccaaatccatgttgaaaaaataagaaataaaagggagaaaaaggtaaagaagtgccctaaaagggaggaaaaaagtttgagaattaaatcttactgagggcattcccattctcctggaagcagctgtctctttggacgttttgcatcacattgcaggcatgcagtgttcctcgcaaaattcatgaagtcacacctgataacaaattcaatcattcttaagaaaccgaagaaggcaaaactctggaaatttggtgctcacataaaaactaacaaatgaaaaaatctttaaccctgtactctagtcacagtcacgagaatcacacatcaatcataatcaatatattgcactttggcaaagtaatcaatttcagcaaaacaacaaagtaataaatgaaaagagtaaatagtatgaagcatattaggtcaattttaagcagaacatgccagataccccagcatcactaagtacattcctagatctattcccaaggcattatgcttgttactcatgtccctagcattgtatgtagagtgatgtgttgatccgctagagagtattgcagaaataagtagtcaaaaaggttttcagaggggaaaaaggtttcaagggaaatgttgaacaaaataaaacacaaatgaacccactgcaatagtccaagtcaagtacatatcacaaaaaaccaaagaatcggccataacaaaaaatgtgtgataaaagaaacatacttcgggcacagccagtccccttttttcatctcaatgtcatctcggccgacccgtttttttggaggtggaggaggctgctttacttttggtggaggctttttaaatatcggaggaggaagattgggatcaattggtacagaactcaacttgacaacctcatgaagcaacttacgtactacagtcttcacagatttctgtttcagaagagactgattcactgctgatccatttgtaggatcaaaaccataagccaataaaacacgcattatatcaatagtacgcgcctcatcctctttcaatgtgagaagatatgctctttcacatgagttcctcaaactgcaggaactacaaacctggtaaatgaatgaatgtggtcacaaaaaaatgctgttcaacaagtgattacacagaaatgaacatggtgcaatgaaaattacatacaacataaacaacaagaagatatttatgcttacatcagttcagtcaataaaaagaacactgtctgacagtattatttgaatttaggcatagaaaaacaaataggaacataagctaggatctgagcgaacaaaatagcaaaaaacatttcatggttgccagaaacacatagaagtagatggagagcaaaaagtgagggggagaactaggcaagaaagataacagtggttatatgaaaagttgaaacaaaaatctgcataagcaacaagtcatgaagtaatactcacatctccttcatcaaaatgcacatatttcctcaatagttttgcagagaaaaccaccttcttgtctgcacttgggcaaccaaaacccaccaaaatttgaatatcctgtctcgacaacgacctgaaattaatttcgtctcagcaccattgatattagctggccagttattacaacaatgtcaccagcataaatgagaaaagatattctactctacaatagcagaaattattacatgtgtgtatcagaagagatataaacaaagtaatttcagaacaaaaaacaaaattgtgaaagaaaaaatcttaatgtagacacaacctatcaatttggaacgaacccagttgagaaatgaagctacaaacctcatgatatcgaatcgatcctttccgaaattcaggcaggcggtctgaacaagcttaaaattcttaaaatccaggccacccgtatccgttggagcatcctgcggagactcgaagcccaattcttggatcattttgtcctcatcttttctcctatgatcaaagtagttctgttgtactaacctgtccatcaattcgatccattctggccatgggtgcaccagttccacctcatttttaactcccaacgacctatcagactggcgcgaatcatatccgggaaccggtggcgacgcggctgaatatgaaacgaccaagtcggaacttgtggaatttgaatttgaatttgaaatatcaccattgatggaagattccggctgttggaccttcttggattcccgccaagtgcgaattcgctggagtgtttcgtccttctcagaacggtctttctcgatggcgtcgatttggtcgaagacaaagctcaatcgagctgagagtgacgacgaagaggaagggttcgggtcggatgacgatgaaggtgacggggttgaagagaagggctttactgttgtggcggtgaaaaggtgaaatgtagaagaacgtgaaattttaggagttggtgatgagatggagaggcgtcggagaatgaggagtgaaaatggagtaaatgccattagagagtgtaagagactaggtttgagctaaaacccccatgaaagagaagcttaaaccctagagtgggctgactttctctgaagaaaaagaaattcaagggcttaagtaagaaaggactctttttttttttattgttttttcttttttaaattaaagcgtttgcaatgataaacgaaaggagcaggggtcgttacaataaaatatcaactggtatagagtttttctcaattacattatttgtcaaaacttatttggctacaagatagcaagttgaattacacacacaaacgagcaacctttaatgttcgaactaaatttatatcactttttggtatactattggagcacattttttattaaatgagctatattttagtttttcaccacttatttacacttctattagaaatgctctaactgtacaaaactagaaatctcccacctaagaagtttaccgagtgaagcattaataatcactctcaattatgacaaaatcatttgacaagacaatggtcatctccaacgcatgtttacgggcaacaacccaacaaagaaatgacaaaaacaagtctacaagtcacgacccaaataatatttggccacatttgaaatcatgatgtcctccctctcaaccgccacatcgcaattaattttgatcaatcaaggttgaggaggggaccagctagtagcaaggagcttactagcatcctgtgaaaaaagtgattgggcatattcattaaagcaagataagacaaattaataagttgaagaataccgtaggttaagttgttatggaacttattgtttcatgctttccaaatagcgtctttagtaagggtctgtggccctcgagtccgaaagctcatttatgttcctagaagctctggtacttaaactgacgtggagacttcgttcaaagaggagttggttaagttagttatttataactaattttacaacttcgcttcttgcagctaccgacttcagaatcttgatcctaaggctataaataccaccttgactttgtcatttggacaacacgagatttagtactcagctcagaggagattgagagtttgagagagaagattgggaggtagagagagagattgggtttggatcttgtaagaagaatcttttgtggatgaagaagatttttggttgtaaagtgtgagagttgtaacactttatgaagagtcaacatagaatctcgtctcgactgtattgtaaatattcttgctcaatcaataaagaaggattacggtagtattccaaaactggagtagagtcatagatcacttcgatatatcgaacttgaaccagtatatatcttggtattatttctttattttctacatttagtgttttctagttttaacactttatttgcccatgttttattttcgattattgctcttgttgttaatcttgtcattgttaactgtttaattatttaaaatttccatcatcttaattctacaccattagtcttaattttctcacaaagagaaatgggagaaactattggcaaggggaaaattgaaagagaagaaacgagagtgaaatataagcgatgacataggcactaaaattgtgtactaacattataacaaatttttaaccaaatcagtaccacgt

SEQ ID NO: 224855 - DNA, 2718 bp, Cannabis indica
accgtctgtttctaaaacaaaaaaccaatcatggggagaagccacataagattatagtagcatgtacataaaccttcccataaagttatatgacggcataaaacatcctaaagttcacaaaatagcacatcagacatcatcccttgaaagcagagaaagaatatccaaactaaagcattgtgattaatggcataacctggaactttactatactgttgtatgctatcaaaaccctggaataaaagggacggcacagactaggctaccggaaatgctgaaccaaaacaaacactgtccaagcatagtctgtatattctagcacacaaaaatgaaacccaccatcaccgtacaacctcaaatccttctgaatagataaggtgtaatctgttcctgaaacacaataatttattagggaaagcagaaacagaaaaaagttaagtaggtctatcaacaagtgggtgcataccaagtgtaacatctacaaaacaaattatagcaagaaaactcaggaggagaaatataagagtacagtaaaaaaattacccatctttgaagataaaatgtatatgaagcttttatcacccaagttttcagcagaagttatcatgtggcacttcattgttcgtccttatacaagtttcacctcatcgaatgagaataacatgtccaattcatagcattttaatgttgcccaaccatagtagaactaatcacactttgtaaacacaacatttcataacaaaaatagggtctaatctgtatgtagaaacatataaaacagtttatcacattaaaataggttcactaattgacatcatgaggagttaagtcataggaatgactcacggacttggagaaagaattgcattagatatattttgtgtcacatgatcaggcaccaggcccttttgaatcatatcataaagtagcgcaagagcaacatctattttttcagccttaatgtagcttttaaccaatgtgttgtaagaaatcatatcgggtagaacaccctttgatgtcatttcttcaaggatcttcttcgcttgatccacttcacgtttcatacaatgtccttttattaatatattgtaagtgaactgatcaggctctccaccaagttcaattattcgatcaaataatttgtgtgccttgtccatccatccttttttagaataagcatctataagcacattaagagtaataatatgaggataaacgttttggctcaccatatattcaaacaaattcttggccgtttccaattgacctaccaaacacaacccattaagcagagaggtgtaagtgacaatgtttggctttatatctctttgggtcattagatcaaacatctgaatagcctcttccatccttctctccttacaaagtgcatctacaaggataccaaatgatatcacatctggtgagatattttgatccttcatctcatcaaataactttatggcttccttccattggcctgaatggcaaaatccatagattaatgaattgtaggtgataatattaggcaacactcctctatcaatcattaattccaagatatcaagtgcttctttggtacttcctttcctgcacatagtatctaaaacgatattataagtaaaaatatcaggagataatccacgattggtcatataatctatgagttgatctgcttcttctaatcgatcagacttgcacaaaacagagattagagggttgattgtgacaacattaggttcaaagccttctctagtcatcaattcaagtaacaaaaatgcttcttgagttcttccttccttgcatagagaatccattagagcactataagtgtgtaaatcaaatgaaatcccacgatcactcatgtcaattagaagtgtcttggcttctccccatagacccaattttcgcaatccgtgaatcaaacaattgtaagtgatgacatccggcagcacaccatggttgatcatgtctcgaaacaagctcaaggcctcatccactcgttcttctttacaaaggccgtcaaggattggattaaaacagtccacagaaggttgaatgctcttatcaccatcaccaccatacattttctttagtaattcaagtgccttctttgtcttcccaaccttgcacaacccattaatgacagtcccataagtgatttcatcacgtgggtgtttcttctctacaatttcctggaacaactccattgctgcaaccatggagccttgagcgcagaggccgtgcaggagagtgttcagagtaagagcatcaagtccaaggccatgcttatagaaagttgccaaaacagagaaacccaagtcagcttttttcaaacgacacaaacatttgatcacaatcctcaaggtacccgcctcaggtcgaaaaccagcacaacccattatctgtttgtacatagacacaacagtggagaagtggttcatcttggagagagccccaattaaatgattgaatgcccaaatggaagataaagggcgcatcttcgtaagagaatcaaaataacccaaagcctctttcactttaaggttcccagatttacatctggcttgaatcaaattatccaatcttcgttgttgatcattgttagtgacagaataattatttttagaatgaaattggtttccgaaaagggtgaagaagagatgaggattaccagtaggtcttgtggtcatcatcatcagtggctgggctttcatggtt

SEQ ID NO: 224856 - DNA, 12692 bp, Cannabis indica
aatgcctcatccagcttactgttctttgtttaataacaatgggctttcattcttgaaaaagcgatgggcttttgtccttaaaataaacaatgggctttcatggatatttaatttctttaaatctaaataatgtaaatagcggaacaaggtcagaactgctgttaaacttcatcgacaggttccattctgatcctttcattcctaaggatatttggctagaaaagtataggatgctcactgggaataagtgaattcaaaaaagaaaagcactgccttgttaaagaagaaaatgtaaggatgtggaaaaacaaagacaaagaacaaaaaaatattataaaataataaaataacaagaacaaaaagaaaaacatcaacatcaacatcaacaaaaacaaagaaatattataacataatattccactctcttaattaattcaaaatggatgagtgttagaataaaaaatttctgaaaaaagaaatgtttttttttttgtaattacccctttgaaatagtttttctttctgccttttcttttttaatatcttctgcatcttatagaaaaaaaaaaatatgtgcattagcacaaataaaatgtcgaacattttaagtcacaagatattgatggcataaagcttcccatgagaaaccaattaacaaacaacaggctggggaaaaaggaagtaccttagtatactcatgattttgatagagcattgctgaatttgtggccgaaaatcatatctgacatactccaaaagagctacaatttggttatgatcttgggaaagtataacatccaaaggctgcataaataaatgaaacaaataaataatgtataaaatgagaccgaaccatgagcacaactatattaagaagctctttataacttataaggaaacaagaaatatacacattaaaaaaactgacttctcagtctcattggcactctaactaaatactataattggaagttatattaaaagatacaaaagattaccaactattatggtccataccgctaacagcttaacaaattaatattccaataaaaaattggcaagaagatccaaattatgatgaactagctccttattctttcccttttcctttttttttgttacgtttgaactagtaataaaatagctctttgttgaaaataataatccatgctggaatataagtgcctctaagaaaacattcaggttcaaaatctatgctagctcttcagaagttcagtaattaattttttatagataagagttatacgtgtaatgctgtagatagagttcagtaattaactttttaaagagtttcactaatcagataatgttaataaattgaagctatggtttgcttccattgaattatactgttcactcctttttctgttaagttggggtttcctccatcaatgactataaagaatcaacatttccattactccttgccatttcacttcccaaagttgatacccttactcatttttcacaagctttagtccctaagaaacgatgcatttctaactttccaagttgatctaggctctttaggtaactaaatcttaagagcataaaacaaaatatatgaattaaacaaccataacaattctcaatggcaaaacaaaaatcccagaaatcagtcaacaccacaacaaaatgccatggacaaaacgattatcaacataacagtaaaataatttaaagcatagtataacaattggcaattactacctggtataaaggtcgccaaaaaatcagaaagaagtgaatccttctccaaaacaaggattataatttccaaagaaaattgtacagccttctctaaaagttgcccatatatttgacttgttcgttcggtaataatggtattgacaccttgcagaagaattcccatgatattccgaaaaactgcttttccactcatgaaatcctgcaacatatgaacgtaaattatatgaagtttttatctataaactatacgtgaacgtaaattatatgaagtttttatctataaactatacgtgaacgtaaattatatgaagtttttatctataaactgtatatacatagaaaaattatcgggtagtgattgcttttaatcaatatttgtaggtacttttaatattttcagtacatagctaagttgcaaaatatcttcttttacaagacggtatataatgtagttgaagactttaagaaaagaaacggttacatcaaaacattgccaatctctacatagatcagacaaaggcacattcttgaaatctttctcattgaagagccaaatcgctacccaacatctcactctattccaagtctcttttgcacaattttcaaacgcctcagttagtcctagatattacttaatactcatcactattttcacaaactactatttcaaacttcaaaagaaacatgtaactatttatgctggtcttaagttatcggatgtccccaaagggactatgccgatcttatattatgatactataaaaacatgagaaactactcatggtttaagtgacttcaaaaagctcctctgccataaagttgcaagaaagttgcctagttaatctaggaaaacgaatcttggggttaaaaatcaggtctaaataacacaacgtttactaatttacagtaattaaactgtattatgaaatacaatactattgaaaaaaaatatagcaataaaaaactatggccaaatagtttctcaaaaaaggaatatagaacctccacctactgataatgtattatctacgtttagatttcatttttgtcaccaccatttactgctccatattgctttaataaatataaaacatactgatcaactagaccttggaaaattatgtaatttagaatattttaaaaactaataatctagtgttcacagtgctaaatatacatatatgtgttatccaaacaagagtagacacctacttttagcaactctagcacaggaagttgcatctggagagaagattgttgtgtttctgttgaaagctgtgtgcgatcaatgacactatcaatatcctcttcagtgatgtcatacttgctcagtatcctgcataaaactgtatgaatatgcgagtttctctactttttgtttagtttataaaataataatttttagcatttacaaataaagtacccacataatatgtaggtccagatattaactcacatatgaaaatgctgaaggcaagaaacaaccagctgccatttctcacaaggatctgcataagctctttgaggaaatggcccgaagacatgatcatatataaacctgaaaatgccaataaatctgcaaaagcaatgaagcatagcaacaacaggttgatcatactgaggaagaagttccaaggaaagattaaatacgtggatggtcagtacctacgccctctgtcgctgacatctctttcttcagcaataagttcatttaataggttaaggaaagatatagttgagggatattgttctctccttgcttctatttcattcagctcaaattgcatatcatacacctgatgaagatcacaacgatagttaacatatttatctttttttacatgtatgattagagtttaagttttattaaggttcttgaaattggagctcttgtgatttagactttgttacttaaattcctttgggttctgtttggttttatatcgatatgatagtcgtgttcaaattttttgctaaaaacttgctgctgccatacaagttagaacagattgatagaatagactatagagaactagaaattaggctaaacagggatgagaatggagctagaaaataaatgatagatctgatatttgctattagatgatgaaatgatgaaagtgatagatactgggtattcgagaggcccagaaactctcccaagagctactgctcaattaaccaaataattctctgctcctccccttcactactcacttgtatatagtaccagtacctctacaattactcatttaccctctttatttattatccttaggcctgacattttccatttaaaataaaaacactcagttttctcccctccccaaatttctcagttatctactcatcccctcttcttttctactttgctttacgtcagcacctgtaaatggcatgattttacagcactacaacataaatattatacacatttaacacattcaaagtttatcccatgcaatacagaagtactaagtcccagatccctttaacttgcataaaaagccggccaaacattcaaatcagtcactatatagtacatcacagttttgcagaggaatgcaaaaatgcttcgctatctgcttaatgcaactctacatatccaatccatgacagttatacctctttacttcaactattggtaatggacataacaggctcttcctaaattggtaatgacaataataaataaaaaaaaattaaaaaaaaagactctaaaaaccatataattatagcaactatgttgtaaatagtcatcaattttttcggcatacaaaggtcaattttagtctcttaaggcctttctgcatatccaaagaaataataatccaacaaaaccttgagagggaatcactatttcacaaagattacttgccaactcaaattgtaaaatttcaatgtattaaattatgaattatcttccatttatgacaacttaaggtccaaatcaatgttaaagaaccgtggaggaatgtgttcgagaaatacaaaaagtacttgcactagaaacattgctaaacaacagaaaggtcagtacaagaacaatgaaatatggagaaaaaggcaattaaattaatacagccgtctttcatttcatatccatattttaaccactaataaaaagaaggtaacttgaaaagtaactctctaaccatgcaaataataagcaagaaatgattcctgacatcaagattaagataacctaccaatagtatagcttataactacacagactcagaaacaacacaaaaactaacctgtgtagccatgggctgtgcaccgttcccaacatgagaaccaacaaccacaggtagatcgtattgctcaagatagctccatattgtatccttcaaaactggagagacatgaataaaagttgctattgcattccgcagagcaccctgtgcaagaaccatacttgatcaaaaccaaaacaaaaatacaattgattaacctccaacaagatgttacactaaagagggaagcaacatcagaacaagttaatgaaccttcaggtaaggcggcacattctcatagccaagaagcttgaacaacggctcaatgtcgaggaaccagttctttctctcaattggatttccattttgtacaacctgtagataattggtagaacaatactcatcaaattatttttcctttttcttgatggtgaacaaaagaaataataactttttttccaatgaaaatactcaattaacaggtatggattttcaagaaagcaaaagacaaaaagacgcaatcatcaaatgttccgacgaaaagaaaggttgggttggggagaggacatggatctactttagatcatggatccagaatttctaaactaacacacatacttgaatgtttgagaatacacaacaattctactaattctgaaaactcacacattggtctgccccagatcatggatccagaattttttaactcacatacatgaatgcttcagggaagaaaaaaaaaatccacaaattttagaaggaacaaaggaacaagaaaattgcaaacaaaacacaatactagtaaccaagccatttagcataatacaaacatagaagcaacatgctctcccaccactgaaagaataatgatatcatgtgtctgtgttcaaagatatccttggcagaaaaatatccatgcacatattatttccaaaagctgaaagggtaaaataattaaaatgaaataactcaaaaccttttgaagaacattcaaataagcaacaagtgcttttgcgtccccctccggtaactctggtaacatggctccagcagtttggagggactgtttaaacttgtcatcatagattgataagcaatcaaacaatgtactccacccaacagagcggaatgctttacccttaagtaactcataaacctttgaggcaccttcttgactggaagcctgaaaaagaaccagaaagtatgaaagtgcttcgaaaaatactttttgtgaagtcagagcttcattttataaaatttaaacagtgaagaaatgcacttcataccaaggtactcagcatgttcaagaaagccacaagtgtttggaaatttgtatgatcttccccagaaaaattcacaaatgtccacaatacatcattaccagtcaacagctctggttccctctgataaaaaaaatcagtaaatataataataaaaataaggccatcataaataagcagtgtgacaagttaaacagcattaagcgcaaataagcattaagcatataaaatgatgtgtgacaaacaaaacagcatcaagcacaaatgcatctattgatacgaataatttcatcgagaaagaaaatgaacaagaaaacagatgctccatgataatgaacagccattagcataggtatttaagcacataattaacattggaccatttagtaaagacacgcaaaactagaaaagataacatcaacgacttcataagtttctgaacaaaccgaaaacttatgacataaccaacttcacctgacatggagatggtccatattcaaatatgccaaaaaaacaagtggagtttcatgatgttctggttcaaactaacctgataaacctcactcacaaattccaatagcgaaacaaatggaagagaactttcagtgacttgtgaagaagttgagttgctgtcatgcataaaatcatgtgctacagacgaacggtatggactcagaatgctcatagccttttcctttgattctttcacctgcaaagtttaaaaaagaatgcacacaaaacataatgttgatctgtggtaaaagaaggcacctacttgcttctatcaatttctttctccaaagcccaacaacacccaacttaatatataaactaacctttatccagcatagcccacttaaattccaaatttccttttattttccactttcaaaataaaaattgtagcatactagagtaacatagaatactatttcaaaattttagattttcttcttttcattctacaattaaaaaaaaaatgccgctggtgctacaacacaaaattccaggcttcctcactactagtgatgataagagaagccacaaaacaaattaaattaatgaacgttctgttcttcataacccaatttaaacgattgcaatttgaattgacttcaacacagacaaaacttcactgaacaacatcaagggtcaagtttatcaaatttccctaaatgccatataataacagaaaccaactgaccttgtccctagctagagagtgagacaggaagcaggtcagcaacttgtgcagataagcgttgtacatataaatcatatcctcatcgtcattctgtacaatttataaaaccaaaaaggctgccttaaaatataccctataggggacaattagaaatcataaattacaaaaaggactacaacaaactatttgtgtaaacagaacaaaaaagatatgtaataaaagatatataaatatgtaatataataacatgaaaccgaaattgaacagaaaaactaagtgagcattgctataaggcaccgtaggcgtagggtgctcaacacctaagacataacatatttccattagtgcaatttagtagcaggcctcacttatcttaatttaaaattactttaaattcaaatatcctaaacacaagaaaacaaatataaaaaaaaagaccatcaaatgctttcaagtttcaacacgattctaatcccaccttctcaaccttaatttttatgtgagacataaacctttataaagaaattcctacataagtttcaaagagcttaagggaatgttgttcactatcatagtaacattaaccacttagagttccgtactttttcttatgaccatacactaacaaaccagccccaaatggaatctctaaaatccaacacaatatttgctcatttcacaatgaccaaacaacctgctaaacacaatataacatctttatcttaaaagcatagaattacataatgctacctccctccttgaccttaagctaactactctctggtatcctttttctcaagtctttgaactaaggactactgctttcctcaaatacctaaagtattcccgcttgattgtttggttggtgtttctatggaatttcttttacctttaaaaaaaaaaactgttcttaactagagtacaggaaccaatacatagcatgaaatgtcagtataatccttcccatacgtagccagataataaaagaaataattcatatttgtagatttttctcaaaatgaaggtatatataatatcaaaacaaagaaacctggtaagctgcggttcgaagaactttatccagcataaactggaaaacattgttggagaaaacaatttcaagacaggaatgaagatacaccaaatcatttgatgaagcatttgaaacagaagtcgcagcactagcatcatgtattaacatcaaatgtacggcccaaccaagccgtacacaatcaacataatgctcaacatttggatcattcccaacagccataacctaagaagggagtatcagcaaattccaattaccatcagaaatacataaacattgagtcaaaacaataattttctttcctccaaaaaacaacatcaattattattatgagaaaaataaaatgccatctttatcttacagtttcatgaaattcacgtctaaaggaagcgtcagaagaaaggacagatgctttatcgggtactgcactcaaagcatcggacacgaaagagatcactagggaaaaaagaagactaaatgtaatctgcacaaacaaaagaaaaatgtgcactatataagaagtcagcaacaaagtcaaggcatgagaaaactacatcaaaagacatacacatggagagacccatggagagaaaagaacaaagcaagttatttcaactttcaagaattaacagaacaataaagaaaattgtttggtcaacaagtcaaacctgatgtttcaatacatctttgctctcactaagttcaccagcactatctttcaaagcacaaaaaatatcctttatatcctttggacctgtacatataaggaacttttaatttaggcaaatattcttttgacagaaaactgtaaagtcaacatatggaatagctatgctgttaccttacgggttattttcaaaaacatgaaaaacattaatgaatattcttaatcttaagaaaaggccccataatacaaaagcaagggcaattcaatcttataaggtcaaggttggaaagaaatgcttgaatatttgaggattgtgaggaatcagaaaaggaattatgggagaaaatgaaattctggacagctacttgggtttataaatccaagcattttaaagattctccttcatggatctatgtagagaatggatttccctgacttagagagtatcctatgtttccttttatactcatataatttatgtaatttttatcatgagcaagtcttttctatggttcttgtaaccacggttttcctttgccatatgtgaggattataatatatatcggttggaggccagtctaagacaatggcttctttctcttttttcaaaaaaaaatcttataaggtcaagtttggcccctttaagatctagcccaaagaaaaaagtaattgttgtcttgacttttcataaaatcaattaacatcccataatgctattgatatagcttagtgaaacaatagacaaaaagaaaattgttagagaaagtaattagacaaaacacctatatcatttgtttactctcaagttttacagaaactagtctagaaggacattgtccaattagaacttttcatgcgggaaaattttaccattataaaataagaaaaactttgaaaattgaaagaaataaataaaaaaggggggttatttcaactaacaagagaagttgtgcaatgcaaaaaagaataccatagtagatactaatgaagaagtcatttgtatacagaaaatacaactagattgcagatataaaccccatgagatgagctcttacccgtccttataaccaaaatagagagaataagacaatgcccaagtattagtcgttccctataaaccacagcttgcctctcaacaagagcacctctggaatcaagtaaataaggctcacattgaggcccacctaaaccagctggttctttccgattgagttcctgtgtcaaaacaacagcaaatatttacataagatgagaacagttcgagataattaacaaaagaaataaatcaaaacattagctgtaaaaaaggctaaatctgaagtatggcgaccaatgtttttataagaaacaagaacaacaacagaagttgacaaggtattatcttaaataacaaatagagataccaatctctaagtaaatcagaaaatgaaaagacactaaaatccctggaattaaaactccacaattccacccaaaattttactttgattcccaaaaccccaacaagtccatctccataccttgaaaatcagtgtgatttccataatgagcattattaaacaaaagtaaaattcttaaaatataaataaataataagaagacgcgttttcatcaagctggatatgatggaaaatgcaaaaaataataacaaaactcaagtgaaaaccttgaaaagagcctttcaaaagaaaaggaaaagaaaagaaaaaacctttataagagagattaaacgctgtctaagcccagaactaattagatcttccaaatatttctgaatatcagatagaagatcagcatcaagtccctggtcaagcacaacagcctgcaaaacagcagcacctagaagtattagacgaaattaaaatacgacaataacagtttaaaaaggttttagagcattaaaaaaaagtgtcagatacccgtagtagtgtatagagggctgttaacagatcccttctctcagtgtaccaaagtcccgctgaaagacgtaaattttctagtggctctcgccccattaaaccccactagaaaaaaaaacaataaacaagagaaaaaaaaaattagcattcaccaaagtgatgcaagtaagacattaaagaatcatgatatagtaaataaacaaaaaagattgagtacattatacctcttgattggcgtgtacaattaggcggacacagttaatttcattaagatgaagatcgtcactcaactttaatgcctttaatccaacataacaccaaaaaaaaaaggttgagggttacaacatacatgataaacttgaagaaaattttgttcgcatcttgtaagtcaatagacatcatacacatgatacccggagcatatcatataacaaaattgcagctatatgaaaattaggactaaaaaatcatattgaagaatttcaactattaatggactggaatacaaatctattaacttaaaaagctggaggatacacacttaaaaggtacaatctatgtcatataacgaaattgcagctatatgaaaataaggactaaaaatcttactaaagaatttctactattaatggactggaatacaaattgattaacttaaaaagctagaggatacacacttaaaaatgtacaatccataagttatttagttatcagagctttatcaccatgtccttgaacatgtattaaaaatttaacaaagcaccaggcccgtgaagaagtttcaaacagtacggcagattagtgaatcgtcataagcaattaccgatgctaaaaccgcatcgtcaaaaacaattcaattaacaaaactaggagacgggggacatttcaccaaaccgagtccaactcagctatttggactagcttaagcgtcaaatctcaaataaacattaattacaggcagaatgcattctaaattggccgtgcattcattttctaagcaaccaaacatatagtaacagttcatgaacttacaatctggacatcttggtcatcaagcgaaattggtggtgaatccggaagcctaacttctttagactgaacttgagctcgatcagagggctttggaggctacagaaacaacaaaaaaatcccactaataaagacgaaaagaagtagcatttatgaaaggaaaaagtaaaagtacttctgtaatcaaagcttaatataaatttgaaataagaaagaagtgccgcgttttcccggaaactaaagagagacatttgaacgaaaaggagagagcgtactgggtatgagagaagggtctgaaatgcgggaagagaagcacgaacggcgtgaagaagctcaaccctttgggctggggagggaggcgacggacccaaaagagacgattcaatgatagagaggagctccttcgttgagaccatggctgagaatttttggagctctcccagttccacttgcaaaaatgacgaaaacctaagagacagagagaatcagtgtgataccgaatgaaatgtggagagttgaaggcgggaaaatggcctttgtgaagaatacatagaagtactgaatagagagaa

SEQ ID NO: 224857 - DNA, 2868 bp, Cannabis indica
ctcctctctctctctctctctctctctctctctctctctctctctctctctctctctctctctctctctctctctcctctctctctctctctctctctctctctctctcatatgtatacaatacaagcatataaaatatcatagaagttaaatgatatttggtaagcaaacaagatatagattttaaaatacaaggttgttagagttagagagtaatataattatagcatatatgaaaatatagcctttttctaatgagaggccaagacacacattcaatcagacaatcactcacgttttttcttcttctgaggcaagtggaaggacaaaaaaacagatataaaactctgctgtgtagaagtatcatctatgaaaataacattaacagaaatatcccaaacaaacaaaagaagttaaaagatgcaagtctgaatgtagtactttacacttcatagttatttgtaacatgattcaatcagaacacaataatattagcatccggagcatgaacaaattaagcagttcaacaaccgccacacaaaatctttattattattttttaaaataataattagaataacagatggagccgtacagttctaaatctaaattgttagtctgtgaatatgtgaagtaaacgacaattaaaaaaagtctagtatggcctagttagataagccacctctcatttcagatttcttgtcgttttcgtccggtcaacacattgagtttacaatacactgtacattccactccactcgataagtactactagtaaatatagccacatgtgacttactcagtagtaacctttttttttttagaaaaaaaaaaaaagaaacacatgggtgaggtagggacatgacagcacagctcatgatgtgtgtcactgttttcttggcctgaagcataataagatgctcagcttttgccttttggacaaatatcaagcatgcataacgtacatgtgggatactgcacatcctttccctctcttttggaactattctctctgtatgtaatatatatactactcttaggtttgggtgagtttatatgaaccaatttatactattaaaagcaaaaaaaaagttattaccaatactacacttgataattttacttctattagttcacttggataaggctaaatgtctaatgatattaaataatatgttgctaattttctttctcttacagatgtttttttaatgttcttgtcaattgatctagttttatttagtaattttgtgtaaaaaacaatatataggaaggtttcattaaagtgactttcatgtgttaaaaaaaaattactgttaagttttggggtctgatgaattaagggcaacacattaaaactagttttgattctatattctggttgagattaaaattcccatatgggttttctaagccaaaaaaaaaaaaatcaaaagtttttgtttttaacttttttttttttgtctgaaaataaaaggggtggtttttgtgttaaacttagaaagttaaatattacataagtgatagctaggaaattaaacgaaagtatgatgacttattagataaatcaaagatctcatagactgttccacttttgttggtcgtcaatttatcattgttaatcaagatcttaacgttaatacccaaataaatgcttggacagttgggcttgtaatggtaattaattctgtaaggaatatcatggaattatcttgtgatatgtatatagccttattttgttttcaataaaatctcaaccacatgctactttcttagaaatatatataaaacaaaagatcccaacaatgtgggtgggtcggattaggctatgtttatttatttttaatgcagcaagttgggctctgtggtcttcaattacatcattgcggctcatcaaaacaaaaaaaataagtcaattttcaaggataaatacatataaatatactatattgacctaaaacataatatcacatgcatgaccactagtttctttctttagtgatcaatacattttgatctataaaagtgactatcaactatgcatattatatgtaagatgccttttccaatctctattactttatatactattacaattatttaagttttgtttctttcttggtttagactttagaacctccgatctcaacattcattctgttgatacttccttattttcttcatgtttaaacaaatgtgtgtgactgtgtgatctgtcaccaaccaagccccccgcccgtactaatcagccaaccaaatctttttttgaaaaataaaataaaataaagaaatttagaaaagggaatattattactatattcaaatgtaatagataaattagttaatttcgtccaaaaaactaaacataaaataaagttaactgattaataatgtctttttattattatatattcaaatatattggcatagtgaaagcatgatcataattagcggaacaacctcttctaatcagaatattatttaattatggggcatatactctgcctcattatatcgaagtctttttacgagcgagaatatgagatataattgctcccaaaaatttaaacctaaaattttaacttataatactaaaatactacctgaaacatcttaaaataaataccaaaaaataaattgtattagaaaactatatatgtattcaaatatattaatggcacacttagtgcttgattaaacgcctaaaaaattcaccatctagagagatttaaattaattccaaacttttttcaaaaaaaaaaaaaaaaaaaacaaaaaaaaaaattaaaattccaaactttggatctacttgttagactatatatatagtgtatgtaatatagcatatataaatgatatgaaatgcgg

SEQ ID NO: 224858 - DNA, 4638 bp, Cannabis indica
taaataatgggtggttaagcttatcaatggaggttattgatcttccaaacaacaaaaaaacagaaggaaaatcgaaaatgaaattgaaagaaaaggaaaaaatagagggaagagagtgagatttgattgatgtgtgatgggatggcacacgtgtctgtgcatggaatgatgagtaggtggtatttttgtaataaaacaaagatggtaagtaaaataattgatgtagacgtgtaggggtaaagatgtaataaaaagtgcaaaaaaaaaaaaagatttttaggtgtaaaaatttgtattaatatacagagaaaattaaacataaagaaagaagacagcagagcaacgaacactaaacaggaatcgacgatcagtatctaattgatgaccaatttttgcttgtagtgtaagtaaaaagaatatagaaataccaatcgaactcctttccagtactgaattaggttttttttcccctgttaatcattctcagctctcaggtatggacccttctaattcctctttcttcttttacttttaattcttttttcttttttttttcttgtaccttaatcttccagtccttaatgtgggagacccatgaaaaaaaattgtaacttttctggtggacctaattcccaatgctgtattcttttaggttttattgacacagaaattgaaaatattcagagttggatcgtaggatattttggtgcttagatttatttatttttgctatcgcaagatgaactaacatttataagttcttgtgcttaatgtgaatgggtgtatgctattttgctatatacctgcattctagtagaaaacgattaatcttaggcatggcaaatcaagtttttgttatttattacttcttttttactatttataactatatttaaatttttgaatgccgggaaagagaagcgggtattattttagcctcatctgctgatttagttatcctttcctttttgtatttttacttggatgtactagagaacccttaaaatgatgctaaaatattgatttaataagcaggaagtatattaaagtttttaatgacatcaagagctttgagaagaaggctccatcattcagatgttgatggaaaagggcatgaacatttatctggcttagaaggattggatgagcctctacttgggaaccatagatatgacgaaagacatccagaggttagaaaatatgtcgagtatttaatgatttaagagggaaggcaatgagtgagggatgtagtttggtcaatgcattttcttgtgtcttgtctcatttgtcttatgttattatattatagggttctcacctagatgatctcttagatgatgcacgaaggaaggaacaactccattggagctttatattctctcagttaattgcacagtgggcgcactggtttggtatgctgtgttggtagtatgatttgcttgtttttgcatatgatcagaggactatcttgtctcttcatctctctctctctctctctctctctctctctctctctctcccatttactttcttcttgactcatacattagtttttgtctctgtagcaaatattgtaattggacctgtatccttcattgggtggctttttacccttacttctgctggacaaataagagaaaacaataattttctaagaactccacttagtcctttacaggtatgagattattatctgtatctttatcttgtacttgatgatctcccattctctgattaaatgtgttgtgctatcttattatatgtggacaaattaaaaatccacggaggaagtataattagaatgtgtatacaatatctttccgaaaaaaaagaagaatgtgtataagtttaagaaactatgttcttttatttcatttatatatccttgtataattgtgttataattgtgtttgtgtgtttcggggcaaaagttaatgatttaggcttgtctgtatgccctttatacttctttttggatgggaaaaaaaaaaaacaaagaaaaagaaacagttccgagattctacaatttttctttgtgttttctttttaattttcaaggtagtggtgttcattaaaggtcaaaacttgcataaattggtcattttaagctttgttgatcactttatttgtttttgaataatctttgccaagtgcaaatttgcccttactaatatgttagtctaaaactgtaatattgtgtccccgtaggaagaaagacttagaaacttacggcagaggcttgaagtcccctttgatggttctcgcatggagcatcaagtaagtatctttccaattcttgtcatttcagtcatactgtatatgcctacactgttgtctgattttttgtgattagctttctttcacaattaattgacagttgcaacattgatgctaattataggtattatgtatgtaaatgataactaatgttagagaatattaattataggtgtagttataggcatagcctagtagtattacccctctcacaaataaaaggttcaaggtctaattcccctcctcaatataaatatatgtgggaacaactatggtaccacaggttttttgtcgtaccgtattacacgcttcagtttgcacatgtgaagttatatttcaggtttctacatgaggcgtgtattatagctagaagagtcattctacacgtttttgagaaatttggaatagtttaaggtgtcaaaaacaaagtccaaacagtccagatagaatattccaaatctcttgaaaacatttacaatgcttactctaattacaataaatactgtcatgttaaaaaattggggttacaacttccatacatgcgtaaaatagggcgtgtggtacaataccgcattagaaacttgtctgttatccatattcctgagcatgtgacacgtgacatataaaggaagggattaacctcataatcttgctaattaaattccccattgcaaccctgttgcggagaagcctcacgaaatcgggtacaagtcaagattgagatattgacttaagcttacttggccttatcctagtttaccggatgcggaagacataatgtttctcctgaacccggagttgtccgaacatggaagcctgtccagctgatacccagatgggtactggaagggcttattgcggatatcgacaacctaagagtgtcacggacatctacctttggtgcaccccggattgcctagtgacagtaacgctttttttgacacgggatcagatcttatcccctctgtccaggcatggtagtgcgctcacctcatccacctttttgctagaacggatatttcagatctctactcttaaaggtgaaaccttggagcggcacgcacacacccctcggagctccgattcatatagaatcctgccataggagtgatgcctgtggtcgctgatcgttttctagcattgtggccctgtgttggtgtgccatggggctcgttgggcccttgctttcctccttttccttgttgccagcaactctattaacatcttttttgggttctttcttgatttttcttgaacttccaagaaagtcttgaattgttgttgtaacatgtctcgaagagattcttgcaactgttgattatgttgtcgtgttatctcttgtattgaatcatgaagagatcctttgattccaaaagatgcaactttcagatcttcacaatcctcctccaaaaccatgaaagaaaaactgttctctgcttgtttcttgggcaccatgttcacagctcaccgcaccaatttgatagaataatcttagagtagaaatatcctatcagctatatcccaaaataaatatcagtaatgagtttctcaagtgatctttattctgaaaatgagtgacaaagttacaatatcgagctttcgagaggctcgtctctccaaattcacaatgtttcgagaggattggtctctccacaaagagtctactcttatctaattccaagctaatctaaatgaagttgccccctttctatttataagcattggtcttaaaaagacttgggccacctaggattacaattggaccattagaattaaaatactaagacaactcagcttgtgtgcataaaagactaaacatttcatttaatcattttgtgatacataagataagtcttaggcttatcatacaacctgttattttgaagcctgccaaagtaaacgcatcgctgatctgcaaatcgcccacttctccgaagtcagctcactcgtgctgcccgccacttgatctaggagttctgcagcgaaggacactacttctcttccaaccttgggcaccattcgctttactagggcctcagtgtctatcattagtcctccttgaacagtggtacggatgccttcggtgatctcagtcctctttactgcggaaaagttactagccctcttctggagcacaatcctctccttctcatggcgcttcctcagaatattgtttgcctcgcccacctttttcagaatgtcatggccaaggatagtaggcttcaattgaaatttgaagttcaacagcaggattctgggtagggaagtgacaagccctagtggctagctagaagtagattgttggccccttgaaggaacgatggtttctaactgaggatgttgttgttggtgttgttgttg

SEQ ID NO: 224859 - DNA, 6443 bp, Cannabis indica
accgcgatcgcaccgcaaaaaaatttaaatcttatttttttttacagtgcaaagaatttgagcggtttgatgaacatccttacatgatatagcaaacaccataaaatagttaaaaaatgctataaaaaataaccaaccttaaaagttgcttgccatatttaagtaaaaaaaaaatggtgtaaattctacgatgtagatgtagatcatttttcacctgcctattttcagatttgatcactaaaaaccaacacttttatattgtctgtcttttagatttttttattttaagttacattttctttaaatgtgttttttcacatttaatccaattcccgtttaatacctctctctccttctaccagcactcgcattaccaaacaaataagcaataattatatatttattcgatgaaaaccaatacataaatattctagatataaaacacttctcgattgtatgctacaggcttacaggcggataatgcttcgaaagctaaaactgattacatttcgagattttattacgagaaacatagaaaccttcccaatcaaacccacgattaagggtaacttacttttcttattgctcacaggcgagcccttgaagctgctgctgatgatgaagcaggttgactctgcaaaaaaacagaaaatcaaaatataccaccactgtcactatttcttttcattgtattattaatatgagaaaaaagggctcatatgggacattttcaagaaaaagtaatcacaagaaatgaggtgccaaaactatgcaacacactaggatttttcggttatgtactttttcgtggaggatgttgctaaccaagtcatgttgcgtaaatgtttagaaaacaacaacaggtgtggaagttcttaccagtagcatgccttttgttgctctttcttccaaaaatcgtgatggtttgtagaagctgccatatagttctgaccatttcttcagacttgagtaaacatgtttaggcccaaccaaatctgcccaaaaaacaataccgccactgccacacaatataaatgcaagcttgtaagatactaatttacaaagattactgaaaatttaacacctataattcagaaaaaaaaaaaagaaagaaaaaacaatcctctctgttgcctaaaaaatattttggtaaaatagctcttatagtattaagtaacatcctcagagtcataataaaatcactcaccggtaggatgggaaactcatcccaaaaacagatgcaacgtcaaggtctgatgcccggacaactattccttcatctaaaacacggcatgcctcatttactacaggaaagagtaccatctccacaatttcttggtctgttacagttataggctgtcaccatgatccacaaaacttaataagcactagtcctatagatgcttaaaaataattaaaacaacttttgtcacatagagctttaagtatcactgtatcagaagcatttgatagcaagcataattccaactacgattattactgtgaatggtggtctacacttcgaacagagcaaataaatacctttcttccttgcataatatctgcaagtcgtcgagactcttcaattactggtagtactgtcagatcaggttttggctggtttcccctttcataaatgtaatatcctttcccattgtttttacctaaattccacaagtgtagagaagggctaagatgatatgcatacaaaagtattcgctaaacttaaaacacaagatatcatatgaggtatgggatttatattaccattccgtccactttttattaagaggtcaatcaatggtgattgaaatgttctgtcaggaaaggcatcacaaaactgttttgaagttgccatgaatactccatatcccgctaagtcttgaagcctgcagataaggacatcgcatacaataagctatgttccatatggactattaaggctaatatgtaagggttttcataagtgaagctaagagggaatgctgaagtgactcaaaaatgctattacgaatgctaattacagtaggtttacataagtgaaatagtaagagttaatattagatgtatcgtggttaagattgcaaattgaatttttgaattcagaagaccataagggacttctagtacaatagtaaaactagaaaaaaaaccttctagcataagtgcaaaaaccttattctacaacagccatacatagaagtgatctgaaaacttcaaattaaatggaagtcctcccccaggactcttattttgttagaactaactaggacctcctaaagcagtgccataattctaaacgctcggtgtttgagatcaacttaaaatgaagaaacagttttcataagaatcttactggaatgggccaagaggaaggccgaacttcttgattaccctgtctattctgaaaagatccacacctaaatggaccaacatatgagaaccttgtgagtatgggaagaacgttctattaactgcaaaaccagtgcagtttcccaccacaacagggaccttctttatgacttttccaactgtcataagatcaagtatcacttgtggtgaagtcttctccgtccgcacaatttccaggagaggcatcacatgagcagggctgttaataaggaatcaaaataaaaagaagggatcgaatgttagatttggttactacaatataattacatcctagctattagaaatattgagctgcacagagtaaatagataaagaaagaaagaaacaaagacgatcaagtgtgtgcaatccattacaacaagcactgcaatgagacatgattatcaaataacatctctctgacattagatacaaaagatatctaagatttggactgtgtatactttaagtggcaagcttgcttgaagcagcaacgaatcaagaatttgccatttaacctaaaaaaatgtgccccaataatgcggtcttgagaggttgttttctccccaactaaatgaaggtcaatagtagaggtgttactagccaatatgcagtgagaaggacaagctttctcaatttcactaaatattgtttgcttaagcggaatcttttcaatgacagcctgtacagaaaaatagctatatcagacttctttttaacagaatctaatatgtaaataattcatttacaagactttctttatgattaaattacaggacaaaaagtagacagtagccatgggaatgggcatatatgaaaattataattgctaatttattttgagtgcctacctctatgaccatatcaacatccttaaattctgtgtaatccaaaacgcctttgagcaaagagaggatcttgtcagccttatcccgtgtcagcttcccttttgttaccaagccccggacatttgctacataataaaaaaaacaagcagacatcatgtacgaccatgagatgaaattaaatcgcaataaacttctatcaagtaatacataccttcaatcatttttgttcccttcataagatactcaagattaacttccttaagaacaacctttatattgctcagaataagagctgtagcaatgccagaacccattagacctcctccaatgacagcaactttctttatgtgccttggtttaagcccaatatcagaaacatttggcacctgtaataaatttgaagttcccaaaaatagtaagaaatgtagagaggctagaactatagaaattactgaaactaaaaaaatttgatgcaatctagtaatgatgatctaaaaaaaaaaaaaaagatttactttgtaaaaagtaggaaggggagaaagtttggggggaagaggcagcttgtatcaaccctgtaccttagttgttgaacgttgagcaaaaaagacgtgaacaagacctttagatgtgtctgtcaaaaccaacttcttaaaatcttttgcctcctgtattgacaagttttgtcattagcacaattataaacagctagagcccaatgcttcaaaatatttagaaagcaatgcctgggtctctaactacgtttagccctcaaaatataaagacctaagaaattagaaacatgcatgtcgccagatgataaaagttcctagttcctgtatagataaaaagaacaggagggcaggtagtagtttctgaaactgaaacctccagaagccaataaaacaaataacatcaatggtaagaaactaaatgacaaatacctttagaactccactgtatcctccatgaacaatgccctcctcaatcacatcaagacaaacctggtgctgaggcatatttggagcagttatactggcttgttgacgtgcaacttttagtatctcacgtgcctcagacagggatccaatcttatctgtcctgtgaagggaacgaatccatggtttgcgcctctctgcaatcgctaaagcccacatacgtgatactttcagtaactcttcagaggacactatggagtcgatgaggcccaacttcttcccttcttcagataatattggtcttgatgtctgaaaaagcaaagtattagcatactgatttgcaaacaatggaagataaatcaagcatatagaaactagtaaatacacaactgtgttgtttctatgctattgtaaacaagcaacagataaaaaactatcctaatttcattcttctatctctaagctgctctaacccactaaaatagttcattcaagacaaattccctgtctcctgccttctctagctcaataactgccagctaattttaaaatataacgcaaataagtatagcctccaaccaaaaacaagttttaattattttttgtgcaagaaagtcttaattaatttaattaatgtacttatatatattttttacgagtatgtaagtgaaatgaaaaaaaaaaaaaaaaaaagttaccagcatcatttcaatcccctttgacagccctacaagccttggaagacgttgtgtaccttaaaaaagcaaaaaccaaatgttaaaatcttggtaaatgctgatatttgatcactcgttaaaatagatgcaaacaaaagcagtatacctccaaatcctggaataataccaagagaaagctcaggcaacccaagttgagctcggggagcagaaatacgtgcatgacatccctgcaagaagtaaaattaagtcattaaaccaattcaccaaaaactagggatgtaggtggtgctttggttagaatgacacaccaatgctagttctaaaccacctccaagagcaagtccctctatggcagcaacaataggctttctcgaatctatataaagaaggtcatattaagtgtcagcagtaatttgataaaaagaaacaaaatggagattttcaatctgcaacagaatgatattataagtggtaggggttgggattgagaccttcaattatgttaaccacaaggtcaacagatacatcaggcataagtgaaacatcccctgccatatgaaggtgactttcatcaatttacagattaaaattccataattcaaaccataaactctcagttattaacaaagcacggtgtatagaaagtttcctaccagtctcgtgaactttctcaaaaacattgatatcaaaaccacccgaaaatcttcctcctttgcctacattcaaaaacaaataattcatatttataacatatatagtccgagaagaacgaattaatccaattccattgttacaaataactccaccaaatcaaatttgacacaaaaataaaaagaacatgtatatacataatagcttaccagtcaaaacaatagctttcacatcatttcttctcgtcgcctcaacgaacttttcctttaatccctcaataactaaaaaaccaaaattcatcgaagatcaggaaagtaaaaaataaaaagaaaaaaaggtgatcgaagggggaaagccatactaggaatagctaaggcgttgacggggggattggatatggtaatgacagcgacggcatcgtctccgacctccatggtgacactgggccttgccatggcgtttgggaaatctgaaagcagaagaagaagaagaaaaagcaagcaggcaagagcagctttagcgggatataatggatgaagatcactacgaaaattggcaataagtctgtttgtggttttattggtttttgggtctataacggaccgttatttagaggtggcaatcactgttattgtcgtacccaacgttgacggtgagagagacagcaagtgagtttccacgttatacattttagtttcagattaggatctttatattttaggtaaggtcttccttttctatttttcacattgaataaaattagagatatatacaaaataaataatccaacaacttacgtaatattgaaattttcaaataattttatctttatcgaatttttgtttatttcaatggtaagagaaaaaagatacaactttacatatataaccttttttttttacttttttctttttcttttt

SEQ ID NO: 224860 - DNA, 5323 bp, Cannabis indica
gataccaacaccaagccgacgtgccaacgcttctatcatgccccattcaatactgtccgaaagtcttcttcatcgcccaaggactcccatacgtccatggaccaatcctcaaggcgccatgcctccgtgtcatctcgtgttgagactcgtgggcaagacgcaccacaacatctcttggaggtttaggccacattccgtgcaagcggcataccgacaagccaatggaaacgtacccgttaacttctaacagcttcttagacgcactaccaggtcagcctgataatgtccatgagtactccaactcatggagacatatgagtcccctcgtggtcctcatatgcccgccctactagtcccactgactagtagtagctcgcttaacaccaaggtgccagggggtggtggagagttgacaacatgtactccccccttgaagagcattctaaacttttagccttctaccaggaacatacatgattttggttttgtagacatatggccaaaccatataccaatcacagaatttctccaatctgattgcaccattgtattcgtagacccaaataaatagagaataccaagtcatgtcccgttctggacaatattgaagatatttacgaaaatgtcactgccatacaaactaagcatcagcatgcacaccaacatgcgccaccacttgaccaccacttggtcaacttgtgggcatcacctaacttgtaatgtgccatcttggcacgaacgttacacgatgtgttgtaatcgttctgaatttcacacgctgcatcatagcatccaagacatggttaacaacttcctctccttggttggtaaacttaatctctaggagaaactttggatctttagaaagtgtaatggtgtggcccattttgtggttcggtgggcaaatcaaaataaaaaattcagctttatcgatttggccaattttgacgacttcctgcattcttgtgttgcagacggctctcttgtgacccttgttttagattagcttttcttttctccttcggattgttagtttttttcttttttttttacttctgttgattgtttgttgggctgtgtccctcttgtttttggagtcccctattttctcgtgttcgttagtttgttcttcggttctatttgtggaatcaattatcaaataaataaataaaataaagacgtttatagtactaaaatttaagatcatttactataatttcccattttagaaaagtttaatgttaaccaaatgaagtaagctgaattctcttttagttggtaagcttaagactagtgctatttttcttttacttactgttctcttaacttaagacgaaatgttacaataggacttttaattagtctaagaatgtgttagaaaaagatggatgaaaattaatttaccaaatacttaattcttccaattttaaataaacacataaaatccacccatataaatacaccaatgttgacaaaaaaccatatgggacctttcaacacactaaccatccgaagtccttgtgcctctctttacgaaatccaaatagcacaaattggtgggaattttttttttttctctccctattggcaggctaaattttcaacagaatggggagaacaaaggaaaagtagagctgttgaaccacatatggaagagagtttcatagaaccacgattaattagcagagtttgagtaagcaacattacacaacccttggactggaattggatcaaaacccataaagacaaaaccaaatagcagagtttgagccaatcccattcacagtaacctcagcaacttttgctagtgaccatgattgataaatactacgttacataccaaaggcaactgcctaatgccagtaatcctcgcatacatttcctccattagcttcttagaaaatctttcaaagaaaatgggggaaacccgtcctataaaaccaacaagtgaataataaggagcaaccccactacttgcttgtcatttacagttcatattttgtacttaaataaccaacacatgcgatctcagaaaatttaatagaaagattaatcaataacagagtgcaaattaccttttcagtctcttggcttaagcactgcctgacagcagttgtctgctttatgagcctttccattgcagtatagctaggaagatttgcatgtgctgacaatcatcaggaacagcaaaaaaaggaataaatttaaccgtacaaatatctaaataacaattaatacaaaacagggacccgattaagctaacaaaccaagaattgcctggtttaaagtatctgcgacttcctgtcgataatctgggctgagaaaatgaaacattggagatttttccggttcatcataagcaagcagagcaagaaagtcctgcatcaaccgagaacttgtgttatatatttgatagagcacaagatatctgtagtatgacaaagcataagaatttgaagcatacttcaagcttgtgaacatatttatccatctttccaaaaggggtcaacttggtctgggcaaattccaaagcttctgtgctgccaaaaaagaaagaaattaaaatgggaatgcattcaacaggcttctagaattttcatgtctatactgctcaccattttctagagattacaagattaacaaaatgaagactcaaaagatcaaaatgcaaatcaatattcttctccagtaagtcatgggcaaactgttctgtcagttcaatggccttcagcacatcaccctccattacaaaatttataattcctgagacaaaaaaagcaatcaatacacaaagcaaaccaaatacctcaagttaagatacaatgaaatatgaaaatgaagtgttagataaactatagttcttttggattaaaactgacgcctacttttccttttctccatgtcctcaatgtaattagcagactgcttcatcccagtgcaagcaataaatgactctgcagtttctttgtggcagttatgaacaaggtatgatataacaatgttgtgaatgtcattttcactgattacctgttaacaaaacattataaatccaacttgatttgcagcatattaaaaaaaatttgaaattacatagaaatgggaaagacatccaatctgtgtctcttattaaacatccaagtctcttcatttcaatctctttcttaagcttatatagcctcacacacaaactaacttttatcacaagaaagaaaaacgaaacaacaagataatataaaaaaccagccaaacagaaagaaaataacaactaactagataatcttcccacaacaagtaaactgaacaaatctgagttatcattttacctttttatataaaaccaactaattcttcaaaatatagccgaattatgaccacgagtacaaatcgcattcacgtgtaaacctattttctggcatgttttagttcaatatcaggtcaaccaaacttattccccaatttgacacctgaaattactaagtagtattctctgctaccttaattgaaaataatgggatgcatttcacaaccataattaatgtccagaaaccacaatgaaaatcaaaaccaacaatatttgcaatgaaataaagttaaaaaaaaaaatcataaattgaattagggctgtaaggagtgataataattacatcaaaaatatgaaaagaaaaaagtcaacaagttcatacaatgtgaatactatagttatccctaagatagccttaacctcttagcagcaattgagaaagagaatgatcaaaactcacaacgtgatcgtagtggcgaggatcgacgtccatgattgagcaccactagaaaaagaaaagtagtgaaaaataaattaggagagtggaaagtggaaagattctagggtttgggtttgggtttgggattttaagatttcttacctgtagtcgaaagtggagtgcgggaatttggggatctgtatcgaattgtaaccgcagctgtctctgtgattttcgtacacgtcacctattattgtcttcgttatcccccatatcttgatgagatgagaaaacatggaaacactaatataaaataaattacttttctcctattttgttttacaaaagttaattggtggggtttattttgttaataatataaatttaatttttgtattttaaattgtctaaaacgatttattttttatttaattatcaaatataatttagtcaaattttaataatatttttactattgtgatttattttttaatgtgagggtattaagatgtaggaagtatatgttttttttttgttattttttttttaaaaaaaaaagaatcatttagttattgatatagtaatgagttagtgttttataatcttaattaactattattttaaaattttgttaattaataactaattagctttcaaaataataaaaaagtatataaaataaagaaaattacctcttatactattttttgaattttttttttaattttacggtttggatttctaaagtagtttctccggtggtttctatgtgagttgctatacgacttttagttgcgatttaagttgctctgttagttgcaataaggatttctaaataaaattccgtaaaaaatgtaaaaaaaaaaaaaacctgctttgaagtataaaaattaaaaagccccataaaataatcggtatataaaatggtagcttattatattacatgacaacttattagttttgaaaatatttttaaaggttacctaaaggtattttaaattatgatctatcataatataacttaaaaaaataactaattagttactaaaatgtatacaaataagtttttaaaaaagtaactaaaatgtatcttaaattatatgatataaaaataaagttttttatataaaggtaattaattagcttcttattaaccctattagtaaccaaaaagttatttttgaaaatgcgcaaaaataaaatgaaaaaaatttagaaaacgtcaaaaaagttagataataataatagtaacgttattattataaattagatgcaaaaatatatattattgtaaacctcatttttttcaaaatagtataaaatggtaccttaacttaatttcgagatttttttttttaatataaccaacttgaagataatttttagcaagaacaaatgtaaaaaatataacctgattgtaatacctctatatcagattattattaagttttattttaacaaaaaaccagttcaaagtattattttgtattattttaaagggaaatttacatggtattttgtattatttttttacaaaaatactgtcaggcggtatttttttacttttttactgtgtattttta

SEQ ID NO: 224861 - DNA, 5615 bp, Cannabis indica
cattctatgatttttctacaagtctttttggcatttcatatttacatattagcaagactaagtgattctttaattctttattactaatcataatctctgctccatttttcagtatacaccagcaatagatatatggagcattgggtgcatatttgcagaacttttgactggaaaacctctttttcctggcaagaatgttgtccatcaattggatctgatgacggatatgctgggaacaccttctgctgaagcaattgccagggtttgtcttatttattcattgatgttcaactatattgcttatctttgatttcggagttgtttctgtctgcagtaaagatttaattaaatctattatttaggtaagaaatgagaaagcccggcgttatttaagcagtatgaggaagaagaagcaaattccattctcccataaattcccaaatgcagatccactcgctcttcgtttgttagaaagaatgttggcttttgaaccaaaggatcggccttctgctgaagaggtatgtgtatgtgtggagtggagtggagtggaatggagccagtttactttcagtcatgaatgttttctaatgacacaaagttatcttcttttaggctcttgctgatccctattttaaaggcttggctaaggttgaaagggagccttctgcacaaccagtaacgaagatggaatttgaatttgagaggcgaaggattacaaaagaagatgtgcgagagcttatttaccgtgagattcttgagtaccacccaaagatgttaaaggagtacttggaaggatcagagccaacaaacttcatgtatccaaggtattgatagttttcaattgtgtgcacatgacattgtttccagcactacatgcaatcccattcttctgttaatgtatatccttgatttcgggacatctaactttcagcccaatattataaaatattccctttttgcaaacacacacatacacacattagggaaagaagtttttagaccaaaatcctttttctttgtcattacgaagttttgtggtgcaccaaataaatatttgaagtttcattattactacttgcatgaaaattgattgttaagtctaatctcttttgttggcagtgctgttgaccattttaaaaagcaatttgcatttcttgaggagcactatgggaagggtggaacggttgctccacttgagagacaacatgcatctctaccaaggtttgatatatgtgattgcattcgtgatgcttctttattatgctgctgcttttgatccaattttgacaattacatgcaaacattttcatgtagggcatgtgtattatattcagataattcagtgcaaaattcagcagtagtcacagatgacctcgcaaagtgttccatcaaagaagttgagaagccacaacaagtagacagaagttgtggaattcctggcactaggcttccaattcaagtttctcaaaccatccaaggttgatagtttctctctgatttccatcaacctatcagttttcatttatgttaattttttttttgccaaatgatcttgcaataacatttttcttacaatttctcccttattgacaagtactgctgtgtctgcaaaccttaaattcttcagctttcttgttcctaaacatccttttttgtgcaggaggagctgcaaggcctggaaaagttgtggggtcagtattacgacacaacaacggtggcacagctgtaggtacagaagctctagaacaacgcaggacagtcaaaaatccacccgttccaaccccaaaccctgcaacaggggtttcataccctcgaagaaaccctccaatctgtaaaaatgagaggggagaagatgaaggaattgaaggttcaaacgggcgaacaaagccacaatatgtcatggcaagaaaggttgcagctgctcaaggtggatctggcagtcaatggtactgacttagtggagcattgattcattcctttaggtttcaacttcacataaccaatgtacaagggttgaatcttttaactggtctaaactaaattatgatgttcatctacaccatgtagcccagataactgtatttgctaattttaagtgtaggaaagtttaaatggatcttatatctctgtggcccggttttgctctatgtttcggattagagacacagttcaatacaaagggcaatgtgaggaaaggctgaactctccaaatgactagcctagttctctgtttcattttcacattctttgcaatctaactaatgttattttttagtaaatacttatattggccacaacaccagtgatcaaacaatggttgtaccctttactcaatattattattttgttttttaagtcaatgaccatctctgatgtacctctgcaataggatcaggctagcacttggctgtcatgaaataagaccagtaaaccaccatgttttcaagtacattattattacaataccacctacaatgacattgattatacatgttactacatttgactaggcagatcatatatgcaagaatgaatatgtatgaatgccgtgatctacttttcctatttgacataactagcaaaaaggttcggacaaagccaagggggcagaaagtcatcagatataataatgaatgattaggctaagcaacataaaactgcacacaaatttacggggacaaaatgttcttcacttgatacaacaaagtaaaacaatatttcacaattggaagcaaaaaagttacaagaaaacccaatcgagccacctttcttttcaaatgaattagctgttagtagaatgaaaaatgtgtaggatcctaacgagctctctttattgttgcggtgatgacaatcttacttggtctatcaatacaaccttggcttcactctcctcctgttaacatcactgccatctaacaatgttaacttgccatatccacaagtaataacagaatgctccccaatcctcccaacatattgcagtaactcggtaagaacagacgggcaactctccttcaagtattcgaatccatccgtttccattacagctgaaagcgacaaaaaaaaaatcaccatttagcgtctatttgtttcgtgtctagtaaaagggtaagcagaaatccaaataatgagaaagaaagttgaaaagcaatagaaaaaataatgatacacctagcatttagggataattctgtttcaaccatgttcatgtgggtatcaggaactagagaagtcgagcataaaatacttaatcagcaaagttatggtccattatggggaggaagtttccttatttaactatctcactatagatagcttcaaatccaactttctttctaatgttcacatcaattggaatcatttaaattgcagaaagtcttaaattataaataaatcacgctctaaaatacagaagccattcgcgccatttagaaagcattgaaacatttaaagctttattagtcaagcaacaataccttttaagttttcaggcgatgcaacgaatttaagacacacgtccttcaactgaaaacaatggtgttgttctgccaatgctaatgtagttgcaacagtgtttatagagatatcctcacaaagtttagcctcacatagcaatttaagcctctcaagggcatatcgatctgccgctgcaaggagatgctgagccatcattgtagaggcccatttcgtgttcagacccacaagctcttccatgtcaggaagtgcatcccaatatatgaaatggagtaatgcctgcacatagggcaccatgacaaaacaaaagttaaatcagagccatcttactcgttcacagagcttctaaaaatgtaacttagcaaaaaaaaaaaatcaaaatcaaatcaaacaaacagcaaaataacaaggcaggggagagaatgcccaatttgacatgccaacaaaatcaatacccttattctccctattccagtttataaacgtggttaaggatcatctaataatatggcgaaaaatcttcatccaaagttaatatatagcataacaaatatatactaagctcctactatggttccaactcacactaaaatatgtcataaaagagggaaaaaacacatagacacacataagcatggtataaataacaaatagtatatccataattgagagagagagagagagagagagagagagagagagagatgaattaaaccttaaactaccggagcttccatgtcttctcactttattcgatgggtgttcttataccttaaaggaacaaaaagttgtgctctgaacaccggagagcgagctgctagcactagcttgtgagcagcaaatacttcctcatcaacttcaaaactcacatcacttccctttcactttgtaaaagatttccaaaatgcttactaatatctggaggaggcactgctattgagtacaccttgggtccttctgtgcatgacttaacaacaccaacacaacattttatggaaagacagtcgtctttgaggtagtctgatgtctctaaaagacttcttttgaaaaagcgtttataacccctacagcatccaaaggaaaaatgtaagaaataataccaacaactgaaacaatacgcactagagaatagctagccactgctgtagcttcttcaaagttcaatccatattcgaaatagagtacaattgaactgtacgaacattgaagtccgaaatgaaaaggaagaaagggggaattgctagaaatggaaatctaaggctttgacaggacacaaatatgtggtggtatagcttcatcacatattaacatccacaacatataggtatgacaatttaggaagcccaaactagaaaacacaaccttgattgaatccaaatgctataaaattatagcagatgaaaaatctaacttaaattccaaggttcactcccaagaaatttaacaagaacattaccactaagctgatcagctaagctcattgaattaatcaaatatcatatctacaataaaatcactgaaaattacttccaaattataataatccaaatggtataaacacataccacatgcttccacggtatttaagcgtataaggaccactctcaagcgctctctcaaaatggctatgcactttgtgtcttcccctatcgctctgatccaacaacgtcaattcaaacaaagcccttacatcagctccctcgctagctagcgcgatgaaaagcgaaacatacgtggcgttatcttcgaggctcttaccatctgggtaaaagtaaatagcccaggcatacccaccaaccatgaaagtatcggaagctatgtactttccaatacccatacccttggccaatgagtagccgctgatcttaaaatcgtgagacccatttacagtctcggtgagagacgtcgatgtggtgagcggtgagagatccggcgagggtttcgggtatcctctacaccgcttgattgtgtccatcaacaacccaattaccgaattgagaatctggggtttcttagtatcctaatatgatcaaatgggtcggattgaattagagaatttgggatagaattaaaaaaaatcagaccagattttcaatctagggtttttctgaaattttgagaaattggggggatggggattt

SEQ ID NO: 224862 - DNA, 7546 bp, Cannabis indica
  modified_base (7075)..(7075): a, c, t, g, unknown or other
aaaaaaaataaacataacataaatgaaataggtgattggtacataacataacccataaatattcatggtaatcatcatcaagtgagtacaagtactcgtggttagccgtatgtacccaggaaatagacagagtaatagtactactaatacccgaaaagatggaaggaatgattacatatatacaaatttgataaatgtgacatgtggtctgtgtctgtggggaccctaatatatctatctattcttttcctcttttgtgcattttagtgttggattgcaccacttcttgtcctttgctcccaaacatatattgctccataatatttcagttaactgtctaatttatttcttatctttaaataaagactattatatatcaaacaaatcatatgtacacaaaaagaaatagtaattattgagaatcttagccaaagcgcatggtacacattatattatatgatatgataattaaagagctagagaaagagatattggaatttggagatgggaataagttaacaaaaccaacaaatttacctttattcgcataaggcataactaatcatatcaggcataactaatcatatcatacaaggtacaagataattagaaagaagaggtgtattaactttacttgtacttcttttgcagatttacatgattttttcttcttttgtttcgtgcttgaaggaggtctgacatcctttccctcaagtttggattaagtgggattagaaaatatgtgtacggtagttgtggccaaaaaccatcttggtaggatggtttaggttcaaacttctcagctagattttactaatgtgttatgtgaaaaaacaacgacttgttgtttgactttattagttgctaaggactttagttccaagtttgttattatggagagcaactctaaggtagttatcaatacttttaatgggaagtagtctcactgggcaattgaaaactatgtctcattttgtaacaattcttctctcttatttattagttgtattttctctaatattagtaggacttttaactttgtttcccataatatggcaaagtggatattttttcacgagagatttgattttattccatatcaaccattcttataaattttttaatgaccgtagagtcttatctgtttttatttattagtttttcttaaaaaaaaaacatatcatatgggttgagtcttttttactgtggctgttgacaatcctctcatataaatccatctttggccttatgtcattttgtgccgtagtattgcatttattttgcctttttggtttttttcaattattataagttaaaaggattatccaacttattcaacttaactctcaaaatatcattgaaacattttactatttcaagaaaaaagaaaagaaaaacaagaaaaagatgatgaataaaagcagaaattgaattttaattccactgaaaaaaaaaaaacaagtttgacatccaacggttgttattcgcttcggacagtttttaatggacacacaagatgaaatcatcgggtggacgattccttcaaagattcttaaacttcgatgcaatggacggtcaagatcagatgatcctctagtcccgagagatctcagccaccgggcaatctgaagtagtagttgctttagataacaagtgagttgttaggttggactgagccgtttagtgttgttttttttctttcattttctttgggtacaaacaaaagaacacagtagtttgtacaacaaaaaggcgctcaatcaatgtactacatgcactatattactatccatgatgtttccgaaacgttagtaagaaaattcgcagccacttcgtggaaacttctgagattctcataaaaaatttcatcatctttttctttttactttcccgctccactctttctactttctctcttcatatcctctttacgcctctttctgcacccaacttcgtttggttgctgagaataaaacacaaaagattgtattttttgagtttatctaaatggacgattcaggtcaaactttcaggtaagtgggatggaggtgaattcatgtatgttttggattttgttttttgttttggtgctcatttttttttttctttcactttctcagtaaccaaacggggatgtttagaatggacgcgttgaagaagcaaaataggtatgtggagagatcgaccactagtatgaccagagaaaaacgagggttggattcaacttcagctgaagaagcacaacccgaaagaaaaagaccagctttagccaggtatttccatctttagcgttgaaattagttcaaccgtttctttttcttcttcaaaatcttttcttttttaaggggctatcatactatgccatactatgatcactttacttagtaaagttagcttaaattttcacatagcgacgtactaatgtaatttgggtttaaatgcagcgtaattgttgaagctcttaaggtggatagtctgcaaaagctttgctcgtcattggagcctattcttcgcagagttgtaagataaaatggtttctcttctgaagttggaattaaatttttgtcttactaaatagtttcttaaatttactatttgtaatgatgaacaacaggttagtgaagaagtggagcgtgctctagctaagttatgccctgccaaactcaatgggaggtagtaaccattattcatgttcaatactttatgttaatgtttctatgtgttttacatatatagatatattgtgtgtgtgatttctgatttctcttctaatggtcaagaaatcccaggtcttctcccaagcgtatagagggtcctgatggaagaaacttgcagctgcgtttcaagtccaagttgtctcttcccctctttacaggtggaaaagtagaaggggagcagggtactgcaatccacattgtgttgattgatgcaaccacaggccaaattgtgtcatcaggtccagaatcctctgtgagactagatattattgtgcttgaaggtgattttagcaacgaggaagatgaaaactggaccgaagaagaatttgaaggccatgtagtcaaagagcgtgaaggaaagaggccattactgactggagatctgcaaataacactcaaagaaggcgttggaacgctaggggagttgacattcacagataattccagctggattaggagcaggaaattcagacttgggttgaaggttgcctctggctcttgtgagggtattcgtattcgtgaagcgaaaacagaagctttcacagttaaggatcaccgtggagaatgtgagtttaacaaaatatcccaatacatttcttctatatgttatgtgctctcctccattgcaaaaaatttatgatcttttggtttacagtatacaagaaacactatccaccagcattaactgatgaagtttggagattagagaaaattggaaaagatgggtcctttcacaagaggttgaacaaagctggaatcttttcagttgaagatttcttgcggcttgtggttagagattcacagagattgagaaatgtaaggatggggattttatatcagttcttttatgcattcacacttatgtgagtgtgtagctgtttctaatactcaatctaaattctgcagattctcggtagtggcatgtcaaataaaatgtgggatgttcttgtggaacatgcaaagacttgtgctttaagtgggaaactttatgtgtactattccgaggatgagagaaatgttggtgttgctttcaacaatatctatgagtttagtggcctaattgccaatggacaatattacacagcagattctctttctgatagtcagaaggtaaaccattagtgttcttgcatgacttcggtcagctaccttgctttctgcttttgactattgttaccaactgtaataccaaatcaatcccaaactaaatccagcttaaaaggaagcattcttaactggtgttttctggagcacagtgtgtgaaactctaattattcaaagttttgggaataacaaggccttagtagaatgttgacacagaattgatgaatgacaatactgtgaatattttggttttgcaggtatatgtggacaccttggtgaagaaggcatatgacaattggatgcatgttgtagagtacgacggcgagtcttttctaacttctgaaccggagaaaaacttgtgtatatctcaaagtgaagttcccataaactctcaagattatacccattcatttgaccagcagtacctaccagcgcttccagttcctgttccatcagagcagcacaccatggattcaggactaacaggtatatattttgcacctcaaaatctgtcatattttctatgtttggcattagtcatgctctaaaatggcagctatgtcgcctttgttttatttttctgatgtgtatcttagatttggttcttgatggtgcctgctgtttctctccagggtacaacgatggtatggctaccaggttccctattcagccgcataacccaagtctgaatgcccatgttcagtacaatggctcttcattcgcgtgtcaaaatcagttaccaagcacttcaaatgaagctcacctacaaagaagcgaaaatgtccttgctgttggtcccacgcagtcaataacacctggcttccagaacaatattgcttcatcttttaggggagtagacgatttcttcacagaggaagatattcgtatgaggagccatgagatgcttgagaacgaagatatgcagcaattgcttcgattattcaacatgggaggaggtcatggccaaattcccagtgttactgaagatgcgtttccatatccatcagactacatgcccaatacagatttaaactacaacttggatgacgatcgaacccggtctgggaaagctgttgttggctggcttaagctcaaggcagccttgagatggggtatatttatcaggaagagggctgctgagaaacgtgcccaactcgttgagttggatgatccataagtacggtgcatggcacaaagctgatccaattttggtgtcaaagccttccttctggactaaaaagtttctttaaagaagttaagacaacagtcttggcttgaactgtcgggttgcgcaatcctatgtttatgctcaggccatttcttggattgtaaatccttgacatgtatgggatcttctttctgcatttacagtcgctgccctacgctcccctgctctgccttgcctgtacagttagtaagcttatatcctttgacaactgcttatagttatggttttaatctttaaggatgatgttcatctcaacatcgctcttgcaagtcgtagaaccgacagacctgagctgtttcaattgaagatgtttgctaactcctgactcagcaggattttcagtacggtgtcttagttagaattgttcttagcttagattattatttgagaatgacaaaaaaatctagtcaaggtataagtgttacctctacatatgactgttttgttgtaatcataattgtgttcttaattgttagcgtggtagtgaagtcttagttaacacgaattaacgtgttgtagttatatttgtgtaattgtgtttgtaacacgagaataaaaaatggtagtgatgataattttgctgcatggtatttgaaatgaggtcccaatcaatcattttacgttgataaacaatggtttattttttgagaagcctagaaccttgtaagtgtgaaaataagttaaataataaaccaaaaaagtcgagaaagtgcatataatgtccaacagaaacttaatggcagatggaatgaggatgattggatgaagctaatgttttttaagttaaagatgcccgcctaaagtaaagaatttatcatggagggctggtatgaatggtctccctactatgattcaactgttatctaagagagtggaggtgtgttctttttgtcccagtgccgtggcactgaagctattgtgcacagtttaataacttgccccgagataaaaccgtgttgggatcagctgttttttagattggtgctcggctgtttttactggtttggaagctgaaaagaaatgtataatttctgctgtttgttgggctatttggggtgccagagaatgatctagtttggtctatgaaagtggtgagtgctggaactattgttgctaacgcaaaggagtatgatcaatgcagaaatgcttaaaatgctcaagaaggatcatcatggtccggtttacagatggatgatggcgtggagcattgaaatttaccatcaattgatagtatcaaggttaatgtggacacaactatatttgagagtggtcgaagctatggttttggcataatggctagagattgtaatggtcttttgattgaaggctgcacttttttctcacaagcagtagtgatagtgaatcttaagattgctgaaaggatgggagtttgtgagactctaaattagataaaaagaatctggcggcagtgattatgtaattcaagattataaattgagttgaaaaatgtctctttgttgtttgttaaacgataaactattgtggttattcatagttttattagagtttctacattgtattctaattatagtttcagtttggagtctgttctaattaatttggtaccttatttggtaactgaattttataattaataaattacattttccatttaaaaaaaaagtctacaaatttcactttgaaaaaattataaataataataataaaaaaaaacttatcaatattaaaaacattagctagaatcaaaagaataaataaaaaacaacattgggaatgtaatttttgtgctaactttagtacaaatttaaacatatattttgcaacaccattggaaatctatttttttttaaaaggatatgctaaattatatataaaaaaaacactactttgataacaagaacttcttaatttaaaaatcacacttatgctatgttttgatgtgatttataaaaaaaaattgtgttgttattccacattactcatatgtgtagttacattggtgtgatttatatataaaaaataatcactacttttgacttaattntaaaaaaaaaaaaaaaaaaaaaaaaaacttaaaattacttctgtagcacgcaaatttgcttgcttggtctgaataatgacaatcctcatctaacttaattaatatgattactaatagaaaatgttatattaataaactttattagttcaatgcttggttggtcttaagcatccagcttaacaacccaatcatttgaaacttaaactaaatatttctttaaatttgagaccaccagtcaagctaattaactatctttattaattagagatattgttttacatttcctgccagctaatattcaatttataattctcattactctttagtcatcctcgtcctcgtccacttttttttcctctaaataaatcacttcatatatagtatgtgtaaaagtgtgattttaactggcacattggagatatatagatacatattatatagtcaaacaagttgtaatagtagaatagaaac

SEQ ID NO: 224863 - DNA, 16249 bp, Cannabis indica
aaatagtatttaccaaaaaaataaataatgaatattcacaaaagtattttattataattattattaaaaaaaaaaaaaacaatgagttgctctcactcactcacacacacacacacacaactcgctcaatttcagttttcagatctcgccaaaatctgtctccgtataggccgtaccgtggatgaggctcagaagtactgcttctcctatttatttctttagggtttaaagctcttatttagtgctcctccaatggcagaatcacttgtgtagtcccactccccaaaagcataatctcccaattcataaaaacttaattcaaattccattttcttttcttttctcccaatcatggtggcgaaagcccagcccgagccggtcaacggcaccactaccaaatctgggtcctcctcatctaccccggctaatcttaagcccgatctgctcacccatttttccctcaagtctttcaagctcaagaccaagcaacaggagctcctgatccgagtctcaattctaggccttgtctacatcttggcattcatcactcgattgttcagtgttcttcgttatgagtccatgatccatgaatttgacccttactttaactaccggaccactgtttacttgactgagaagggtttttatgagttctggaattggtttgactccgagagttggtaccctctcggccggatcattggcgggaccttgtatccggggctaatggtcaccgctgcgttcatctattggacgctcagatttctccgtttcaccgttcatattcgcgaagtctgcgtcttgaccgcgccttttttcgcctccaacacgactgtggtggcgtatttattcgggaaagagatttgggacacaggggcgggtctagttgctgcggcattgatcgcaatttgccctggttatatctcgagatcagtagctgggtcttatgacaatgagggtgttgcgatctttgctttgttgctgacgttctacttgtttgtgaaagccgttaatactggttcgttggcttggtctctggcttcggcttttggctacttttacatggtttccgcttggggtggttatgtgtttatcattaatttgattcctctttacgtgttggtgttgttggtcactgggaggtactcaatgagattgtacgttgcttataattgtatgtacgtggtgggaatgttgctagctatgcaaattcggtttgtgggttttcagcatgttcagtctggggagcatatggctgccatgggagtcttcttcttgattcaggtttgctcatgttattcgagtatcaaaggtcttatcttgctagtttttcctgaaagagtgttttgtagaaaaaagcatgaaattttttattagcgaaataactttacaaaaaaatttattagcaaaataatcttctaaggtcgcaaaaacgactatgaaatacgctttgcgactataaacaaccgttatggtcgttttagatttacattgtacgaccattacgtttccatagagtaaattaaaagaggttattttttgtaaattttaatatttgaaatggttagtttattggttttatgcataaggctcaattgtacggattatttgagccattccaattttttctttgtttaatttcctgattcaatttcttgggctaatttggattatttttgcttaggtgttttattttctggactgggttaagtacatgttaagtgacacaaaattattccaagccttcttgaggatcactgttacctctgctgttggtgttggtggtcttgctttgggagttggcatggcatcgggttatatatctccatggactggaagattttattctttgcttgatcctacttatgcaaaggatcacatcccaattattgcatccgtctcggagcatcaaccaacagcgtggtcatctttcatgtttgattttcacatccttcttttccttttcccagcaggtctctatttttgcttcaaacggctatcagatgcgacgatatttattgtaatgtatggtctcacaagcatgtattttgccggtgtcatggttcggttaattcttgttgctacaccagcggtttgccttattagtgccattgctgtgtctgcaacagtgaagaatttgacacagttgttaaggtcaagtaataaggcttctcagactggttctagcaaaggaactggtagtgttaaaagctcttccaaggttagacctgaatcttttgttttgaattttgatttatgcctaattgtttatgttattagaaagaaccttttgctacagacatgtactaggaatatttaatcatatactagtgcaagcttctacttaacgtcctaaagtccaaaacgtttatgaactgtggtgcattctgttaaacatttcgttgagttggaggtgacacacaataacgaggatttaaaatgatatgcgcttgttcttttggagttatgattatgaatttactatgtatatatatatatatttatattttttccacttcaatttttcttattgtcaatttatttatgctatttttggaaatgtgctcttttcaaaactgtaagaagagttgaaccaaatgctatgtacacttgtactgttgtatgttctgcactcactagtcactgctcagctagtattataagtcttctacacaattaagaaatctaagttatatgaattgaatattgtccattatcaatgtcaagacaatcagtgatcagtttcattagaagctctttcttgcttggtgaaaataaaatgaaattttggggatataatagttaagagaggtattgacacttgaatcatttgacaattatttggtgaaagttttgtcatagatgatagcgtgaatttcctatctgtaactgtaaatgatcatggtctgttatcgtggagtggcttggtaaaactttggtttgttagtgtttcaaaagaaagagggtctcagtaggggttaatcaaggggaaaacacttgtaacttaagtgctcacaagaattaaaaagaattggtgttatcttgcccttgtgcactgttttgtttagctttagctttagttgtagtgtttgcacttcttatcttttatttggttatttcttttcttctttttcctgttgaatataattttaaaaacagagtaaccccaagaggtggcctagtggtaaggaggagtgttggaaagagctaggtaggcatttgtttcaaggttcgaagccccacagtcacaaaaaaccttggggccacttggaggtctccccttcgaacatccagggccaaaagcttaaaaaataaaataaagtaaaattgaaaacagagttgttaaagcaaaacactaatctaatatatgctttactttgtagatagtaatcttcaaataaggatatatttttatcttcatttttaaaatggaaattttatattgtttggttcttctttttgatcatttaatgtttatgaaacatctattttcttatcttgctttggtgttttaactatagttagttctagaatattgatatacagtcagtagcgttgctcacattttgtcgtacaaacaggtttccattgatcagtctcagcctttccaaagaaatggtgctatagccctacttttcggtgcattttacttgctcagtacgtatgccacccactgtacctgggtgacatcagaagcatactcatctccttcgattgtcttggctgcaaggggtgcccatggcaacagagtcatttttgatgattatcgtgaggcatacttttggcttcgtcaaaatactcctcaggatgctaaggtgatgtcatggtgggattatgggtatcagatcactgcaatgggaaacagaactgttatagttgacaacaacacctggaataatacacacattgctactgttggacgtgcaatgtcatcttatgaagatgaggcttatgacataatgagatcacttgatgttgattatgttttagttgtatttggtggtgtgactggttattcttctgatgacattaacaagtaaggccatacaaaattacatattccattaattttaacaaaatgatcaatattggactaacttttagaggcatgtagtttgctactaattttgatttgaatatgcttgttttccaactttaacaaaaaagtgtaaacaatatatgggctgtcagatatctttgtgtaacgtgcttagcgtcgatttttttattatataattgaactgggtcattcagtaactccctctctgggtctcctcctccgctttagtgctatgggagatcccctgtagtcccttttcttttgatgatatatatttagatcttgacaatatattacttttactcgtgaaacttaaatgaactgagattattattattaatttttagttgtttttgttgttttacacttttacaagttaacattagacatataatgatggaattacttcatactaggtttttgtggatggtgagaatcggtggtggagtgtttcctgtaattaaagagcccgactaccttgttaatggagagtatcgtgttgacaagggtgcagctccgaagatgttgaactgtctcatgtaagtctccttaaactttggtatctcattaatccattcatgtcattgcatggtacactttttatgaaaaaaatctactcatgaatatgtgttctcttgtatcgaacttgttcttgttgtactaatttcttcctccatatgttggaacatctccctacgtgccttttaaaagaacaatttataatgtacagccattattaaacctagaaaactaaattatgaattatggaaattgaaattcgcgagtctgtttttgttaactccagtggatttctgggtcttcctttgcttgttttatttcaagaactgaattcatgtttcttataaaccaaatttccaacagtccttttctgttgaacctgcaaaccaaagtccaaaccagtatatccttagatctcccacaccggccactgcaacctcacaagacaagtttcattaaaatctattaaagcacatcatacctttttggcgctcaaataaagttcaagaagtggaaagggaaagaaaaagagggaaaaaaatagaagtctattttgcatcctccccatctaacataagttcatttatttatttttactatgttgaataccttttttcacccaaaatgggaaaaaaagaaagaaggggaaatgtttactacacactttaaaaacattcataattgtggcctacttatcagtgtcattatcaaatttgttggttgatattattgtcatagactaaaaaatcttgttactttttcctatgggatattctattcatgaacataagcggattcttgaaatttttatggtgtccttttcaattggtcacattgcaaggtttttacaccctcacattcaaatacacaaagataaaaattctgtttatggttttaggtacaaatacacaatgataatctgttcttttcctctttgtgtgtggttattaggtacaaattatcatactaccggtttggagagctgacgacagaatatggaaaaccccctgggtaagctcattatcttgaatttattttgtaaaaatgtggtagtaatcatatatgatgtatgctctcatttcacacattgtgtttcatctaaagtgtgtgataacagtgttaaagcatatttcttttacatgggacatgaactcaaggacatttatgccgtctcagttttaaggatacccaaacttgttgcattacttttcaccttttcttttctataaaagcaaaaagtaatgctaaagattctcaaactaaactctttaagaactctaccttccagttcccattgtctctatttctcagttagcctgatcccatgttttaatatctgcggaatatccatattaactcactactgtttgtttccttcatgtttttgggtgctaacaggtatgatcgtgcaagaggggttgaaattggaaataaggatattaaactagaacacttggaagaggcattcacaacatctaattggattgttcgtatttataaagtcaaacctcctaacaacaggtggtgagtatttcttctcttcgtgtcgtgcttatgcccgtgtgttagagaaaggaggtggtagataaaaccgctctcaagaggttagagtcttgaaacatagttgtagtgatagttaaacatagtttctcagattttagtagccaaggctcttcaagtgttccaaaatcccatttttggatatcttctttttcacatttaagtaaacggtgttgcttgattgtgtaccgttgagaaacagttcagattccgaatgtaactcattggttttgtgcaacttcgagttttacactaattataaattcagtgctcttcttttgaatcagtcttaatgaaaatggagtgggaatgttctctttgatgtgtgcaagttaatatttcacacaaaaataaaagatgaaatattgcagctgttcttagctgtgaatatactctctgaatctccagtccacgtatgaatgtgtacataacaacactactttgtatttgaaaaatttggactctttttcattatggggatattatcatttaggatctttctttttcctttttcaatgagaaaatcttaccatttttgaagtatgaaagcacctttttctcaaacatgattatctcaagagaaatctgtgtacaatttttaaattttcagttgatttggccattggtaatataaacaactcttagggaatgtttgggaggaatgagggagagtaggatggatggagagtaacatggagggagagttaagaaggatggagaggatagtaattctcttttgtgttgtatttgaaaggatggagaggaaattagttattaaaattaccataatattttttttaatataaatatttattatttttttaagaataatttgatacttggtatatctattttgtcttcttaaattctttcaaaatgtgggaggatcagatttttgagatttggaggattgttgagaatcatgaggaaatccatgttcttatatatggatcggataggatcacttgcctgcaagggatatgactttaataccatgttgagtaatatgaggttctcaattggtaatgagtggagtagccttcttatatatggttcaattctctaccatttattacaatgtccacgaaaggcttcctccaactctcatctccttccttttttttcaaacaatggattccacttatctcttccactctctcccttaagggttctttttaatattttggggactaaatcggtatttttatagtaagtgaagtagtaagaaagaatcacacaaatagttatatcaagttaattatcaataatttcaaagctagtttcttcatgtgtgtgagcaactgttgaggagggcaagaatattattacatttgagagactaaattcacaaaaagaataacctcaaacaaataatatcaaatatcatcaatactgtatttgcaattgccataagaaagactccctagagggagaaagtatatccttctctctcatctcatatcctgtatatcaagccaaagaggaataattctcatctaacaaacacaaccaagaaaagtaagtaacctccacttcaagccaaccaaccaaccaaatactataaatatatattattctatattgtacaagaacaagagtaattcccataaaatttgatcatacaattacaaaggaataaaagaggtgaagaggaaggccaaatggaaacaacaacagcagccaccatagctgatacgtacgtggatttcgagccttattgcgcttggcaaagagatgaacaaagctacagcattgccatccatctccacggttcttttttcttatcctaatactttctattcactttcatcatatgcaataaacatatataacaacatatttgtcattctaaaataagatattgtagagtttttttttaatataatattaatgttgcacaaagcaaattattaagaaaacaaacgtaaaacatagaaagacacattttcaatagttgttgtagttggaaattaagcatctctatcatacaaacatttcaaggataaaacttaacctatttgttcaataacacaacatggaaaacaatcctacttagtaataataataataagaatttacaataattgtaatatttgtttacaattttttttagaggtattcattaatttttttagtttttttatagtgtaatggtattacaatttactaatattttttgagtattgagttcaaacctatgctctcttctttttttccattcctccctcactattgaactcatctcagtaacttttgtagcagtattcgttatggttacattataatctctgtaaattttttaataattctcaatagtttacagtaccgaaaataaagtttatattattccaatttacaacacgtgttcaaaaatttttaaacctattttcggcaatgtaaattattcaaagtttttcaaaattttacaaggaagatgttataactataacaaacaccgttataatttttttttctaaaaaatagtccaacatgtattttcaagtatggagattaaattataataagaggttgagggtatcactccatcttatattatatatatatgtattgattttggtgtcctaatacatacaatatgcataaggtaggtttccaaaaagagcaattgagggttcaaataaacaatgaaagaatagtaaccataagtgggcaacgacttgtggacgaaggtaccaaaacatggagccgattcaccaaacaactaaaactccctgaagattgcactgactacggcattcgagctagattctctgctggggttctcaccattactatgcctaagaaattatcattcccctcacctcatcaagatcatgattctcccatcatcactacaccacaaccgcatgatcaaaatcttcaccaacgacgtcgttctgacgatgataatattgatgagcatcaacaacaaaagagttgtagaactacacaaccagcaaaattatcatcatcatcatcctcacaaaataataataatagtaataagaataagaattcatctgtgtttcgatttgctgctacagttgctgcagttgtgcttgttcttgccgtttctggagccaattatgtttataaacacccatcatcatcatcaactcctacaaattagctagagtagatgatgatgttttgggacaaattttattttatttattcataattatgtttcaaaattactacacccaatctctaatactattactatctaaatatgtaagcttggaaaattatattatgtgtattgtatacattataatatgctcattatatttatgtcatacattatatttccaagtatttatattagcaaccataatatatgtcacatacttttttaaagtactctaccacaccaatcatacagaccctgctgctatttttaatcggacagtagttttgttaataaagtaaattaattaacattaagtaaattttgcagactacttaaagtagtgtcacattagttttaaggattgtaaaactttgattaatttttgtctcgctaatgtctatttgcattttgtaaaacaatccgcaaatcgtgttgttggctagtgtttcataagattattgtaactttgtaggaaatttctgctatattggcggattctttttgatgaatatgaaagcacctttattcaataataataaaaaaaatggtgtcacatcaatttgaaatatggtaatattgcattgtatatatacatatattttgatggtagtaatagaaatgaaaagctgagaaaaaataattctgtattgattgtgaattgtatttgaacaaaggcattacattgaatacttatagtgtagtaattcggttaagactaactacaacaataataactaacttccctaatatgtggaactaacataacatatcctaaccacttattctaataggccccctcaagatggatggtagagattgttgagattcatcttggataaaatgttgtgaaagtgagctggaaggggtggcctggtaagtatgtctgcaatgttaaatttggaagtgacatggttcaatttgatgatgcttttgttgactttttctcgtataaggtgacagtcgatctccacatgtttggtgcgctcgtggtagacaagattttcataaatgtggatggctgcattgttgtcacgaaaaaggatggatggaagtttatgttgaatgccaaaatcatgcatgatggagtgtaaccaagtaatttcacaagctgcattagccattgctcggtattctgcttcggcagaggagcgagagacagtttgttgtttttttagatttccaagagataagagattgtccaagaaagatacaatatcttgatatagatcttctagtatccaaacatgctgcccaatcagcatcagcaaaagcctgaagctgtattgggttaggagaggaattatagaagaaaagaccttgaccaggagtgccttttagatattggagaattcgatttgcagcgtgaagatgtggttctcttggttgttgaagatattggctaagtttattgactgaaaaagcaatgtcaggtcgcgtaatagtgaggtatattaacttgccaattaaactcctatattgagtaggattatccaagagttttcctgtttcattattgagtttggtgtttggttccatcggagtggtgactggttttgtgccaaggcagccagtttcttgtagtagttgaagagtgaaaggcctttgagtgacagagattcctttgttgtttcttgcaatttcaaggccaaggaagaagtgtaaacttccaagatctttgagtttgaaatgggagtcaagagttgatatgaagtgttgtaattcttcaaggctatttgttgcaacaacgatgtcatcaacatatatcaataaagcaagaaaaatgccaattttatatctaatgaacaaagagtgatcatttttagattgagtgaaattttgttgtagtaaagtggagctaagtttagcataccattgtcttgatgcttgctttagaccataaagacttttctttagtttacacactgcatttggagggattggagatttgggtgtgtaaccttgaggaagggtcatatagacatcttcatggaggtctccatggagaaaggcgttgttgatgtccatgtggtggagatgccaattgttaatggcggcaagagcaaataagattttaagagtattgaatttggccaccggggcatatgtttcaaaatagtcaactccttgttgttgagtgtagcctttggctaccaatcgtgctttgcaacgttcaacagaaccatctgggttgtacttgattttgtacacccatttgttgcttataacatgttgtcctggaggtagtgggataacaatccaagtgttattggcttcaagtgcatctattttagtgtccatagctttgttccaaaccttgtctttgcaagcttgtgcataagaacgaggttcaattaagtgagcagcatggatggctgctcgaaaagttggagaaagtctatggtaggaaatataattggcaataggatatgatgtgctggttgtttattgttgaatatggcatatgtaatcttgcaaaaaaccaggtttctttaatgttctaccggatttggtagttgttatagatgggctgttggatgttgcagcaggttcagatgttgttgcatcagatgtgttcgttgcttcagtaatttttggaacaggagaaagctattctgtgttggatggaagtgatgcagatgaaactgcagtatcattggaggcatctgattgggaatgccgatttgaggttgagaaaaaattgtcaatttgagttgtatttttctgtgatgtattgactaatggataaattgactcataaaagattacatccctggaatgaaagatgtaatgggtttgaagatcaagaagggtataagccttcatgttgtcggggtatcctaagaaaatacatgctcgagctcttgaagagaatttggtgggatgtgtaacatgagaggcataagctagacaaccaaagtttcttaaatgagtataagtgggagccttgtggttgagaagctcgaatgaggttttgtcatttaagaggacaaaaggtgtgcgattgattaggtaggaagctgttttgatcatgtaactccagtaaataagaggtaattgcgattgaaatgctaaggctcgagcaactgttaaaatatggtgatgtttgcgttctacaacaacattttgttgaggacgaccaacacaagagtgatggtttagtacccctttgcttgcataaaattgtgtaagggtgagttcttttgcattgtcagttctaacagatttgatgtccgttttgtttgacatatgtgaagaaattttgaatgataattggggcatctgattttgcttgtagtagatatgtccatgtatatctagaatgatcatcaacgatggccaagaaatatttgtatccttcaattgaaggtaaggggtaaggtccccaaatgtcaaggtgaattagatcaaagattgcttttgcaaaattattgtttgaaatgaatggtaattttttttgcttggatagatgacaagtaggacaatgatatggagaagtaagattcttattaaaatgtaattgtttattgagtttattagttttgagtacagatgggtgaccaaggcgtgtatgccattggttttgagatagtacattacaagtaagaaaatgacagtttggaattttaaaaaaatcttgctgaaggtaataaagttgtccttgtttcctagctgtcccaatcttcaatgtcattgaagggtcctgtatattacagacagtagaagtgaaaataagtttattaagtgtgttatgcaatagagcactaacagaaagaagattgaacttaaatgatgggacaaagaggacattgtgtaatgtgatatgagaattgataatcacactgccaatgtttttgatttggacagaggtggcatctggtaatgtaacatgtttattgtgtaatgtgttagtaaaatttgaaaaacattgcacatgacagcaaacatggtgagtggcaccactgtgtaatatccaagaattgggtgaaagaggattgattttaccagtcaagttgttgattgcaggattttctgattttaccagtcaagttgttgattgcaggattttttgatgtagatgcatcagcagagggctgtaattgttgactgagcatggaaatgagttgttgacactaagcttgtgtcaattgagaatcggtggaaggaagagaaatctaatttgtttggggtcgagatgttgaacccgaatctggctttctggtgtgatttgatgaatcaggggcccttggcttgccatatccgggagggaatccatgtaaaaaataacatttgtccttgtaatggccgggcttttggcaatgagtacagtgtggtcgagggcgcttgttctttgatgtttgattggctgctggttcagtaagagcaggtgtagtggctgcagcagcatcaattggggaaatatgacgatttcccaatgttctttgcctttcttggtgaattaccatggaaaataccttgtttagagagggacagggatcaatgaggagaatttgatccctaatagcatggtaagaatcattgagtccctttaggaactgtaagacttgatcatgattgatctggtcttgattttgtgcagcagcagcacaagtacagggtatccgtggccttagttggtggatttcatcccacatagcagtaagtttagtgaaataagcactaaccgaatcatcaccttgatgaagatatgtaagtaattcatttagttcaaagatttgaggaccattaccttggttgaatcgattgttgaggacagtccacatttcagcagcagtgtccaaatacatgatgctgcttttaattttaggagaaacggagtgaagaattcaagacatcaccatttgattgcagcgaatccaggagctaaacaaggaatctgttggatgaggttgagggagagaaccatcaagaaaaggagtcttgtttcttgctccaatggagagcttaaaatcgcgtgtccaaggctggaaattacgatctgtgagaactggagtagccagaactaaccccggatgatctgcgttgctgagatagtatggtgaacggacatcttcatatgcaggtcgatcatgagaaatggatcgagaatgttggagagaatcgatcggaggtgatcgatgatggggaagagaatcgatcggattggatcgatgatcttgatttgagtagatcagatgtgatcgagaagtgggaactggatcatcagttcgattggagtgttcttcagagggcagaggtggtggaggagctggatcagcatcaaccactggaggaggaacagtagtggtagcagtggctcgagttcttgccattgatgaagttgttgaagctggaatgaagttcttgatgcttcagagtatttcttctgataccataatagaaatgaaaagcagagaaaaaataattctgtattgattctgaattgtatttgaacaaaggcattacattgaatacttatagtgtagtaagttggttaagactaactacaacaataaaaactaacttccctaatatgcgaaactaacataacatatcctaaccacttattctaataggtagtatattattttcaatacacttgcatttctaactaattaattattgtaaatatgtatgttataattaacacaaaaaattgacagcaataaacaacgaaagtcaaacctgaattgcatgattagctttatttcgtaaaaatttgacaaatatcatgaaactgattaatcaaaattagttaagaatttacatataagattcactttacaaattgcggggatagctcagttgggagagcgtcagactgaagatctgaaggtcacgtgttcgatccacgttcaccgcaatctcttttcgttctttttttacgtttactttttttttttttaaaaaaaattcaaatatccagtcgagaattgtgattgtttaactcgatggtgagttattatcatgaagagaagaaagctttggaaagagaaaaatggcgtggattgggggcaattaatggattaaaaacgagagccaatctgcgttggacagtagctttgttaaagttaattaacttaagtaacttaattttaggagaattattgtacatgttattttttttttcatttttatggttaaagttgttactttagttggttgctggattattagatgaatttgagttacaatttaagttattgagtgttgccatgtgaatttttgtaaaactgaaaaagaaatttgctttgaaatataaaaacgaaaaaacattttaattttaaaaattgtaaaactttgattaattattatctagctaatgtctgtttgcattttgtaaaacaatccacaagctcacttcttaactagagtttttttttggctaaagttgttacaatattttatgtaaactaatataattaagtattgtttactcacttttacaataatttatataaaataagattttatataaattattgtaaaagtgagtaaactaattattcggtttgcagaaaattatattaaaaaaatatttataattaaaagagattaattataattagtctaaaaagatatttataatattttaatttgaattagtttggaatatttattttgatttaatcattaattaaaatatagactattaaaaaagattaatttagagtaattaaaagagattcaccaaaattttacgaatgtatataattaggagattttaattttacttttattaatagcatatacttttttagttgagatagaaataatttgtttggtatgaagttaagtacgtacaatcattcttatgaaaaaaaaaaagtaaaaaaattaacccacaatcatcataatttctttttttcttttaattattaaaaaaatagtagaatataatatgtgttttgcatgcattctagtgtagtttttttaattagactcgtcctagtatcataacagaacaatatttttttttt

SEQ ID NO: 224864 - DNA, 2553 bp, Cannabis indica
atccaatggctgctcccaaggtactttcactttcgttcttttttttaaggcctgtcttcagtaaagtggcacaacaacacagtggttcagattcagtaaagggtcacacctagaaaatgctcaattattgaactactcagctaaaatacaattcctgctttttcctattgttttgataatgtttgtttgaatgagagtttcattgggtgatagctatatattgctattgtttttcactcggacaactatttagtttgactgaaaaacgacgatcaatcatttgatatattaacagtgtttcatctttgatttaccttattttttacctgatgttcacctagggttgcaagatccaaataagtgggagagcttttaaatggagacaatagaacttaatgaatttacttggctctttctatttgcttcctttgggtcttctcggtttgccattttctgtattgtcctcatgttggtgatgttgttttcaactgtactaatgttgcatataaatttagacttgttagtaatttttcaggatgtttaccttgcacaacttgatggtcatttaattttgtataactttgttaacttttcttctattttgttactgttagttacactaccaaatgaaaaaggggatacttttgataacttttttcctttacaacctcatttgtcttgttttgtctccgtatgagtaattacttttctttcttacaggttcggtttctcaccaagatatatcatccaaacattgacaaggtagcaaattatacctttttctatttgttacttttttcctcttatcaagcctttgtaatgtttttattcctttcctcgatgatgcagctcggcagaatttgtctcgatatcttgaaagacaaatggagtcctgctcttcagatacgaactgtacttctgaggtaccgatatgccacattcttccttccgccattttattaattaaatttctgagaagcctttgcagaacgaaacagacatcaatttattgctgacatcaattttatatatattgctagcattcaagcacttctcagtgccccaaaccccgacgaccctctttccgagaacattgccaagcattggaaaagtaacgaagttgaggccgtcgaaacaggtagatagtttcttcaccctattacacgatcacaacagaacttaacttactgcttttgtaaattctaattttttctcgtgttgcatcgaaccttttttgtagctaaggaatggacccgtttgtatgcgagtggtgcataaaggcaaaggctggaaaactttttccatgcctggaaaataacattttattggaatgtgtatgttaatttgaaagaaaaattgggagaattaatgatgcttttgaaaatgggagcttaaaaaaatgttgggtctaaatcttcccagtcattattggatgtcaattgttttcctctctgggaaatcttttgcctctgtaacctgtataattatcaaattttactttcttctctgaaaaaaaaaatgaattgccttttattattttgagcttctattttagttagtttacatgttttttttcttctctttcttctagtcatgagtgttttgtatattcttttttaaaaaattaatttccaagtattatttgtttttatttattttgctttaatatgctagttcattactatcttatcataatgaaaaaaaatgtgtaccattaaatgattacatttttgtagatagattgttgttatctattcatttggtttgtaagtacttttttttttttgaaatatttgatttgttatacattgaagatgtgggaaactttgaattgagagcaagtgtaagagaaaatattaattaaaaattttatgtataggactatatagtataaaaaaattagtagtttttcgttcttaaatttatatctatagacgtcagctattcgtggacacaggtgtggtttgtgttttattattgcgattgatttttcgctattgcaattagtcttgtctttgtgacatgattttgagtgttttcgtcttgtatttgtgacgtggttttgagtgttcaattattgtttgtttgatatggttttgtttcgttgttggttatttgtttctcttgccatcaaatagctattagtggttgaaaataataaacctttgcgattgaaggagttattagtagtgcagttatgtaccttgcataatagctgaagctatgaggttaatataatttgctgcaatagtttttactgtagtgtcttctaagcggtagatgaaacatatataggtgtttttaaggttaattgtgatgttacaatattttttatctgattatattttttagcttttttgtcaaacgttttggaaattaggcggttgcttatttgacttgttttataattataatcttagttgtgtctccaacaaagaagatgttctgatcagattataaactattattttagatagttattaaaattgcatgatttattaaaaaaatatataggtatttatatatatattagaagagagttacgtggcgagc

SEQ ID NO: 224865 - DNA, 3105 bp, Cannabis indica
cgctaaaaagtaactggatctgtttcagataaagcacattccatgcgctgaatcccagcatctccacttaggtgttgcactttttccttcaaaagattttgatcttctgtaacctgcatcaagagaatatccaagataagcaataagtaataagagaactaataaaatgactcgcgcatacttcccttgcatgcaaaactccagtaataagccaatgccagaaaacccatattattaactactttgcatacctctcttttgagcaattcaaaataatttaatattaagaattcctctcagtaatcacgacattgactttcattatctatgaaaacaaaaaagtgatctcaaacaaaactaaatcacttgagctattttacatggttcgaatgagttgcaaaccatatattatcattttctgtatgcagttatacaatatatgtagttcaaatgaagtgtgaaagtaataaacagagtgagattatttttgactaacttctcccatctggtgatcacaggaagtggcatgctgaaaaaagaaaagaaacaaaaaaatagcacgacaaactacagtaacttatctccttccaacccctctggacattattgtctctcatgcatacttcttcccctgcttatgaataaagtaaaaaataaatattgaactgaaacctactttgttttcctcttttagtggcgaacaatgccatgtaaatacatgttaacagtcacactagcatgtgaagattttgttagaagatgtatcaatatagggctggagaatacctgcttctgaatagccttcaagtcatgagtaagattattactatctccttcaggagttatcttgcacttttgcatcatagacagctctagctggcaagctgctctcaccaagtcgtcctccagtaactgtgcatccttgactttccacacaacaaacaatttaagtaagagcaccatgctttatcaaaagctgcaagctgagatctgaaagttgaccgtttttgtgccattgaatcagactcttcgtcagaactgtgtacaggcccttctaatacaatcttcagcaaaagctcaaattccttaacatatttttctgcagccttggccaaggacatttcacgctctccttttccactgaaaactgcttctggatgactcaagatcatgtaagagcaaagggttattctgactggataccttgactgcttcgctggattcctagctgcttccctggatatagtagctttttttttgtctctgctcctcaaagatgaccttggggtactccttttctttggagaagcaactcgtttgagaaggtgatcaatgttctccaaaccgggtgaaggattagaagcaacagctcttgagactcttaatcgactctctaatcgatcaagtaaagctttcacagcacgtagagtatcaggcgattcaatcaaaagagcaagctgctcaaagggcatcgttttgacagatttctcattaatattcagggtatcataagctttcaccaaggtcaaggtagttctctgtcttaggaaccgcctccaacatctgcaaaagcaacaagtagacatttacaccttacttcaaattcctgatcatatacaaccaattacatgtgtgaattctgcaagttccacttatagtaatatccattgttaaataatccagaatagaaagaatagaatttgcaaacaattagttcactggtccaaatagtacaatatataatgaaattttagaccataatatgtaaagatttcccatccaagccacctcagatgcaatttaatgttgtttgtacgcaaaaccttttacaaagtgaccaacatgtacagacatatttagtatagtatggcaaaaatcatggaaccatctattagcaactataagctatatataccttgccaattttctagagaggagatcagcttgcatgtgcatccttttccagtccacttgaatgttatgaagccttcctctctgccttaaatactcggctctttgtctccttgcctgataatcatagaaagagaacttttagaaaatatgcatataacacaagcaacacagtatcaacaaataaaatgcagatatagattgacagtagaacaaattattactctttgtagccgatcttccaactgatccctcattctccgcctctcaatctcacgttgatgagagacagacttagcaacacgatgcacctgcaacactctggcacaggccctcttcttctctgcttccagaagacccaatcgcttcttttcagcagctgcacgcttttggtgaattgcagctcgcacacattccttgtacttgttctcccgagccatcttcctcaataatgactgagatgatctctcctttaacgtagcccttctttgtctgtaagccttaagcataagcattctattggcctctgcctgctgaacacgtgattgtacttttgagtcaagcttttcacgctctttctcataacgcatttctacctcacttttagctgcttgccgcaattcatccaacctagctaagcgcatttgagccttcgccagaatactcgacctgcggataaacaagaggttaaagcaagtcagcctgcatatacatatagcctgacaatacaatagcaagagcggcaagacactaattttttttttctttctaaatcaataatttaaaactgaaaaccaagtaaagagcaataataggccaatcaaaggatttactttgacaagaaactatttactttttccccaaatcatataagttataataaatcacactctgaccacatatgtatgtatatatatgcaaatatatacaaaaagcacacataaatgatagttgcacatatatacacacataccatatgaaaaaaagaatacgttgaggaagtaccttacctaagaaactcatataacacatataatgaaaacaaataaatagatagctgaaggtttacttttggatgagataggataatatcaaaaagtcatccataatcttagcatcatagtagtagaaatatgagagataattgcaaggctaaataaattactgtatataataaaaatcatatattaagaa

SEQ ID NO: 224866 - DNA, 3910 bp, Cannabis indica
gtaaatatgaccttaatattaagacttgtctgtcttcttacctcatgtaggacagaagggtcatcagaaaatctggctgcgagtttgattagcctgtccaaacctcctttctcaatgataacgtttttatttgtgtcacttccagccaactaattagttacaagagattattcaacaacaaaaataaaatgtagtaagagacataagaggtactaattagattcagaaaacaaaataacactggaaatcattaatctaaaatgacactgaaatcagtaatataaataaacaccaagaacaaaattgatttaaatttctataatactgcttgtaaaattattcttatctagtatcatcttaatattataataaaaagttcaattaggggcaagaaaattgctttaaactttcgtatttctattgaaatttaaacaaattcagtccgtttccttattcaagaatattttttgtttattatgcagtcagtaaaacttttactgatacttttgggatcaaactaattataactaaatagaattatttttttttctggaaacaataaataaatagagttattagttaaaaaaaacataatcaaaacactaaaaaagcatcaaagtaaccaaaataacaataagaaatccttagtatctaatatttatacatcatatattacattagaaaaaataaatatcttattgtaataaaattattttcagtaaatataataaggacataatattatacatatattgcacacaaatgtgaaataaaattcttaattctatattttcatatatatatatttaattattcttatagagaaatacaagacttgaaaaattataactaattacagaaattattttgaataaaatattcatagaagttttgctgtagtatcatatatttcacaataagacaaaataaaaatcagaaaccttgtataagattttagatgcaaaacaattaaataaatgattgttacttgatcaaaatcaattatcttaatcagttaaattttagaccttagagagcaaagaacagcaaactctagcgacacttttattgccttgttccccactgtcatcaatgcatcgaagcaaagcatcaattccaccattttcagcaatggatctacatatttcatcctgtgaaattgaaatttgcctcagtatcaaacaaataaatttcctacgagtgataagtgataaaagtgtagcactgagaacgtcagtcaatgcattgataaaccttaagtgtgcctttggttggaggtatgaaaaacaatcaaattttattttattttattggttgggtgcattttaatatatatgaatgtcatttcaatagacttttccaatattttggtagaataactattccatttcaaaattagtaaaaaggccatttgaatgcaatttgaaaataataataataataataattattttttatacatgaacttataaaatttaagtccattccattctattctcattcctatttctattgctatcaaccaaacgcaccattgatgtcttaaagaatgacaattcacttacattaactgcaacagcctttaaagcaatgctagctgacactagactaggtgagctaagctcagtctgcaatgaagccaccagagcttgcaattcctatctttgcaaatttccttgcataaccataaacctggatttcacacaacactagaagttagatttatgaaacaaaaaccttattcagggcatttagtggtttccctggaaaacactgtcactaaaaagagcatgaccaaatgtgatgctaatcctacacatccatcttaaaagggaatacatatgaattgcaggcattggccaactttgcaactgtatgccaatcagagtcagatacatatttctgagaactgccgacttacttgtgaagccaaaacacggttatcatcaggtgttaggagaacacgaatagcatcatacaaactttgaatgctgccttcacccgggcgattcaatgcatgcagaataagttcatcaattttcaactccataaattcatcttttaaaacctcattaccagtcacagctgcagcaactacagcgaaaccactgttcaagatatctaaattttggacaccaccattcaagatattcaccacaattgatggtccgccactagcccgaaatgtttctgtactttgaagatctagaattgagaaggaaatagatgttataaacagcaccaaggagatgagcctaataatgtccaaaaatttcagggtgaattatctaacactagactaagcaaacaaaagcaatcagaattgactaacgagtacctccatagataaccactaaagatattcttgtttcaacatttcacattctaatatgtcccactataaatggttcaatcgctcctccccaatttgaaatccaacagcttttactaaaaaagagcaatattcttagctcatcagattagcaaacagtatgaactccataacaagaaatgccgacataccatgaagaacagaagacattgcctttaaggtcgaaacaagagccttttcctgctcaatttgaatctcagaacacagggaacaaattaattcaaccgctccatttttagtagctattgctgcatttccagatccttgtacactacatagttcagccagattttcaaacaatctcgccactgaatccaaattttgatccttgggaaatgctttcagtttatttaaacactgtatcactggattatcatctacaccaccctctcctggtacgcaagtgacaatccctgccatacaaacacagataaacaaaaaccttctaactaaatatttttgctatagatctgaaacgtaaagaaatggggtaagtgtggatgttgaaaagttgcgggaaagcagagaaaccagaggttcaacatattttcccaggaaaatgaggaaaatacgagagtttttagatgtgagaccggacctgagagatcaacaccctggagggtaagagtttcgatggcatcttgaagggactcagctgggtccatcccaaggtcgtccatgttctccttcacaagctcgtcaaacgcctcctgagagatagtacggaccgcattcgttggtggagacatctccggttgggcttctcttgccgtccaaatggaggattaagattcacgatgatcacaaaataaatgtaataatctcaatggaagagaggggagaagtgaaagctcttaataatacacagagagcagagacggaaacagcgttctatttgatttcaaatcgagggtgacggttgcattgaattagatggcccaaacaaaaataataacagcccaattctctcggcctatatatttaatggaatttcttacattttaattgcaaatttaccttatccaaaaaaaattaagatatgcacaaatctatatgtcaatttttagagatattgacgactaaactacctgaattttacattttgtaatacttaacttcaaaaaccgaatttttggcggctaaactacctaaaccatggttccattttgctctgcacacctccgtctaaaaattacagttaactgccacggtggactgtccacgtgtacacacttgtacacctggcaaatttttagtggtccacgtaatattagttttaaaaaataattacaaatatttaaaaaaattaaaaatcagaattttttttctatttacttttttaatttaaaaaaaaataaaaattaatcttttttttacttttttttactttttcttcttcttcttcttctttcttctttcttctttcttcttctttttctggtagaaaccctcccaccctcgaattcgaatcaattcgctaaagaatcgagctccaatttcaagcgatcgcattgggac

SEQ ID NO: 224867 - DNA, 5251 bp, Cannabis indica
gtaatgggttttatttagggcataaaatcccaacaattatatctcaagaaaaatttgtatactatgagaatggatgacactaaagaacagagaaaacaattagaagattttaatagaataatcttgaatcttaacaacattggtgtcaagttggatgaagaagatcaagccattattcttctcagttttttgctaaaggtctatgagcattttgtagacactattttatgtggtgaagatatatagatcgtggctgaggtcaaggctactctgaactccaaagaaagttagaagagataagagaatagaggtgattccaatggtgaagatctatttctcaaaggcagatcagataaaagggatcacaagaaattcaagcataaatccaataaccagagatccaattcgaaatcaatattcaaggcatggaagaatagatattattgtaaaacggggggacattacagagatgaatgcaatctattaaaaacaaaactcaacagtgacaaggccgaagaaagaggggaagcgagctttgttaaaagaggggatattttctggttgtttcaagtcaagaatctggccaagaatggattattgactcatggagctcatttcataagacaccacataaacacctgttcagtagcttcaaaggaataacatgtgggaatatacttttaggaaacaacaaaacctggaaaattgaaggcattggacctgtgatgttcattatgcgtgatggatgcaccagaactgttcaggatgttagatttgttcctcaattgaaaagaaacttgttgtcaattagtgaacttacaagaaaggggtgtgccatcaagatagaagaatccataaaagtttccaagggatcttagattgttatgcagggtaacataaggaatggcgtttatattttggatggaaagtcaatcattagcaaagtaaatgcaacaataaaagacaaaggcattgaactgttctaggtattacatctcatgttgagtcatgtgagtgaaagaggctttcaagaacttgacaagcagggtctctttggtgataaaccaaagggaaaattggaattctgtgaagaatgtgtatttaagttgtgggattccaaaatggtgtgcattctataaatttctagaatatattcattcagacttgtgggtccttctagggtaccatccataggaggagcatactttttctaagaattatagatgactactcaagaaaagtgtagattttcatactgaagagagctgaccaagcatttggtacctttgtgaattggagaagagcgattgagaatcaaacaagatagaaaaaaaaagtgctcataacagattatggtcttgaatattgctctaatgaatttaagcattattgcttgaaagtgggaattgaaagacacaaaaatatgatcaaaacaccttaacaaaatggtcttacaaagaggatgaatgtaaccattttggagaaggctaggtgcatgctcaagggtgatggcctttgtagagaattatcggtaaaagctgcaacaatagcatgctatctcataaacagatgtccatgttttgcactcaatttcaaaactccctaggaattatggacaggatgtccaccaaagtttgaacactatagatttttttgttgtcttacctatgctcatattaggcaagacaagctccaaccaagagctctgaagtgtatatttctcggataccctgaaggtgtaaaaggacaaactttatggtgcctagaggatggtgacaagaaaagaatgatcaacatagatgtggtattcaaagaagacgaaatggctatgaaattaaaagacacaatgaccaaagatgacaattctgatacactataacttaaggtggatgaatccactagaaatataagttatgagtgtgaacacactattgaaccatatagatcagagacaagctcacatgataacctcataaattattaacaacaagcagctatgaagaagccatgaaatgcaaggatagagctaagtggctcaaggtcatcaatgaaaagatgaattctctattgaagaacaaaacctggatagttgttcttaggcctcatggacagaaactaatagggtgcaagtagttttttaagcacaatgaagagtttgttgaaggtgaaaagatcatatacaaagaaaagttagtagcaaatagatttaccgaaaaaaaaggaaattgattacaatgacatcttttctcacgtgctattagacaaacttccataagaattctgatggccaaagatgctagatttgatattggggctcaaatgaatgtgaagaaaatatttctaaatggaatcctcaatgaagagatatacatgacaccactagaaggctatgccataggcagtccagaaaaggcatgtcttcttaagaaatcactataaggccacaaacaagcccttagataatggaacatttagtttgacacatttattgttgagactattacagctaacatgtctatcttttactctatattgatgatatcttgattattggaatataaagataagagatagacagtgttaagaaaaggctaagtgttgaatttaaaatgatagatatgggaaaagctaagaggatattgggaatagatattataagacagagaccagaaagaatatttctgtcccaaaaaccctatttctaaaaggtcatagacaagttttgtatggacaatgctaagattgttttcacacctctttcaaaccactttaagttgtctcaaactcaggcacctcaaatcaatgcagatatagaatacatgagacaagttccctatgtctcatgtgttggaagtctcatgtatgatttacatcagaccatatttaggctactgtatgatcatggtaagcaggttaatttgttgcgaatcatggtactgctcactggatagctcttaatagatattaatatgtatacatgaaagggacattgaagattgttatcaagtttagtaaagatatgctatcaaccatttaatttacaaacaatatagactcttattatgcagggaatttagacacaaggagatctctaacaagctacgctttcacagtatatggtggttatgtgaattgaaaatctaactggaaaaaggtggtagcactatcatctacagaagctgaatataaggttggacctgaagccatcaaagaagggatttggatggaagggttcactaaagagctaggactaaactcagatgaaatagtggtacattgtgacaatcaaagtgccatccatttaatgaagaaccccatgataagaattttcttttcactacaagaaatgttacttttaccagtacagttcgctgctgcactggttaaagtaccttttactatcgcatttcgcaaactgcgctggtaaagaggtaccagcgtacatttgcagtggctaaaatctaacttttaccagcgtatttacgtgctggaaaaaatcatttttgtcagcgcttttcattttatgctggcaaaagttctaataccaatattgatttgccaacccctttttaccaacacatcacaagaaaattctattttaccagtgtaataccaacttttgcttctttagtgatatatctcgtatatatatttttattataatctgtttcttctaactaagagatttattttagaattgtactatttgtaactatatatatatttggattatatcacttttatatatttatataggtatgaaagaaaaaaatagtatttatttctatatagcacaatcaattagcttaattggatgctagaatttggttagtcctgccagttggtcgtttattatggtcagtagtcaatcagtttggagtctccaaattattatatacatgatatattataatattaataagtagaactttgaaataataataataataataataataataataataataagtagaaaaagaatataattaaggaccacatgatttgcatcccaattttcatacaatttttatttgtttattatttgatgctaattaaagagaaaaatgttgaaaagtctcttgattgatcattataatgtagccttcatatacctaattttttttattaggatttggttaatcttacctgccaatctatagaaaaagaagacataaggggcaatataatttattagttaattaactacacatacaatgtcgacctaatgttacacctatatctacatatataatattatttaagagatattccatttctttataggccgttaattgattaattgttattattttgtttttgaaaaagaaaacattattaatatgcttgatcatctataattatataattgcatgcttaataatgtggggagctaatgactagttaataaaagattattactattagatattagtagtgtcacccaacacttttttgtaggtgtgtctttattattgttatcttgttgttctttgaataagatctaaaaaaaagctgccttgaataagcgtggatcttcggaaaaagactttcttaagtcatgagcacatattaagaactgaaaaaattttagcttcttaattagtatatttcagaaatcatttacaagtatttgtttttttttaattgatgtataaattaattaatgtatataaatgaaaaatattaactaattaaacacccacgacactttttctttttaaaatttgagcttagtgacagttagtgagttatgttaaaaacatacataattaaataataatgtgtatatatagtttaattatatcaatcatatatgaagccacatcattaattgtaagttatgttttctaaaatgatttgtcgatcgacatacgtagcattattccatagaatattattcatatatatataacataataaaatatttgtatgtatatatatataattatatttgtacagacacatgtggcccatgtgtagccgcatgtttatgggatccaacgattgatatttaattagggtttttattctattattttaattatttaaaagcaatgttttattttattattttgaattagctagaacaacctaacattccacacatgggtgtatcttaaattggtaatctctaaatctttgtgtaggtgtctttgtctcttaataattttataattaatgtgtttactaaacatatataatctctataattttttgtgcttttctttcaacaattaaaagttcacag

SEQ ID NO: 224868 - DNA, 6229 bp, Cannabis indica
atcatcttgctttcccggtaaggactatttagttgtgtgttttatattataagaacaggcagggaatgaaatagtgaggaccagcagatcaattttatgtttcttttgtttttggctaacctaggattatcatttctatgtttgcaaaggttgacacaaatgtaggaagaatagcagtacgattgggttgggtaccccttcaaccacttccagagtcacttcaattacaccttctagaactgtaagtgcatgtttggtttgcataatgggtattgtagtggaatcaaattactcattaaaacgtttagtttgcttttaaaagtgatgtaatgagattacattacactgaaaatgttatctaatgagaattacgcattaaaaaggattaaagaaagtaaaactaagataattctaatagtctctctctctttatttaaatataaaaattaaagtgggaacaatttcgtcaatctatcacttactccaatattaatctcaacaacaaaccaaacaacgtaatcaattctcattagtatcattcttattccattacattactattaccattaatattactattatattccaccaaaccaaacaccacctcagtatcactatcatgtatgcttcaaataaattaaaaagaaagtaaaatatattagaaaaagaatttctgaccagaatttactgtaggtacccggtgctggagacagttcaaaagtatctttggccaagattatgcaaacttgatcaacgaactctgtattttcataattccatcaacaactcaagtttttccttaaagaatgcattttgctattgaataaaatcttgtattttccatagaagttgttgttcttaactaatattaaactacctgattacagatatgaactacactaccagatgattacatttggaaaggttaattatcaatcattactacataagttgaacattttgaattatttcaaggaaaaggtctcatccttcgatgaatatacatatgcaggtcttctgtacaaagagtacaccaaactgcaatgcatgtcccatgagaggagaatgcagacacttcgcaagtgcttttgcaaggtatacatcctaataaaactgcaatgatctattttagtttgactaaccacgggtaccacacaaattaatgaagaagcaagtaacatattaaactagttgtttggaacaagaggtcttatgtttaggcttattagacacatacaacaacagccaggttatctacatgttacttgcatgtttaaattactggaagttcactagctacataaaatagtaagaaaataggtggaggttatactttctatggtaaattttaaatttcattatcacagaaattccatagaaattatgaggatcaacctaacaaatcatgggctcaaagatctacatgatacaatgatgaaatgtcattgccatgcaacaactgtggcccaaaaaaaaaaaaaattgaaactaggatccccacccctaaccctacaatatttggggaccaggaaaccatagcagttgctaggtagaggtacccaggagcgactcaaacaactgtggcccaaaatgatatttgaaacttccaaccaaatgaaatatggaattaaaatgaaagcatctaacaagttgaatttagtttttgttctcaaaattgttaaattttgtgatatgcacaaccaacaattgttaccaataagactaatagaaattatgtttaatgcagtgcaagactggccctaccaggcccagaagagaaaagaattgtgacttccagtgttcctacacaagctaacaatcgtgctgtagttatgaatactgcactactacctccactagagaacaatatacttgcagaagctggctctaaaactgaaaagtgtgaaccaatcatagaagagcctgcaacaccagagcaagaatgcatagaggtgtcacaaagtgacattgaggactccttttatgaggaccctgatgagatccccaccataaaactcaacattgaagagttcacagaaaccttacaaaattacatgaaaaagaacatggagctccaagagggtgacatgtccaaggctttagttgccttgaatccagaagctgcctccatccctatacctaaactgaagaatgtcagtagactccgaacagaacaccaagtgtaagtacattcttacgtagcatacgaagtcagtttttagcacgctaaagcttaaaccagtaataatctctattcctgaattagtattaatagccactgcccaattaatattcttgaaagctgtgttaagaaaactatactagcaacacaatggagttacatttacagagtaattcttaagagatgtggcacattttagcttctcaacaaactgatctgatgcaggtatgaactaccagattcacatcctttattggaacaggttagttaatttctatctatagacttattaactgaattatatcaatgattctactcatatcattaaagctgagcatttacattgaatttaaacagcttgagaaacgagaaccagatgacccaagtccttatcttcttgctatatggacaccaggtatgtaatattgctaataactttagaaaacaaagaaagaaagatttaccctggaccactcaaacgccgcaaaaaagaatattaataagtggatagcctagcttttgcccaaattctacgaagaaaaattggatttcaattaataccgctttttattttgccaatttcaataggtgagacagcaaattccactcaaccatcagcaagaagttgcagttccgaccaaccagacaaattatgtgatgagaagacatgtttttcatgcaatagtattagagaaacaaattcccaaaccgtaagagggacaattttggtaagaaaataccttattgattacatacatacacaatttcagaagcagcacaaataggcttctttcagttgcttactgaagttttatgacttcactccagataccttgtagaacagcaatgagaggaagctttccacttaatggcacatactttcaagttaacgaggtaagtctctccaagtaaaatatgctagctcttacattacatcctgaaaaaagaaattacttgctacacaccattgtaaagataaagatatatcagtacgagttgagtaaatatagagaaacatatttcttaagcctaaaaagaagtcacaagcaaattttgttacgatagatttatgtgtccttacttgatggggaagaaacacctgtgtgacctaccctgcacccattcaacccagctaattgaacaagaatatattttttatttacccctgtgagaccaaagagcatttatctttttgtccaattgtatcaacttgcaggtgtttgcagatcatgattcaagtctcaatccaatcaatgttcctagagcgtggatatggaatttgccaagaaggatggtatactttggaacttccgtatcaacaattttcaaaggtattgtattaaaggtttataaacactagataattttccaaaatgaaaaaataaagtaaatgacaaacaaaacatgtatcaggcctatcaacacaaggaattcagttctgtttctggaaaggtacatattaccactctccctcaactatggtcattatactattttctttagtaacatttaagcatttatcacagttattggagtttgagttggcaacttggcatattaacaaattataagaattcctcgataaaattttgatgaacctcttaacaataagtaataaccttgatataccaccttaaaacacactggtgaaaacattcttgttatcattaagtttctcgtcaagccattgaagctaggatgcagtaaacttgaaggtcagagcggcctctgttatttatttcttaagagcaccaaatgtgctgactgtatgaaagaaaaaaaaattaatgacaacaataagcatctcacccactctggttcacataacatcatctattctaacttctacattacttaactgcatacctaagatcgcttatttagtactttctacccaatgtagtaccaaccaaatacttgttctccatgacatgagcaatcactttactatccctaacaccatgcaaagcattcaagttgcaatggttctttgaaaaaaaaaatgacttttcatcatctgtagattaacacatgttaaattttcacaaatttatttgcaggatttgtttgcgtgaggggatttgacatgacaactagggcacctcgacctttgatagccagattgcatttccccgcaagtaagttgatcaagacaaaattgatgacaaaagatgaaagagactgagtgtcatatggttaccagcaggaggtacaaaataagggtctgttgtgcaaaatagataaagactacttgcagggtaaaatagggtcactaacagattgttgtacatcatcaaccatccttcctctaacctgaaatggatttgccacattttggccagcagggagcacagagcatgttcaacaagctatacccataataagcgggaagtaatttgtagaagactagataaacattgttattctttcaactttgctaagcaaagcacattttcattattcaatgtcactccccaaagggaagaataattgagtagttttgattcatcctaaacaaaatatcacatgatgtacgaaatcattaatgagttcatactacatggctggtatgttagagaagacaatgggtagaaataccatatatgtgcttattatctctcacattgatgaaacaaaaaaaaatgttatttctgtgagacatttaacgaaaataactactaaggaattcgtggaagaaaataattaactcatatgtcaaaaaaaatgcatttttggagttagtaatatttatatatattggatacatatataaataagttattggattaagattagtaacagtcaactaaacttcaatcctaagtgaaaacaaagtctcagacttttaagttttaaatgtaagaaacttgaacaagaaggattgcaaaagctgcactaaatcttactcttacggacaaaaccattgaactccagtaatctggtagccatggatggagcaagttgaagatctaccgtaaatgcaaggcgattaatttcaccataaactcagcttgtttttcctcctagtgaactttataatcttggtttcaagccacaaacttgatgctaaataaaaaaaaaaaaatccacacattgtcacacatatatatggaattgcaaattacaatttatgtttcgagccagaagttatatgctaaaagcaaacaagcacatttacttacatgttgtcaagcacaaaaacaagataaatgcaaatcaaaatcaacatattattagccatacaaattattagattattatgagacgcacaaaacaattcttttcgccataacaaaattcatccaaacataaagaaaattttgcaagaacgtgtattgtactccgctttagtaattgtaactacaaaaaaaaaaataaccagaatcattgttaataccgcgccgatctaaaattctgtacgaacttagcaacaattcatttgtcacaaacaaataggctttggatgagacagagaagtgtacctgtttggaaggcgttggagacaaatgaaacacatattcgcaaagggtgttgaaagatattttatgtagaagaaccgaatgttttggaatgaaacaattttgccgccttatgctcttccctcaatttattgaaaactttaggataccaaacaatctgctagtatttttttttttttttttgagaaaaatactcggggaattttaaacttcgtttgaaaaatatttgcccgcattttatgggttttgttatttcttttactattttatggtatctattatactatatttttgttattattaattttaaataccgtattttattatttttctgtagtactgaacatttcgagcaggttcgacccgaactcgagcaactcgtccgaactcgaaccggtgaacccacaaatttttttaaaaaaaaaatattcgagcgggtttgcagattgagtttttaggagtatcgggtttcaggttgaacccaaacccacccgccaacctgtatatttaatatattatatatatatattattttttttattacattttatatatatattaattaaaa

SEQ ID NO: 224869 - DNA, 3819 bp, Cannabis indica
aaaagcataatacaaatgttatctacaataaattaaaataacttatttattacatataagttttaaaaaaaactaatataattctacataaaattataaacttatttattcactccatatgtatacataaatcaattagtagtggaaaatgagacaatcatcttgaagctatccaagctcactaaatgttaagtcaatacaactatattagtatcaactttgaaagtcaaaagctatatgtaaaagagattacctagtgaacttactaccaaatacaaaatgatcattgttaatcgcaccaaaaagtgattcaatatcagaaggatttgaagacttgaggatttaaatttccaaaatcctggccacttctacattctttgttttcatcctctgtctttcacatcttcattatagcctgataaaacatacacatagcatttaatgctttttcttttgttacactttttaacagcaataaattatcttacaaataacaactctatacaccactcttaaagaaaaaatctaaaatatttaatgtgaatgaccaaagagcaacctaaaatcattaatgaaaaataactatttgttctgaaaaaatcataatgcagaagctcaatgaaaactataatattcaggtttgatactgaacatttgtattgaagacttagcctgctactatagaaagccaatgtgaatatctatctcaatacaaaataattttttctcataaaattgagaaataaaatagcttaaaaatcacagctattcctctatcaagcaaaaaagatagcaaactgaaacaccagactacatattaaattataaaagatcaaattttaagtacattcatttctccataattcaaaacgaaagccaattaccctgtgagatgaaggggccaattggataagcctcttaacaactcgaagcgcaatgcttgcaagctgcaacaaaattagaacctagcaatcatgatgaaaatttgtttagtcactgagcttaaagagcaatacaaaatcacaataattttggtattattgtttttttttttggctgttttgcatgccaaaaattgcaataaattgcatcattatcatgttgtgctgtccccaccaaatggagccaaggataatgaatttgaaaaaccatacatatacccaccaaagaaatttagtctccatctagggtccttagttcgtattctttcaatctttcaacaagtaacccaatccacttctccatatcttgactggaaaagacaacatttatttccatgctagcatctagaattcaatcaaaaatcaaaagcaaggtttgtaattcactatagttaattacattttatcttgcatgagtcaacctaactatagagcaagctagcaaggttggcatacttaaataacagaagtctatttaatctcaacacccaaagtttcattttggtagagccatatcaggattaaattaacttcattgacaccaaaatttacttacatgacaactaaacagttgaataaacttcatagacacccaagtggtcacgcttaattcaatccaatatttactgaactaacatgtggtcatgtgagaaacttgccaagttgatttcaactagttgtcaaccttatacatattcatctactttatgtttgtataaaatttctatgttctacagaataagaaaaaaaacatgtcaggactttttaccttgtatgcaatttgctttgacgagctgagcacagtcctccagtaatccttcgcttatatcatcaatggtttgccctttatgcaatcgaacataaacatgggtagaagacattttatcgacatgaaacctgcaacaaggtaaacaataaaacacccaatcaaaaacccatttgattctattccttcttcagtttgtcaatttcaaacacccaaattctggaactaaggctaagcacataagtcgtttatactttcaagcatgtctaatccaaacataaaataaaacataacttctattatttttcttaattgattaattattttttttttataaaaaacaaaactttatttctttgaattacgaattatgatcaagtaaaaagaataaaggccgtaacataatcgaaacgaaatattaggattataggaactttgataatactactacctaggaactttcataaaactatattaaatttaaaattttaatattttctacatatacataatttaaccccaaagaacactatagaaagaaaaaaatcaaaagaactccaaatcaatcataatttaacaagaaatcttacaaaacaaaagaggaaacaaccatatcattagacaaaattacaaataacataatgaacgaattaccatgaaaccacaaataagaagagtcaaaaaactaaattttattgaaagaatactcacacaagttataaccataccactcaagcaatcactaatgcctcttcatccaagtcaactaagaaatagtagatgagaagacagctccataaaacaaaaacgcatgagatgagaccttagacggaagccttacttggtaaactacccaacttataatttagtagaagaaagtcaagaacgcaattacctttaacacaatcaaaaatgaataattacaaccgtaaaatcaacaagaaagcttgcaaaaacccaagtagaaactatgaaacaatcatataaatttcaaaagtaaaatttacacatgtcacatcttacttcattggtttagattgaacatcctacaatttcaaaaaaaaaaaaaaaaggtaatgcttgctcatgactagaagcacttttctttgacaaaaatcgaaaacccatcaatcatgaggatgaagggattgaggttatactaagatcaactatttattatcattaccaaatacttacaaacatttatcaatatcaatgatatcactaatctcaagagaaaaaataggtgaaaaatgaaaagatgacctgtgtcctttgtgtcctcgaattcctgattgtttcaatacttacaaactatcttattccctattttgctttgctactgtctcgtactttatttctctctaatccatagcaaggattctctatgaaatggctattataaattacagggaaaccaaaagctacgaaaaataattgcagaaacaacaatatttttttcaaagtaataaaaaaacagttttgttttgttttgaaaaaaaaatagaattataataatggaagagcccaaagctctcaatggaattcatagaacaaatacagaatgaaaactaactttgtgtggtaagaaatatatatatatatatatagatacatatacctgaacggaaatgcaggagggggcgggcttggccttcgacgacaatccggtggcggcaccgatcaaacagagagatagagagaggaccgaggagggtgagtggtgtggtctcggtctccatcttgtatcgagagagacaagagaggagatagggtggagagggggtatgggtcgccagtctggttcgccgagcgagggagagaggggttgggtcgccgatcgccggcctgggtcgcgcgagaacgagagagaacagagggacggacctttggtggttggggtttcggggtttggtcagatttcaccccacaggttgttcatcaaacaaaccgtcgacaccggatagcaccgtaaaaaaatactgtttaaaattttttgtattgcactttccagttttgaattattaaaatgttgttcaaactctaccatacggcacattatgggaaatttgaatttatatgcttaaataattaaaaaattttattattata

SEQ ID NO: 224870 - DNA, 2999 bp, Cannabis indica
ttatttatgggacaatagtatgggaatttatccaacagctgtgaatatatatatatatattaatgcaaatatatataaatatatatacaccaactttctccctctgcatgctaaaaatcaagcatgaacacaaaaggttttggtccatatataaatatataatatatatatatatatcagagctagcacagagatatatgtaataaccttttttctgcaacaatagggagagagatgctttatttttgcttattattttttttttacaaaaaagaaatattaattacaaaaagttgtgtgtgtacctaacacattgcttgaagtagtagcaatttttcttttaaaaaaaataaattgttaaaatttattttagaatacatttatgtatactataaattcatttcaatatcttctaagatttttagtgattaaaatgatccgtcctattaactcaatcattaatctaaccattgcaaaagtgataaaaaatacataaacaactatgaaatattacaactaaaattattatttgtcaccaaaaatagtatttaaatataagttattactaattaattttaattacagttcaaaatatatttagtgataagttcaaaatatatttagtgataataaattaactgtaatttttataattaatatttttagctatagaaattttaataataatatataagttatgataatatatatttttagtctaaaattgtattgtgatgaaatgttaaaatttttgtagtgtataattatagtaagagattatttttgatgatatagctttatattggtttgtgggattttgagtggcaagtacaaattacaatggtatatagggaggtgtgctcactcttcttttttactgtgaaaaaaaatctaagactcttgacctattatggcacacattttgattaagattgttctttctttctttcttcttacacatattattattattattattggagactcaacaaaattaacattaatacttgtgatttattattatttaatttcccatgcaacttgttcttaatttttcttgaacatatcattttctttcttacataagaataaagaccattgctttgcaccttctaaagatgcttcttttgttcttttaagttattaagcaaagaagacagcctaccatgtatatatatatatagatatatatatatatataatattttatggtataaataattaaatttaatttttagttgctaataaatattaaatttaatttttgatgttaataatatttaaattatatttttaaaacttccgtagatatttgatcgttaagtattattatctctcacgtataatttttttattgatatatttaaattaatttttaaataaaaaataaaaatttaataacttagactaatcgtcaactgccatgcggccattctcttaacacttagcatttatgtacttatggaaatttttgaaaatataacttaaatattattagttctaaaattaagagcattgctattaagcactagtggtgtctagtacattctcgacatgtttcgttgcgattggctagcgatactttctaaaagctattatattaaattatatggacccgatacttagttacaccaatagcgatattgacatgaagatactagacactattggtgcactttaacatttctctaaaattaaacttaaactgagagttaaatttaaaaatttataccataaattatttataaatatatgtgtaattttttttttttgggaaaaaaataaataaaaaggttttcaatgtgtcattaattgtagctataaggttttctaggctcatgcttggctttcataaataattatctcttctctttttactcactctagtcaaaaaggacaataattcttttacattccattatgcatttcatataggttatagtaattatgttgtctcctatatatctataaatatttatatagggtatttctaccgtaaggcttgatatattgtacctatgctataaggaagttattttaaccaatcttaagttaaaaaagaaaaggtgcacataacttttgttgaaaaaatctagaggattattttaaactttattatattgtttcattgattgagtaaccattggcacagggatcatccaagtggacttcatatttggactttggccctctcttgataagtaataatgttattttattattttattcttatacttttatcatttgtaaaataagtaatttgcggcataaatacttaaatttaacttccgattataaataaatacttaagtttaatttttaacggtaataatacataattatatttttaaagtaggtacctaaccgttaagtgtaaaagttaataatcacgtgacattccttgatttgtcaaagtcataaatttatattatttatttaaaaattaatttaaatataccaataataaatgacataataacttgacatttaatggtcaggtaccaacagaagtttaaaaatataacttagctattaaaaccatcaacccagccaatgacataataacttgacatttaatggtcaggttgaataattttatcctgtttgtaacataaatattaaagttaaaatattcatttcaacccaatgaacccaacccaacccacccctatattattgtactaagtagagttgggttgtacaataaaaaaaattgaatggtttatagcttatccaaaccgcaatcattaggttggcctattaaaatacctctaatccagccaacccagcccatgtgtactcctttggtggcgacattgaagttctacaaataattttatcaatttaaagtataggttaaaaattattaaagcaaattaatttaaaagataattatagtaaaactatgtatgcaaataaattggtggcgaaagtatttaagtaatcaattttattaaaatatactattagtataaaaaaattaatagcaaaattcgtaa

SEQ ID NO: 224871 - DNA, 3815 bp, Cannabis indica
ctattctaattttatgtcttatcctaagtttattgctatgtctttatttagttgaagtagggaccgtagggaaactagaagaaaataacaattagagtaagtagacacacaaggccgccacagccaagttgagaagtagctattgtgtttaagaatcttatctattctcttacatcaaacaaaatatattcccttgtattgtaattaagcttccattcaattttaaacactaaaatgacttaatcatgtgttacttggaaataacatagatatttatatattgggtaatcatcacttaatacaattgttagctctaattttcaaattgttgaggccaagttggctatttagtgagaagttttaaatagatgtatatatttttcaaataaaccggccataagtcaattttgttttgagtcaataatgatgaatagcaccacatatcaagtggtagtgttactttttgtgggtatccttattgttagaccccatttaattgaatgtctcttttgtcttaaccattcattccccccatacaattggataactctcctacattttatattttcatatatatactcataagatattagcttctcaagtatccaaagcttccttttccaaaaaaaaaaaatagaaaaacttttcctttttgtcaatttcctattgagatttttttacaagatgatgaatttccatttccacatcatagttcatgctaaacaattcattcaaaagcctttttctaacacaaaagatgtcccaaaaggctatttggctgtttatgttggtgatgagaacaaaatgaagagatttgttatccctttatccttcttaaacagaccatctttccaaaagttgctaagtcaagccgaagaagaatttggattcgatcatccgatgggagctcttacaattccctgcaaagaagatgccttcgtcgatcttatgtctcgttcgaaagcctaatgaaatacaattttgaatttttgtaaggaagatcatgccaagatcacatgtacatatttttcttttagtccaacatgaatatttgtatatggataaggtgtaatacttgtagtgtacaatgttttgttcagtaaatcattatgattggattttggattaattaattaattcttcaccttgagaaatctgaatgtttttgttgtttaattattactttgggtaatagtatatattccagaccttgactaataaaatccaaatgcaaggcaatataataccatgaacatgaagcttgttaaaaagaggaaaattcatggtagtatttttattggttgaggcctaattttacaaataatttgagtgaataagaaagtgttccagttaaaggtccacatggagtggaatgtaatgcttagttgactattatattatattatatatatacatgaaatattcactaaaatcagtactattcaaatgcaggcttatctaggtatgaaagaggcactatgcaatacttgtatgtataattatatttgttagtcactcacatgcaaggatggagttcactaagaccatcttaaatttgtgatgtattgtcatattcaagtacttttgtaaaaaaatagtatttttgtaattatgttaaaaattgtgagtacatgctaaaaaaagttgtatcatatttgatacaaagaaattaaattacaatatacctttattttctatatatatagataaatttatataattataatagtgtcattaaatattaattagtgatttgaatacacaattttcaattataataatgacattacttagtttttacaattagcattaataatagttattattttgggataattacactccataatgaaattttcaactttttacttttatattgtagggtggaattttttttcaaaattactgtatttttttttaaaaaaatactttgtaagttttatactgtgtaatcttaagttttcactgttgttctactgttgttttttagttattccattgttatttttacttgttctattttgtgtttcgctgttgttttttaattattccactgttgtttttagttattcctagaatttatatctaacatcatagatataaattgagtatgatcattagtacttttactgaaaacccgctctggaaaagaaaataaaaagctctagcaaaactatttatgagctactctgttagcagagtgatacatgaacaataaacaccacttatacaattaaataattacccatagtcttaacaactaaatcaaaatgagatgacatcattaattgattgtgaacagcctcaatcgtcactaaacaattcgtctcaagaaccaccatctactaacttttattcttgattcagctaagaactccacaaattcccgtaatctcagctaactcatggcgccacactagctaccatagtagagacaatagtacgagcttcaatgaagtggcccaaataatcacgagctaccataccaacaccaaactgagaagtctcagtaaataatgcatcatcaatattgatcttgacttgattctctttcggcttcacccaaactctagagaccatattgtgcaaaagtatagtttttttgtgttggaaaatttcaaaataataaaaataaaaaatatatggattaaatagtataaggtaactgcttattttaaaaagataattgattacccgtcacattaaactgtttttccatatttttcaacattcttttttataattatttaaaaaaaattcccaccttcttctaattttcagattttttgtaagtctagatcatgcttagtaaccagttactatttagttgttattttgatagaggtaaccagttaccatctccctactcttctccttctttggtggttatattctgattttttccctaaatctagcagtaacaagtgactcgagtactttcatgacattaagaattaatagtgataactggttaccaaaaaatcaatttttgtttttttttttttgaataatgataatcaaaatgcccttttgatcatcatgtcacatttcaagtattgttataataaataaataaacaccaaattaagatgcaaataattaagcagtgtcatattacaattttataattattttaaaaatttatgaaatataatattaattatcatgtatatatgtaagaacgagagcttatacactaattcattattgcatgatatagaattacttggagagatgaccaaataaaagtcacaccatacattagtagtctcataatgatgatcataatgagcttatttatttatttatatataatgtataaacgtgcattgtagaagtatcctataatatactatataacgacctcgatgaaattgagaggctgtgcaggggagacgacatagtcgttgcgatcggtgatcaagaagtttccggtggtggcgcatttgaacgtcccgtcgatcatttcgaacacataatcggattcctcttgtgggtcggaattttgaactccaatgataaagttggtgacagggtcgtacttccataacttgttcttcccaacactttggatcatgcataacacattattattggtatgatcatgatcattattaccagtacgaggaagtgggtagacttgatgttgaacatttgggtctgaaatgagagaatcagtgaatttcaggaacactcgatcatctatttcaacggctgtgatgaacttaccatcactctcacgtttgaaggccactggtctattaggcattttgattataatatttatatatgtcactactcttaattatcttctt

SEQ ID NO: 224872 - DNA, 2885 bp, Cannabis indica
tctgctacataatttttcttgggattgaacctatgatgtgatacaattcatagagatccacctaatttgcctatgatctgaaattttctttcaatttgcagtcagaattgcagatgcaagatgtcaaaaatgtggtggtacataatttgtcggtatgttctttcaccattcctatattattgttctcctttcatcagataaacaaaagtattggattgggcattttctaaagtataataaatagtttctcttgatactatgttttatattgtcggtcatagttagaaacaaatataggaattaaatgatcatgtcatattgagaagtggttaatgctcatttatttagatgcctcttttagtgttttctttagataaggaaaaataattggtaattgaacacataaaaggagaagatgttatgaaaaccataaagtaattgacaatgttgaccatgggcttcaagaaggggactaatcttcctctgcatttctgtaaatttatcattggtgaaatgtatattttgatccttacgtatggtaaaaaaaataccaaccatgaatgcaaaagggttaaaggccatctagttgaatttcaccattgaatgtacatcatatatgtctataattgaatagcaactatagcttgcctttctatttccccctttcactatggtatgggttcttggatgcaagaaaaatggcaaaataagtaaagacaaaaaagggaaaacccaactttggattgatctggagtggaattagtactgatctgtaagaggtcacactgttgcagaaacttcagagggaattacagtataggctctcataacaaacatctggaaaggttatccaggaagtacatctccagagtaactgttgttggtgtaacataatgacaccctggcatttgagaagggaacgcttggtgttttctttcccaactcgaaataacgaataaatcaaggcagtcgtacagtgtttaaaacagaaaacaaccttttttccttgtagacacacaccaagcttggaggtgttctctcctaaagaaaggaagtcagaatatccaacatagatatgttaagtatttccagtggtagaagagagaaaaatcttggccgggttttatgtgaatgttaggtgataaggccaaactataaaccttatatcaatgctagggtgatattatgaatgcatttgaggttcctttgttgattcattgtacttgggaaaggttacagatttttcttttcttttcttttttcaaaagaagacataaaatgataagaatctaataaatcaagcaaaattcgtctggatattctcggccagttagctctggactccacattttcagacatgctgtgaaccaatctggttgagcaggaaatgggcccatgtggagggttatatgttttgtttagcattcctatatgccattctgaactttattttgtcccccttgtaatttttccatgttgtatcaatttgcttcaatacttgaagaaacgctagaatgatggggtttccagcctatatatggttatttcttttgggaaaatttattatctgctacagaagttatatcctggaatcaattatttcgttgctgtgttttccagccaggaatggtgaccactgatcttctcatgtctggtgctactacaaaacaggttaaataaaaaataatactgttcttgttgtcacacatctcttttccatacctcgtggaggaacaactgactattttgattctttcaggccaagtttttcatcaatgttttggcagaaccagctgaagtggtaagttttttgttctttgatttgttcaaaggtgatatatgatatgatcatttcattatgtagtcataatcaaagccgtagaatagtccatagtttatcgttgattttcaaagattttcttctggcatttataaattccatataactctataactaatcattatcacaactcatgtcttctaagtttctttaagtacagactcccatgttgaactctccatcatcttgctaaaagtaatagtttttagcagatgaacattcagttatggaaccttagttttcgatattcaagctcaactttgcaccattcatgtagatgtaatgacattaagctggtagatggactatcaagattagacagagttaggatattacagctaaattctgttggtcaggacataataataataataattaaaatgtatgcaaagtcagatcatgctcttggattcttggttagtttgaaatttaccatggatgtccctcacaaaagaatttacaattcttgttggtgtttttctgaatagatttttaaattatactattttaaaatggataaaaaggtaatatcatggggtggcatcaccttagtaacgtgagtaactatgttggttgccatccaaattggttagtttatgctatctagtgagttaccaaagttgatctagttgtatcaaaataatagctttcattgtttgttcaaaatacagattcttaaagaattatattaatgcaaaatctcagatgatttgttatataattctttgttttgaattggagcttggggtttgttcaggttgcagaataccttgttccaaacataaggtccatcattgccaatggatctatgaagccaacttatattcgtttcctcactgggttgaaagcttactctcagatattttcagttaagtttctttttctttcttcattgtcttttcaaataatttttgttactcataaaattctaatatgcccccaattattctttcctcataaatgcacagagatttgcttttggtgctagaagaaatagatatgtgcttgaagattgaattgcatcagtcatcaggatttaattttg

SEQ ID NO: 224873 - DNA, 6211 bp, Cannabis indica
aatactctaatttttttagtttccaaataattatagtaaatttaaatatttgttttttttaagagaaaaaaaagacgaagctcgatttggttgatttaaaccgaccaaaccatggattaaaataatcaaatttttttatatttatataatggttagttaatttttgaattataactataacaattaaaagttaaattctaatttttctagtgtaaaaaagcgaccaaactaaccattacttacccctagtttgaagtgacatttatgaaagattaaaagtttgatgagtggattcttcggaccacaaataatagcttccctaagctaagagaggacaactatacacgtggtctgagtgtggaccaaagccaagaatctatgctagtggaccatttacttactctaaataaatcatattttattttgttttttataacatttatgaaaagtaaaaccattttttatttattaattcttggtaatataacccatatcctaaaaattcacgttgaaatttgaaactcttttagttaatactaaaaattctgcaccaaataatgtgcctcaatcttagtttacttttaaaataaataataaatatagaattgttttttgattttctaggttccctcctccatgccaataggactattttaattgtatgatgagtcttccaacatagtaagcttttttttttcttgaaataaacacaaagttttgggagaggcaaaaagaaaatagttaaaaaatattatttgtgtctagtacctttttcaatgttatactgttattaatataattaagtatcatattttataagaaaatagctttaaaaaaatattactaaccaattgtgaaacgatacttacagaatataataagtactactgatatctaataacaatgctcaagaaaaaaatgattatatttaataaaaaaaataatattactataaaatattttatcgttagtatgattaaatatcaaatctaagaatcaataattcatatggagttttagacataagtagtttctataataatattttgaaaaacattttctttaaatgtcatgtgtatatctataattttattagtgttattaattagattaataattcgtttgtcaactttattgattttgtaggtattcttttttatttttggtgaatgtgaataagtttagtgaaattattgatgtttatagctatatttatattctaaatttccaaaaaaataaataaataaatattgagttattcataaaacaccaacaattaacaactatgaagataacaaatacaagactttttttacatgtatatatatttttacattatagttcaaaaaaaaaaaaaaaagcaaatgtaccaaacattcaaatagatcttacatacaaactacacacaacatatttaggcaacttgttttcttgctaaccaagaaatcatttcattattaatgataaaagcttttataacatatctatgttcttgcaagttttgaaagattataaatgtttatggtactttgtgttttcataattcatttacaactctcaaattgatttgagacctcttgttgtaaagctaagaatggtaatttttcttcactatataatgtagaatcaccaaaagacaccatcaacaatacaacttctttttgtatcaaattttgatcttaagacatccataaaattgaaagttgccaatgatttaaggaaactagctagtatttcgtctcaggaagagaaaccgagttgcctatttacttgtctccaatagccaaccgatgaaaagaagattggacggcgtttctagctgcctcttgctctgatgcagtggcaaggccgagcagcattcgaagaatctcggttgtgtcttccaagtagtatttagccttgctcggtttttggccaacagtgcaagcaaacacctcggctactggggagagagagtccttcgcgctcattatcacctcgaacatgtcctcatctgacctatcatccccaatgcagagtacaaaatctggaagaatcgatttctgtttcattgttgaaaggagacgctctgctatgagacccttgttgacaccctaaaccaaaacaagaaaaaacaggttaattcgaagaaatttgtgtgtaaattttgtcaattctaagtcttaataataaccctgtgatcaagttttggtaattggattaaagctatcaaaataagacattaacctgaggtttaacttccacaatgtgtggaccacttttcacagaaactggctcattggcaagaacactctctaagtgatcaagaagctccttggcttggcatgacccgaaatcaggatcggcatgctggtaattccacaccagagcactctctttcgcctctatgctagaaccatcagttgtttcggcgtaaagctgcatcactggctcagcaatttgcttccaatcaaagtctggaattgacacacaagtatcccaatcatcatcatcatttgtcctgcaaaaatggaaaaagccttaacctttataatcacatcaataacaaaatgagttctttaactaaacatcaaaagcatccacaaagatttattaaaagggtgtaatgtaaaggtttgtacctcagaaaataaccatgttcagctgcaagaccaagcttttcacatgaagaaaaccattcaactaatgtgttcctgtctttcccactaacaagaaaaacaatatttttggggtctttgcacaaactgtccaatatttcaacagcttcactgttaggagttgcactaatcgaactcgacatcatcaaagcaccatcataatccaacaagattgctcggttcttagttctcttataagccgaaacaatatgctcaacaccaagctttctgaaatttggatccaaggcaatcaccctgaaccccaaccgaaaccaatgccccaacaccttctcctcacatgatctctacaagtgcgttcgagatcttgtaaaaagcttttcgcccaataagcaacatcatgtgtgatcacatactataatgcttctcatgcctcatctgtttctcagaatcagaatagatcaatgcagattccattgcttcagccacagcatcaacattccatggattaactcgaatcgccccactaagggacggggagcaaccaatgaactcagacacaacaagcatactcttcttaggagttgtttgatcaagtcctaaggttttatcaagttttgtgttcccttgtctgcatattatgtactcataaggtataaggttcattccatccctaactgctgtaacaagacagcattcggcgatcacataataagcgattctctcgaaaaactgaagcggggaatcgatcaaaacaacgggatcataacccggttttccaaatgtcttgttgatcctagacacagttgcataagtttcagattgaacctcctgcacatcttttcctcggcctctagcagggttggcgatttgaaccaaaacaacactaccccttttatcaggatgttggagaagcaattgttccatagccaaaagctttaagctaatgcccttaaagatatccatgtcatcaacaccaagcaacacagtttgaccccgaaatcgagattgcaactctgcaaccttcaattcagtctcaggaagattcaaaacaagttctagttggcgaatatgtatcccaacaggaagaatcttaatgcttacagttctaccataatactcaagaccaatataacctctcttagattgataagaaacacctaacattctactacaacaagaaagaaaatgtcttgcataatcaaaagtatgaaacccaataagatcagcattcaaaagagctctcaaaagctcttctctaacaggaagtgtcctgtaaatttcagaagaaggaaaaggactatgaaggaaaaacccaagtttaactctattaaaccttttcctcaaaaaagttgggagaaccattaaatggtaatcatgaacccaaacataatcatcatctgggctaatcacttccataactttatcagcaaaaatcttgttaacagataaataagcttgccataatgacctatcaaaccttccacccaaatcaggtgacaaaggaagcatgtaatgaaacaaaggccacaagtgttgtttacaaaaaccatgatagaatttgctgaaaagatcagttgggataaaagctggaacacacttgaatttctcaagtaaagtttgagctatgtcatcttgatcaattgggtcaatttcttctttaagacaacctatatagatcacttcaaaatcttctcctaaaccatctttaagctgtaaaaggagtgagtcttcatcccaactgaaatcccattcaccattttcatttttgttcactctaagtggaagctggtttccaacaatgatcattctctcttgagcaactgatgagggagcatctgagttgacactgttgctgttgtcatcatcgtattctgataaaactccggccactgttgccactctaggcaacctccttctctctcggccaaaactcagtgagtcaccagaagcgagatctagtaagtttgagtaagaccttgaaaccattttttttgtgtgtgtaaaggtaacaactttttcaactcaaatcacttaatgcttcttgttcgattcaggttgagttctgcaatgaaatacccattaaagaaaacagaatcaaaagctataataacccatcaaaactattatctttatatataaacatgcaataatatcaaagaagagatttttttttaagaacattgtgaaaatctacttttcataaattaaacttttatggccaataaatgattaaataaataaattaagaaatggggttttgttaaaaccagcaaaacaaaataacccagaaaacatagttaaatttttttattaattaccttctaaactcagaacaaaccagacaagagataacccagaaagctaaatggatcaaagcattttagagattcaaaatgccattcttaagcacaactcatattccactaatgagaatataaggtcatacagagaaagaaagagagaaaaaattatgaagagtcaaagtttagaaaaagggcactgagtttcaaagtgggaaaactctgatcaaatactcagaacaaggtataccgtacaaatatagtggcatgcaaaagaaagaagagaatagtaataataacttatagagaaaagaataaagcttgagtttttttagcataagagaagatttaaacatgaaaaacttacttacccttgaagttagagacaccagtggaaagagaaagagagagaaagggtccaaagattctttctttttctcttaaaaaaaaacttattttttttttcttttagagcacacccttttttataaagtttcaatttttccaatttgtaacataattttcattctgatttttgttttaattacatcagaaaacaactgggattatctgtttctctctctttcacgagaaaaggaattggattctctctctctctctccttttctttctttgtttctctcactatattgagtgagagagtgagtgaatgaatgatgagtgatgacatgtggaagagagaaaaatagtacaaagtctaaactgtgtgttaatttttggtgatgaaatgaaatgaaaaaaacactcttcaagaccaacaaacaacaaggttattagattaaactatggttaaagttgaaagtggttcccttaacatggggtttccatttttattttaataataatataattgaaactgaccacctaactctctccatgtttggaatctagaagagggctcacttaaaacaaaacactttggcgcgtgtactacacgaactaatcattagacttattattatcatttatcagatcccataatgtatagtctttaataagtaagttgtcaagtagttttattcagcaaaacaaagttgtcaagtagttttctttttcttttctagttttcttttacactcaagaaagcatagaaactaatcattattatactcaagttttatatgtcatcatttttaatcatattttttacttggttaaaactaaaactataattacaaatatgcaatctcattatgtgtgaataggtgtaaagtgtagtataacctatttctttaaaaaatatatttttatataaatattattttttatttt

SEQ ID NO: 224874 - DNA, 7284 bp, Cannabis indica
cagatatttatctattgttcaaaatgaaggactcgaaatatcacagccagcacttgatactgttaagtcagcggtgtatcatccaattactgcccgacagaggggaaaagtgcacaggttggtataatgtttttttgggatataggaaattaaatagagtaggattgcacaacttctatgattgataacatctgttttggaactcatgtcaagtaattatggaatttttactttcacgtgagagtcaatcttaaacttcatttaagtttggattgtctatgaggtaccaaacacttagcagctgtagtgtaaaagtgataggttttttttgctcttaaggttaacagaatggtttctggtcactcagaagcacacgatttactacttgcatgttataatgtatccattttcccaatatattttacagaaggtactataaatttaaaggcagtggaaggtgtgatgacgaaagctcttctcctccatgtgttgggtaaataatcagcattatttagcttctgattgatatataattacgttagattgtgtttgattgtaatatgaccaagaaatttcattttataaaacctgtaaacagttgggtcgaaatgatggcacctgttttttctcaggcagcttggcgatgtgtatggcatatgatacaggtatggaatttactgtgagactcaattacaaaccaaagttaagaagtcagtatttcttggtacaaaacaaaccaaagaagcattgagtctgtttcttctttagatatttaatgtttttgctgcaaatttttgctctacaaattttacttgttgagtttatcatatcattgtaaggaacttgtgttttggtgacttgtttaatattctgtatgtcaagattgcccttcaaaaaaaaaaatgcataaagtttcagcataccaaatatattccagtgtatacaaggaaaacagtatttcttggtagcaagagttattaaaatgcataaagtttcaactaaacattttgatctctgcattgctttaatcaatatagtgattattctttatttgtttattattcctgcagaatgatttgatccatgcatggggccttgacatccagctaggttattgttcacaggtaaatttccattctacaaaatttcattcatgggctcacttgatcgtacttaataatgattggacttccattcagggtgatcgattgaagaaagttggtgtggttgatgctgaatatgtggttcatctcgcccttccaacactcggtgtatcaaatgcccataaggcaagtgttgctgtcataaaagaactccttaatattttgtgctttagagtttatttgaattgcatctatagttgggggacatgtaaattcttttcaagccaagcaattctcttctataaatgtattcaaatgtgaacaatgttaaaaatcgttacctggaaccttgtaccaaaagcattgtcggtactctttgtaagtggtgctgcaatagcctcgtgtgcttgcgatgcagcaatcaagcatagaaagtaatagtaagacattgtttcatctatctcattctcatctgtattttttaattgcaggctgcatctggcttggaaaaggttgataacagaggcaaggtatatatatatacttgttgatatgccaaatacttgttgatgctctcagaacttttacctgacactttttttattatgttctcaggtcaggatgcaatcttctgttgaaatgaagatctttaaggacagatgggacaatgcggttaaggatgatagttgttgggtcgatccgtatcagttgtcagtaaatcgaactagcccttaattttatttatgacttccatccactgagaactcaaggttggtagttatcctgcataaaagtaaaatgcagaaatctgcacagatagaaatacacaattcttctgacaaaagagaaactcaaacagctgtgacaatcacttttaaggcttacaagaaacattgcaatgaataattaactgaaccgctgtaatagagagtgcggaaatattattcgacatccaccgtgagcagccattaagcatgttgcaacttctcatgtattctttgtaaagtacataaaatttactttatagataggtgaatcctgcaaggtgagagtgagaaatagaagatctatcattattttatttatttatttggaacttttggtgttctgattgtacaatttctgtgtatagaaccctatatctgttcaaatgaagattcttgtttcctctcaaccattattcctttgttgcatatgataaaagtttctttagaaatagaagaactgccttgtttttatgttagtttcttctttctcatgtcaatacaattttaattttacgtaggtctttaatgaaaactaatatcatttagtatgaggagtagccttggcctttataaataaatattaatataacaaattatattatatctttatttttatatataaaatttgattatttaacacaattcttgtgttttccgttaaaattaacaaacatgtttagtataaaaggtataaagtagttcttcaaattgtgtgaaagaatgtaccctcacatttcacgataaataaaccctaaattttgtagcccctcaagagggactttcggccaaccactctgcatttaaggcaatggcttcgatccgatagttggctaggaacgcgatgcattgtacaggatctacgagatttatcttctcattgcaccaatcacttacaattaagaaattgactaagtgatatcaaattatcatttaggcatcaaaaaatacatgtttgggacgttctttacaatcacacaacatccagattaacatcaatatgtcaatttgggcgctaggtcttgaacaacctttagtaacgaccataatttccttaatattgatccgattaaaagaatccacttgcgttttaaaaatctttcaaatttctttcaagtcatttctttcacacatatcggaattctgaagatttcatgttcgaatttgcccccaagacaagtgtgattttttccacaaattacccgagaacgatccaatagacgagatttgagctctgaaagttaaagatcatcatccaaagtcattttcaccattagatcatcatcaatcgccaaaattagcctaaaattatttttttcatatattttgtaatatttattattgttttaataggaccccattcccgataaaaggagagctctactagttcattttcacattcagaaaagagcccaaggtgagagcatctttctctagtttttctctctagaaatagagctcttgccttagtcaattttcttgtattctcatgagcaataataactcaaagtagacgtagctccattaccgccgcgacacgaggagtgaactactattaatcttgtgtgtgtctcttacttactttacttaacttctatttcctctcgccaatctagcgagtgagtgatggccaattttctacgtcaacagaaaggattaccattttacctttctactttactacttattctttaagtaccattgattcactagttaataatttatctatatcttattatagatttgagctcaaaatcattcagtaccagaattaacccttaagggaactaatatacactctgttaagaaagattggactccttcttgttaattcatgttcccagacatccatgtaaataaatttaggtaaataccattttaaacactgtattttataaaagttactgatcgaatcctttgttttataaatgacaaattgaaccatatatttttcaaaataatactaaatagtaccttgaattaattttttgtcaaaataaaactttagaataactcaatataaatgtattatgacaaaattggttacgtttttttttccatctattcgagctaggaattttttttttttttgagttagttatattaaaaaagactgttgaaaattgagcttaaggtcctatttgtactattttagaaaatacaaggtccattttatcatttaacgaaacaaaggctccaattagtaactctgaaatggtataaacccaataaatttatttaacaagaatcactagcctcatacaatgaaaggaccttaacaaaaattagaaaatttaattaacatgaacaagagttcatcaacactcatgatttagattgatctatgaacgatcatctgttatgatacgaatactaatctttattattaaatggcttttgtataaagattgtgattcacatcggtccttatcttatataaccatattatataaaatgtcttcaccaagatgtcttaccacatcaataatctaaatctagattatttgtactgtcatgatactcaataaactgcacttacaaccccaattaaagaattcaaaaactttaattagtttttgactattttattctttcatgtgatcttaattctctcatattaatctaagatcacactctcaataatgaatatgattttttatatatatatatttactaaattattcaattaataatttaacaattcaaatataattattaatgcagattttcgttaactaaatttgagcctgaatgataatttgcacagaaaaataaaaacaataaagaaaagaaaatgaacataaagtcaatcttattagatttctgacggtttttcagggccttttttcttatgaatttttccccctttctcagtctatcttgtctctatttataatcacatagtaggcagttaattactgagtcgacttatatttttacaatgattattccttgaaatcgtggggtctaattacagatcacataaaataaatgtggtaataatttgaatatagcacagctgtggttagcccacttttactgggtcaaaataaacgtgtattaaatacgttgcaaaccatatcgttttggaatatctcgttgggaatagagcagcggtaaccttgatagcgagctggagctttttttatttctttttaaggttgtataatgtaaaatctcatcgcttttactctggaaaacataacaccctatctgaccatcgcattttttggtgacaaggtgatcttttttgtgtgtatgtcttcctatggcgaggtggacgtctcgctatcacttgccttggttcacccgtctgttatactgagtttgtatactacatattatacactaagtgtcttcacattcagtatatctcatccacataatcgaggttagtgcctcgtcttatacacctaaagttacatggtttctcgttgatgcgcaaggcaacaatttgtatatctttatctcacataagactattcagtcagccgagttgtaaatatactccgtcaattatgcttttaacgagttattccacctcaagtataattataattacgtgccttggtttgtattcttcccaacttgatacgtgttttcctctgatgtgttagccaaattttgggtataacaataataataaactattgtatcgatttttatgtaaatcgggctattttatccaagctttgcatagggctccacactgcgaggtttctccctctctttggaataagctgtggaatagtaaaatcctggagtgccataaggtcctttggtggtgcatcctgtctaaagcactcccagtgagatctgtgctcatcaagaggttccacattaatgatgtaggatgtactctttgtggggtagaggaggagtctatggaacacatgtttctctcatgcgacttggcctttcacttgtggcagttttcaccgcggggcatatttcctatctttggttctggcatttgtatgtgggactggaataaatttatttgggaattaaaatgccaaggtactaaagcaaataaagattttctttatgcttcgattatttttgacactatttgatgggtccagaatgataaagtacaaaattgttgacccccgaagattactaggtgtaatatttagagtcattaatgtgcccacgaccacagacccgcgcctccgtccccgcgccccgtgcctgcaccgcgcacctcacccaacaatgtaagtaaggagtatcagacaagataacgacatcacagtgagtaacaataatcggggaaaagttcatttcgtctagggtacaaaatgacaggggtatctttagtataacatagggtgtcagatgcatcagaccacctagaatccaatactattaggtgtgaaagtgacttcacatcatatggtcgggatctggtaaaattataaagtgttaagggctcactataaatagagtccttgagttcattgtaaagagaggctttttcttcttggaatgaataaaaacaggaacttcttggaatagaaaagcttttgagatttctactctaaacattcttttattaagtttttttaattaagagatagttccaaatcgtcattatatcgttgacgagttctagccgttaataatttggcgtcgtctgtgggaacgacaagctctagctacgttggttctcaaatcattcaccatcacttttgaaatgtcaagacatgccaatcgtctcaaagaaaatgggggtcactcagataaaaactagtcgaccaccatatttagaggccaccaacctcccgtcgctgagaaggccaaaggatgaacaaccaatgtgggggctgccaagttaatgctcgaagagagctcccaacactgcaggactcgatgataactccaatggttaactccatcaataaaagcattcaactaccgagaaagccatctctaatgcgaagccttccatcatctacatcgtcaagccccgacacatccaggtatggacatagaagggaaaaacaggtgtgctcagtgggtttaagctctcgggctcactactatgaagtagagataagcaacctctgccaaaaaaacaaaaagttagagactactatggctggtatgcaaaaggtgttgaatagaatactcaaagataaaacccaagccaacaaaggtgattccctgtcatccactaataacacccaagagatgggcacagaaggagcctttcactagaaaagagcccaacgacccggttgagacaactcaatcctacccactataaggagattactatgagggaaacatcctatagccaaagaaagagacttcactcaagaggttgttgggttttatgccctaaataaaactcatttcatataatcagatttacttattaataatgatcagaaataacattttatgttgca

SEQ ID NO: 224875 - DNA, 2413 bp, Cannabis indica
atttatattttttatttttataatttcatttaattttaaaatgttctatagagaaacaaaaaaataaaagttgctggaccactaacatctaacaattacttgaaagactttagaaaaagacaaatattgacttgatattaatttgccttgttattttatttgtccacttcttaatccatctttggctataaatataaatatgaaactttcaatactcattgaaatatagagaaacaataatattgctattaaagtgttctactagctagtgttattgttatttcatcatttgccgttatggatttccaatctttgcccaaaactcaggctaagttgatcaaagagatcaaagaaacgatgttctcattgttagacatcggttctcatgatcacttgcttcttttgccttgtgcttacgagactgcatggctagccatgataccagatactgatgaaccttccaagcccatgttcgaaggttgcttaagttgggtgcttaacaaccaagccgaacatggcttttggggcaactgcgatgagagtggcatgccaacccttgggtgtctcactgccactcttgcatgtgttgttgccctaagtaagtggaatgttggtttcgtcatgataagtaaaggtaaatacatgacatgttataacaatattgtttcgatcgcttcgtgtatgtaatgttgaacaccttaacatcaattttcgctataataataacaatatttcttttatattatgcaggattggagtttattcattcatctaatgcaaagaaaatattgaaaaaaatgaaagatgaaggctctattcctcaatggtttgcaattattttcccaagaatggttgaattagctgaacaagttctcaacatcaaaatcttgaaagatcaatcccttatcgtttggaatatattttatcatagacaactcattttccaaaagtaaacatattattatatcatttgtcattgtttcattttaattctaattattatatttttgagtgtgtatctaacattactttatatacagagaacaacttaataatagggagatgaatttgctatcatatcttgaagtgttgccttcatcgtattttaaagaagattattctaatacaattataaagaatttgtgtgaagaaggctctttattccaatcgccatcggccactgcatgtgctttcatggctactcgaaatttcaaatgcttgcattatttgcaaaccctagctgaaacattcacaaacaataataatgttacgacaagtaaataataaaaaaataatttctttttttttcataaacaattattttcaattaattaaatgtttattaatgatatatgtagttcccaccacatatcccaacgataaagatcttataaagctttgcattatcaacctcatcgaaaggttagggttggctgagtctttcactgtggagatcgaagaagttcttcaacaagtttataagtaatgttttataaatatatatttatataaaaatatgttttattatgtagttggggaaagtgttactttcacttttattgcataagggcattttatttttggcaactaaagaaattatatctcatatatatgacgttgtatattatagtacttatgaaaaatatattatataattttgaataataaaattttatataatcaattattattatatgtaaaaaaaaaaaaatcatgcagtgcttactaataatactaatactaataataaataatactaatactaataataaatttttgtttatatttcttttttcaggaattacatgaaacatgatgaattattttcttacaaaaatgtggcaactttagagttatatctactcaaagaatcattagcttttaggcttctaagaatgcatggctacaaagtatttcctagtaagaattttatatacataatatattattattattattattattattattattattattattattggatcattctacaatacacatcactaatataggtgtactggtgcaacctctaactgtttcaacatttataagaattttttagtccaaaattttcatagttatgtacgttatagttatttaagacattttacaaaattttaagaaatttagaataattattaatatagaaatcaatgttcaaactgtttatttcacacgtgataaaataaaataaaaaaaatcacgtgtgcaatagactttttgaatcttgttttcggtgtgttaaattcttttcaaatttttcaaaatttttgacagatgtcttagataactacaaagtataaaactataaaaaaattagacaaattttttttaaataactgaaatagataagggtgcatcaatatacttattttaagagagtgcattgtattatatattattatta

SEQ ID NO: 224876 - DNA, 5261 bp, Cannabis indica
tgttaccaaacaccacctaagttgtccattttccaaatcttgtttatttttattttctataataagggtatcaataatgctattgccattgttgttgctggtcagtaagtgaaaccctttccacaaaaaataaataaatattggcttttaatgtagtctatgtagatggcctaataaatagattgatcggtgtgtatataatatattttttgtaatgtatcggcatataattcaagtacacaaagggcaatacactattttaatttagttcatgttgcatataatataaagcaaccaattacacaacaacttagaattacattcaattatagctttccaaaaacatgcaagttgctcatcgtcatcgtctaactcgctgggtctctgtctatggttattgttgtttttttccttgcaaagtgagaaaaaacaggataggatgaatttaattggagtcatatttctcaatcaaatctccttttctttcaagtaatcgatgtcctcatttaattcttatacaataataataaaacaaagaggattgctatgtggtgcctctagctcagtgattttttaaatatttaactaaataaaacaaaatatttaactaaataaaacaagtggaactcgatattgagttgcactaaataatattatacctcacaaaggtactaaacaccaatcaccatggttcctaagcatttctctaaaataaagctaccaaaacaaatagcatacaataacagcaaaacatggtacgtactttttaaactatttgctatcccaaaactcaaaagcacattcctcagtgccttcgatgcattatcacttgaagtccgtaaatgtaattgtaatccatatcaactcaatcatacatgtatagagaatgtatgttatatggaaaaagaaaatctattgcacagacattgcaccatgcatttgaaactttaattcaataaagctttggtttatgcaaataggtacccctcaaaggctcaaaacctcaaaaagagaacccagctcaggatcaggtatggagagcacattttagacttcaataaactcagaaaatgttgcccattagtagaaaatgcctaaattcagaaaactgggtacgctgcttttggcttaaaccggcttcattgggagaaaaacctaccaagagaataaaaaattggaattcgttttcattgccccgcggttcaaggaacaacaggcagttcaaagaactgtcttcgggtgtaggatatacatgctgctgaactgagctgaactgaaagaccccataactacagttagctagtcactatcattagtttgagcaagctctcaatttcccattcctctgcctgcaatggaagtattgtgcagcaattaagaattcatgctcatagaaaagacaagggtgagaaataaatcagttacaaacaatcaataactaaccaaaatgaatctttcttttcttgtgctagtaactcttcaaaagaaatgtcagagtattccgcatctgctgtttctatcaactcttcggattttgcttttagctccatgcgagcaccgatttccagcatctgtaatgcgaatacaaaagagaaggttaaatgcatatataacatgctatacagaaaaccacatgttatgatactctatcaacaagagtgaaaataataccttcttgtatgccggtgaaagtttgagctgttgttggagccaattgtaaacgaatgcatcctcttccagtctcttttgctctaattctagtttatatatctgaaatataatagcataaacttcttattgtgaaacaagatatacaataacatttcttaaggaccaaattcaaaacagttgttgcatgtacctgctgacgaagacgatcaaaggatgatcggtctgctttgcatagtaaagcctttgtaatagtgaatttacgctggatgagatcagcccttccatagaaaatgacattaagttagaactttagaagtcacattaggaaattaaaggggaaaaggtttgatttgtatgaagttccagaataatgagtttcaaaagaaataagttttaagagttgcaaatgagcgaaattaacactactcggtagaaaataatgaatttgtattggtgatataaaatatgtggatgaatttggcaatgaatagaataatggtatgtgtagtttacataaaaattgataactcaggttaaacaaaaaaaaccacaaagcttctttaaaagtagcatcacgacatacttgtgctgcatctcatttttagcttccaccaaacaattagcaaaatctcctatctgcattatgttgaaacactgaggattaaaaaaacattatatgcgaacccccaagaactaagtcaccgtagaaaatgaccatatgtactgtctaaacataaccataaattcataataggatagtgaaatgattactatcctccaaagattatatctttcattccatgttactatagataatataccagacttattttttgaaacaacataacttaaaattttgtaaaaaaaaaacttatttccaaagtcctataacaaatagatggctcttcattgcatggtttactggtgataaaattaagcatgaagagttagaaaatcaaaaatctcatctgttatccaagaatgacaagaacaccttaaattttatccagtccaatgttgcccaagaagcaaaatgccttaaagattttcatattacttttctcaagtttagcctaacatttcaagtacatttctataattaagcttgctaatcataggttctacatcagttccttacttaaatcttataatctctaggaggtaagagactctagaagttcccacagtagcaagaataatactgaaaccaatgaagactcttgattatgcccacctcaaattttttccaaatagtaaaatgctatcatcataacattagcaaatggctaaaatataataatgatcaatctcatatatttacttcttctttctcaggtgttttaacataaatggtcatagttaaagatgaatattttcaagacacgttaggatgtatatcaaatgtgtaaaacccacaaccattatcaaagaaagcgtagaatacaaaatcttttgtccaaacgaagatttaagactaaataaaacaaaaaatataccaacattttgcacatcaagggatatgaatgtaaaagaaaagcatgatattttggaagaagaagaaaaagaagaagcaagcacctgagccagtgtcaatcccttggattggtgacacttcataagttcatcatattgttgtttgatcttcctctgtgtaacactactcgacgatgtaaacgggtacaaacaaaccaaatcaggtttctcccgataacccaaacccaaatcgcttttctctaaatgagaaccatcttcttcaccattatcttcgcctttcgaattcgaacttttcttcttgctcctctttttcttcttcttccctctctgatctccaaccaacctacccttctccccatcaaaacccgacccgtcagaagccgggtcacaacgcttttcattctcaaacaagctctcccatttcggggaatcggagggtaaaatctcaagaagaagtgaacgagtcgaatgggtcaaatgggccgacttatcttcaggagtttgatgagtttcaccattagtctcagacaaggaagcttcatatcgtaaagggtcagtctggttcggtttcttctgggcttgctctgttttccttaaccatttgtagacagagaaagagaaaaggaagacagagaaagatgataagaagacgaagaagcaaaacgcgaacatgagtgtatgagatattttctggggttgatggagtttcgttattggaaaactagagaaaagattggatatatatatatgaacatgtagccgccattgaaacgcgtcatttagtttacagagattttctttctttctttctttgtttaatatcttttgatttatattactatttagtatttagaaatacaaacaaagggctttggctttgatagtgagtttgaagctatgtgagaaattatgttcccttctttgtactcactacactactttgctttcaaattttaaaagcttctaatttcatataatattaatacgtgtgtctttataattggatttaaatgaaagattatgtataagtgtgacactttactaactttatacttttatttattgaatattttatttaagtatagattacgtgggcaaaaaatgaaacaggtcaacttactagtttaattattattcttctctactgatatttgacattgttttcattttctttttataactgacatatagttttcaattgttgagaaagagaaaattaaatggtgtaaaatttgttccaaactcagatgtgtacggctaccatatttgtgttattgtgatttgtcccctactttaatgccgtgccgtataaagaggtactcttgaatttgaatgtgccacagagtaagaattcttcaaacattataatttgtacatttcaaaaaaaaaaaaaacattataattcgtaggttttcttttagttcttattatcataatgtagttttaaaaaaaaacagcttcattaaaacttcaaaagtaaattcagtaggagaaacctcaagagaaaaaaagtgtcaaacaataacatgaatcattaagtctatctataaagcaaaaacaatacaattagagcgatcaagccaccaaatataattatcaatcagaaacaaaactaacttttcaaagtgtgagccacactgttaacaattctaggacagtacaaaaaagagatatgattaaaatattgacaataaagaatgatatctctaataatacaacctagataagactgatcaattttactgtaataaataacattaataacagtaagacaatcagactccaaaatcaccatttgatagccaagtaggacacagagtagatacctaacgcctcggcaacatgaggagagaaacaaccattccaagcgcaagtactagaagctattacaagaccaaaatcatcacgaaataccgcctcaatcttagatttacccaactcaaaactcaaaccagcatcacgattgattttcaccacctcaaaaggtggtttggtccatttgacaactgactgattctcaagaagaatatcaaaacgagtgttacaactattggctgaatcaaaccgctttaagaatccatactccagtcaaacaa

SEQ ID NO: 224877 - DNA, 4654 bp, Cannabis indica
ctaagaggagagaactttggcagcgtttggttcagtttaatgtaatggtaatggattgtaatacaaatagtaatgggaatgatagtataatgtttggttgatttttagaatggtaatgagaatgggtggtgtattccttaatgaaagggtataaaataagagtataagtaattttatttttatataaaataatgtaatgggattcattgttaaggcattacaatgtttccaaaaccaaataaagcaatagaattgtaatggtgattccattacaattatgattaggccaaattaattatggcatttatgtctttctatctttatcactgctgaacttttatgttggggttttatttggattggatcttggttcaattttacaatgcttaatttcactctcaaacagattattacaccttatttttggcagacttatgagtgacattgctggcaatggaaaaatggaaaagcaggagatagattcttcttcaactggggtcttagagataccgggagaacctgccgtcatcattaatggagtgccagatgtttgcccaactaatgttaatgttggttcctgtactactctagctgtgtccgaatctgatgggggacacaaaggttttggtgaatggttggaaggaagggaagtgcagaagttgtttggtgagcactactataccggtgttgtgaccgaatatgacacagaagcagggtggtacagagttgtttatgaagatggtgactttgaagatcttgactggaatgagttagaagaggtgcttaagcccttagatattatggttccattgaaaactttagctctaaaaactatcaggagagggaagaaatctgttgataaaactggggttagagctcaaacccatctggccaaaagtgttgctaggaagggaaagaaggccttggtgttggtacctaaaggtgactcaattatgcagcccattagttgatggagttgccgttgcttatgaaatgtaagaaacaaaggtggactggacactggagtagaagaaaacagcttgcttcaagtttcagggaaattaggacatgacagaatgacactagtattttagtcatataccttgggtatgcatgccacatcaacttgttattttcttacttcaagatgtgttaatgtgtttttttttatatgggttgttatctgtacttaattgggtttacttagtgttgtcgtttttcttaggcttttctagttggtgttgccttcccgttgggactttgaatataaattagttttgttagttttcatttcatcaaagaaaatgtacaaagtaaatttaccattttgaataccctgcattttgacctaataccagtttaaactcatactcttggtaaaaacagtcgttgattcaaatttgctcaaatataagtctattcaaagttcaataaatggcaagaaatttgaaaaccaaactttccgttctaatcttcaccaaataaattgatttcataattctgattctgctttgacaaaatccaatcacatttttctacaaaataatcaaacaggacaaaccatttacccatgaaattcaccgctcaaaactcaaaagagatcatctctcaaaaccataggaacttttgtctttttatttgagtgtctaaacatgctttcagaaaggacgagcattaattgaaaagaaaaactcttataacaccgaactacataaagccacaatttctatggctaagtagaaagttgttaaatcttacaaactcctcctcatttttttatatcatgctgcaattcaataccgtttctcctaaagaaaaaaaaataaagaaccatcactggagtacacgaaccaagacttgattattcagacagaatcccttgttcttggtgatgaaacaattcattgccttagtttgagtagggaagcgtacagttgccatcttatccgggactgttgctctgcaaagttgttatttaatgaagataacataccatcagaaaattgtttaacggatcataagctgtaactatttttcaaaaacttatactaacttctgaaaaatctggatggaggatgcatcgaactcgcaaccagacagaaagcgtgcaacatcttctggaactgcatttagcgggattccttgaagtagaacctagtaaagggaaaacatgtttgaaagtaatcatcgtttaaaaacactaaacaagctctgatactaagaactagccttcttaaattgcaagatacgcatcacacaatggttttcaatctagaagaagaaacaaacattgaaaaaacagattactatgtcttcttgagaatagtaactcaaggtaactacaaattatttataaattaatgcagttccgtgcagactaaatgcacattgcaaaccacatatatagaagcaaatcacaaaaccacacagtctagtacattgcaacaccacgtcccacagaacagaacaggctaatgcttgagctcattcgagtaatataccattggagatttggcccaaaaactgttttcctctagataacaagaaacatattaaagatatttggcttacagtttttccatcataaggcgctatggtgtcccactgtgatttcgcaaccttaaattcaaaaatcaatactcaaaattagacatacttacatgactacagaacaaaaactacagcaaaaatagcatgctataattaccttctccattttataaagcggccctttctcataatcatcttaaatgcctgatcataagcctggggagaatcaaaatgcaccaacctggtgataccgatataaatgaatattcaaaaagttaaaaagagattttctacatagcaaaaccaagatagttcagctcctttgtaagaaaatcaaagtaagaagacgaagaagaacatacattgcagagggattgtagtccctaaaatactcaactttgacatcctccagactcaagttgcacccttctagcaaatttacaatatccgtcttcaatgtatttctagtaatacaaccagtcaattttgcatataatgaacctgaatatgtagaaaaatacagtgagaaaatctaaccgaagaactccacgtgaaattttcaccaggacaaactttttttttatttattattattaatattaccaagaagaccagcttaattactagttcataaaccctaaaaatcaaaaatcacaaaatccaattcctacagtaaaagcaaaactaaaatcaacagaataatcgtaccaggggctgaggttctaagaaaggaatcgacggcttggtcctgtgtctgctgcggttctgattcggtcgaaaactgccttgcggggaaggcgacgaagccatgcttataggtagtccgcaccgtacgaatagaggaaaattttgagctcattgcggttcgaaggagaccaagctttgacatttcaagaagcttcggagcgaaagaggttttcctcgcttagaagcttcggagtggtttgtgtggggaggaaggagaagactattcaagaaccattttacaggagaagtagttgtcgttttaaaaacaagaatttcaaaaactgccccacaatatactaaaattgggaaaatggctaaacaaattttttttttagtatttgcggcataaatacctattatttaaggtttttttttgaaacaaaactttattactaagctcttaagcaaaaatttcaagagtactaaaaataaaagcaaaacacaatttcacatatgccaaagttatagcataagagtttattaatttaagttcgacccatccaagattataaaaataatgtcttaattacaatcctttcgttgaaaggaaacaccatttgattccaattacgataatatcaaatgatttaaaataatttgggaaaatttagaataaatttagaattgtggctgaactcagtaatttttgctaactgagctgtttatataccttctttgtgaaggatcaagtcactcgtagtttagaatatggtactttacgaattgaatataaggattccggtagatgactacttttacaaatccttttctattcgaaaatttggaaaaattcctacgggtatgaccttttatgaaattttgagatttatattttatatcattttgcggtatcggtgactgcacttagtctcagcaactaagttgcctacgtatcttcttattggaattaagtcaaacgtggttctgaatttttattatttattattattatatttctattagtcttgtaattgttattttgttttaagaattttatgaatagtcttatatttacatttacatgtagattgaatagatggtaagaatacatagtgaactgtttattattgacaatggcaaagcttctatttggactcaaaaacatgaggaacaagacatatatttcgatggagatgaagagatttttgaagtaaaaatattattatacaaaatcgacgattgttaggacttttataatatttaattcaagattgaaaatacttgatatgtttattttattttgttatgtatggtcttgttggttttgtgttgtctcacaggggtctcataaaatagtcgatccaatccaccgcacgatccaatccgtaaagtgcggatatctgcacttgtgcggatt

SEQ ID NO: 224878 - DNA, 5004 bp, Cannabis indica
taaaaaatacatattaaagataaaattaattctttaagaagcaaaaattataagcatatattgtactcagaatcaaaataaaaataaataattaattaaatacactagatttcatcgtccaccttaataataaggtaacttagaaacccataagaaaattaactaagaaaagtgatagactaacactgagagctttgagctttttctttggatttttcattctgaaactgtattgaattctaaaattctaagcatctatttataggaacgtaaaagtactaatgcgcaattaaacttatttcaaaatatattgtgcaatgaggtttggcttcaattcttcaaataacaaaattgaatacgaatcaatgttagtaggattcagactcgccaaggatttgaaagttactcaactattgatttttagtgattcgtaattggtagtttttcaagtgtgtggagaatgccaagtaaaggggccaaatatggtggcatacttagtcaaagttaaaagctacctggagcagttacaacacctcatggtcaagcaaatcccaaggaaagcaacgtcaacagcgatgcccaagctaagcttgcatctacccaaaaaattaacatcccagaatccgtatcgatggagttcttagcctaaccaaccattaaaagagatcatatgttgtaagtatgaagggaggaaccctcttggatgacaccgtacactaagtacatccaagaagggatgtgtcctttggacaagatggaggctcaaagaattctgtataaagccactaggtatgtctttttaggtggagttttatacaagagagatttccccactctatttatgcattggataaaggaaagtgaagcacaattagtgctatctgagatacatgataaagaatgcggaaatcgtgcatggagatattcgatgtgcaggaaagtattgaaataggagtactccttgcctagtttggataaagatgttatcacattcgcaaggaaatgtgacaagtgtcaaagcaatgccaattatagcaggcgccctccagccaagctcacaaacatgaccaacccatggtcgtttgccatgtggggaatagatctaatcggagttttttccgacaggaaaggctgggaaaaaatacgatgtggtggaaatatattattataccaaatgggtagaagtagaggccttagttaacatcactgctaacgaggtggtatcctccatcaacaagttcttgatatgtaggttcggagtaccttacaagatcatcactgataatggaacccaatcaaaggggattcactaagttcctattgccttgagagaggcatcgagaggggattcccagttgtagtacacccccaggctaatgggcaagttgaggcagcaaataagataatcaaaaggaacctcaagacaaagttagacaagttgaagggtagattggtagatgagctgcctaatgtgctctaggcatacaggactatgcctcgctccaccataggtgaaactcctttatccttgacatatgggtgcaaagttgtactccccattgagatgaaactcaactcattttgggtgaagaatttcaatgaagcagcaaatgagaaggcaatggtgcaaagtttggatcacttggaggaaaattagatgtagcccaaatgaggttggcagtgtattagccaagggtggctactataattcaagagtttgcatgcatgcctttaggaccaaagacttggtgctaaggaaggtcctctcgtacactagggactcgagggcaggaacgttgggaaccaattgggaagacccctatcagattgctaaggcaatcccgccaaaaacctacaaattagttcgcatgaatgacacggtgataccaaaggcatggaatgcaaagcacttaaagaagtactattgttgaagaggagtgcgggaagtatcctttgtttatttaagctgttaagaatcaaggaggtagcccatgaggcaaccccattagtttcatttctttctattttttctatttgaaatttcaatgtaatgtaccaataggccacccagatggccttaagtttcctctttggaatgaatgaatattgcattgagattattctatcatacctggtcacgtatttttaaagtaatatccttcttccttgtaaaaaaaagaaagtagtagaaggaaattgggagtaaaactcaaatgtatagtgccatgaatgacgctacacattagggggcaaggggggagaaagtaaaaaaaaaaacttttctcaaatagaaaaaggactagctaatcttggcagacaaaagaaatacacttctccccacaaaagttgcctagccaaaagagatcttgaaagacactcatggcattatgctagaaagagagggatgcctttcaagcataaataagcattcacaagcacacgcaatagtgaaagtaccaattaaaaggttgacacacgttcaagtaacaatatcctcccttacatctgaataaaaggataagtaaataggaagaggtcaagactgctcaaagagtcaatgctctcccaaacaaaaaacctgcttaccagagtagggaccttacaagatcacacacacaaaaaaaaacaaagtagaggtatcagagacacgagaaataaaagataaagccttacagttatctaaaattcaaaatcataaattaaagtgaagttcgaagctcctggtgtatccgcatagaaaagaggtcactagttccactgcctgaagggttagtatcccaacgattcttgccttcacgtgatgccattccatcaccacatttagctttaaaatcctcaacaatttgaaccacaagggggcccaaaacgctgtagtcgacctcaggatttttcacccaattagcatgaagcagacactcaatcttgtcctcttcttcctccttgtgctttgatcttaagataacaaggcaatgacacatttggtcaatctagggtctaagttttttcagatgcacttgtgactttgcaaattacttctaagtttttgagtcagactttacattgtgggttgcatcccatcctcatcagcttgaaaacgatccacattcgcttagagttcatcgcgttgggtgttggactaggccaagtcatctagaggcttttgaaggtgggaaaaatccccctcacaagatgagctagagcttggagtacattgttgtagaacagaagcgtacaagacaaaaattgaagtcaataatttctcaacaaagtgttaaaatgcaatggcaatatatacaaatccatatgctacacttgagagttgcctcttagcgatcctccactgaagattgttgtagccaattcaattcacagggagtatactcctcgaggtgcctattgtacccgctggaaaattggctcattagagattgagatcaggctaacttgttaggaccaaactgtggctaaaggaaatcttcagcagagccgtacgaaatttggaaaaggtgctgagcattgaaagtctcaaaagaaatgttggaggtataacttgaaccccctaaatctatctcgtcacacgaatgacctttagggtcggcacctgaagatagagtataccgcttggggtcctgcatttcaacatcccaagctagattagtagaattgacaaattcaggctccgcaacataactttctcccttataatgagtgatagaggaagtatgttgagatctcaaagtaagttgagctggacatccccaggcaagatgtgacttccctacgcttgcacctatagttgctgaggatttggctcgaagataggattttcttgcatttggaaagcaatgatcaacccacctttaacgtcaaagaattaaaagcacgaggcctggctttctttgacttgatagggtgtcttggaccaaaaccaacaacaagaacaatccctttgtgtagaacagttgcgacttatataaaaccaggatcccattttacaaaatatttacaaaagtttcatagtgcataatacaaaagttgtcacctagcgactatacaaaataagcttagctgtcccaaagaccgtacgctccaggcataaccgccccgacatgtacaatcttcatctgctcgctctcacggctgctcaaccttagccttgcccttacctacacatgcaaacaatatatgtgagtcaacagactcagtaagaaaagaataaataatatcatagcaataacccggattatgatcaggcgcccatacatccaaccataactctaaccccgtgtccgatacggtactgagtctagaacgttcgtacgacaatactgtcgatcataatatcagtctatactcagtatgctagtcatactctagccttactgatgtgatagcatcgatcagtatctgagccaaacatgcatctatccgtatccagtataactctacgtatactgataccactatcgatgaaatctaacaagcttaataatcatgtacgctaaatatgtaaatacatatgcatatttttatactaatcttacctcgttaccgaattcaggtgtgccggccaacctgagtagaacaactgctcggcgcattacagactcctaaatcacataattcgtaaaactaataagtgacacgctaaatcacattttgggaactttaagttgaaactaaaagttttcctatcgattaatagcatggcaataaactaaatatttcaaaaatgggaaaaactagggttccctaaaataccccaaccgatagaccggttccccaacaagaattccggttacaggggttttttggggaccaaccggtcgaccagttcctataggtctgcctgaaccagaattctggtttattgcaggaaacacacaaaatctcactacaacctcaaatcgaccccaagtttcaccaaaacttccagacctgcctaatatacacaatgaacataaaccaagcaacaaaacatctcaacatactcagaataaaaaa

SEQ ID NO: 224879 - DNA, 5847 bp, Cannabis indica
ggggtaaaattggtacaatgtttaaaaaaataggtaaaaatgatagattttaaaaaagagggtaaaaataaaagagaataatataaaaagggtatagactgtaatttccttttaaaaatctcataacttttttgcacacaacttataacaaaattacttgaattttcaaaaaaaaaacttataacaaaattatgaaaattggggctggtgctgctgttggtctctgtagcccagcccaactatccggcccatcacgaccttcccctctgctctcttaaaaactctatatccgagtcggagagagaagagagagaaaaaagagggagagagaaatggctatggctggagaagaggaaaacagcgagttctacttgaggtactacgttggtcacaagggaaaattcggccatgaattcttggagttcgagttccgacccgacggaaagctccggtacgctaacaactccaactacaaaaacgacaccattattcgcaaggaggtttacgtcaccccagccgtcctccgcgaatgccgtcgcatcatcaacgatagcgaggtcattcacccttctctactattctattctattgtattcttctcaacatttgggagtttaagttttttcattttggttattgctctttttttcctgactagggtttttatatttggttcggagaaattgggagggggttaggatttgtcaatatttatgggagaaaggattggttgggtttagggtttgttattgcgtgtgatttgggttttaatttttgggaaggtaaattgaagttaaacattgttgaggttttagggccattgttgctcatgtttttagggttttttctgttttggttgttcagacgtgttaacttgattttgaggtgggattgagtacaaattagtaagaggctttgggttagggaagcgttgttatcttcagctaatagagttgaactgctcttgtctagtgttcagttatttatccatttatcgataatggatggatgttccgagttatgggcctcccaagttgaagctaagcttgcatcctagctattttgtaatatggtatgagtcaatgaatactgtttacatgatattaagaattgaaggaaaggtttcatttttctttaaaaaatttagttttaaggttgctcatactaaagttggggacaaccagccatgtttgctaagatagtttaggcaatggatacatttagttggaaaagagaaaagatacaattttgtttgttaagctttagttaaagttaaattgcggaagttttttttttaaaaataaaaaaagagaaattttagttgtagaaaataaagggagtttactttattcatatgttgaatgttgcaatgttacctagacaaaggttatgcttttgttgtcatcataaagccttgtagagaaaggtgtgaggttaagtcttggcatctctgttcctttaagcttatataagttcagtgctagctatctaatatggggggtatgtatggccttaagtcttttcgttttcatgtttttctactcttacatgccacgatattttcttcatcctgccaaacttgatgaagataaaaagcctaatagctctctagtaagtaatcagggaatatgatactcttaaactcatgctgtgcacactattctgaattttattagttgaggttcggtaggttctttacttatcttatcctattcccgctcctcccttattttctttagttatggattgaaattacatgtgaccttgtcttaattaatggttaccattttttttcttttttttttttttgattagatttcaatcacacacaaacatttatcgaattaccaacatttttttttcctttagatcttgaaagaagatgataacaactggccagaacctgaccgtgttggtcgccaagagcttgagattgttatggggaacgagcatatttcctttactacttcaaagattggatcccttgttgatgttcaaagcagtaatgatccagaagggcttcgtattttctattatcttgttcaggtcagatcatttaaacgctcctctaaaacttgaatgtaataatgttatttgattgataattttcatttgcggagcatgttctttaacttctgattttgctcaattgtgtgttagatgctgaaaagtagtttactgtttatttcatctgtgttatttttatctgaaagttattacaactctctgcaatctggtagagtagttgtcttgtatgagaattttgacttggatattcttctcttgtctctcaatgaaaatctggtagagtagttgtcttgtatgagaattttgacttggatattcttctcttgtctctcaatgaaaatctggtagagtagttgtcttgtatgagaattttgacttggatattcttctcttgtctctcaatgaaatctcaaaacttaatggtgttttttttttatgtgattgcaggatctgaaatgttttgttttctctttaatctcacttcacttcaagatcaagcctatataaacatgggttgtaatgtctgtctgccttacaaatatcttgagaatttcattttgtgcctgtactgcaagtaggctttagttgttttgaatcgtctgcagatgtatttcaatgggttattttgtgttccattatttgattgtgatttgttgtggttcatgaaacttagttttgatatcatctctcagttgatgtggtaattgagaagcctatacggcatttatttatgcagcacccgagccttacttcgataagactcatcaaatagtgtatctgcagacatttaaatgggttctaattcttacaactttatattatttaaccaactataagaaatcaaccaatatatatggttacgttatttttaactgaaaataaaatcaaccgtgcatttccctttccattcaactgaaaaaacaaggtcaggtaataccaaacaaatatattgcaacctccagtccacgagatctcatgtcatctatatccatgaaactcatatttaaatgttttctcttttggtctgcacaacaacctaaaaagaaatttagatcccagtttcgaaactaaatctaaatttatagtgatcaacatacgtgtcctgatcttgacagaattttggtttcttgaagaccttgcgattcaacctatagtggacttgattaagaactataataggaagaatgcttcttcgttgtgctttgaagatttgacttgagtaagatttgaagattccacatagttggaggagttattaagaagttatagatttccaaccaaattcatctactattatggtttatctgcgggatacttcctatgttctcatgatgaatggtcggttacaaaaagttttcaagggagctaagggactggtaaggagaccttatttctccgttgttatttgtcttggtcatggagtattttactcgaatgttgcagtatggtgttaataatgagtttagacatcatcctcattgtaaaaatctcaagattattaacctttattttgcagatgatctcattattttctgcaaaactaacagaggttcggtgacttgtgtaaagaaggtctttgaggagtttagcaatagcacggggctaaaagctaatgtaaataagtctccggtgttctttgggggaatttcaaaggaagacaaggttgccttacttcagattttacaaattgaggagggggaatttcctcttaaataccttggtattcctatgagacctacaaaatagaaagcggaggactgtggggtcattctcaagagaattaaaaaccagctgcttacttgggaaagtagacacctctcttatgctgggaaatgtcagcttattaactttgttcttttggggctgagaaattattggatgaataacttcttacttcctcaaagtacaactaaggagattaataaactttgcatgtggtttatttggggtaacaatggtacgaggagaaatctccatcttacttcttagactaatgtttgcttacctaaagatcaaggaggcctaggatttggtgaaggctccaagtggtacaaggctatgatcgctaagtatatctgggctattaatcatcaacctgaatctttatgggttaaatggattaaccatgtgtacttaaaaggtcaaagattctgacagtaccaattaaaggttgacaaaagttggtattagaaaaaattgtgcaatatttgaactttattttctcagcaggaagtggaggaagctacctgtaaagggaagttcagcattaacttgctatacatgagcttcagcagtggagcaaaattcagattttaaaaattgtttggaatagaattgctgtgccaaagcaccggttcatttgctggcaggttatgaataataggctgctcactcgtgatcatcttcagcaaattttacagattgacagcagcctttgctcgatctgctgcaattcaaatgagaacctggctcatttatttttttcctgcaatttttcacagcaggtattgaagcatgtggattggttttaactggccggtgatgatagagaattggagatcttgggctgaaaagttgaacaaggatgtcaaaaatatgattgctgctaccattttttcagcaaccatgaattatatttggcatagtaggaatacttgtgtgtttaatagatatacttatagtgtaaaaaaaattgtagatatgattaaaaaggattctaagtatagatttagcaattttgtttttaagaagctaaaaggagaggagaggaatttgttgatgaagattgactcattgtagctttcttgttgttgctgttctcattatctcctgtgatatagagtagtgttatcatgaggtcaaataaatccacgtaataacaaactaactcagaataagaagaattttttaaaaaaaaaacaaacaatgatcattgctgattcgtgtgatgattgttgtgtaactttcacagcacaaatacgaaattgatataattttacaagagaagatatatgtagggggaatgactaaacatatattctgatatgtaagtaaaacactcttagcttttgaaaacgaaaccctgcataatgagacaaaacaacaaaaatttatatgtatatatattaaaactttaaatattttttttagtttttttaatttccatgtcacaaaagattgtatatacattagtttaaattggtgtattgttgaaactttaacatgtgtatatttattgtgttggttaaactttaatatactatttatttatttattttattatagtataaactattaataccacatcatattttagcaattttatttttacggttttgaaatcttgcagtgggctcgcaatgtgagataaaaaatttcatgtgcgatttagttcaaaaaaatagtcaaaactcacactgtctgcactgtgaaaaccttaaaatatagagttaaatttgttcttgtaaaatttaatgtttgcaaatattaaatttttaatatttttttatatctaaatagaatttttaataaaaaataaatattttttaaaaaacatttaattagttttaacattttaatttttttaaccattcaaataatttttttcaaaatctaaattaatttttaagatttactaaaaaaaaatgtttaatcttacacatttttattttgagagggtaaaatttgatagttgtcaaatttagggaataaaattattaatttacaaagacacgtcatatttaaataaaataatgagacgaaatttaatagaataattaaatttctataaatgtaaaagttcaaaaaaaaaattaacaa

SEQ ID NO: 224880 - DNA, 2486 bp, Cannabis indica
tttggtgtaaaaatttctaataaaaaaacaaaaaataaacttataacaaacacggtgcaaaattaaaaaaataccttgaaatacttataaatggtaacacaattacccattaattattcttaaatatatatgctataaaataattaggaaataagtttcctcaaaatatgaatataatgtataaaaataataatcacatcaaacaagaaaaaacttttatagtatttaccaaaataaatatattaaattaatcatgaaaacaaaaaagaaaaggccaaaactaaaattgtggtattaaaatgatataaatatcataataaaaataagtagaaaaataaataaataatcataacaattcttaaagatacgaaaattcaaaataatttaccgcaacaatgtttgaaataaaataataacgaaagaacatcatataaaaagaaattcatataaacaaaaataaaaattaaaataaaatatctcaccaaattaaaaatatacttctatcacaattataaataatacgaaaacaattccccaaaaaaaagtatgtatatataaataaaatgcctattgtgtatagaaacaaaaaatatggtataaaatgttcgtacaaaaattaatacaattaataatgtaataatagaataattaataatattaattttttttgaaaggaaaattaaactttattaactcaccaacataggcaagagctcagtaggaatgttttccatactaaaagtacaatcagaataaaataaagacacccttgcaaattcatgagcgactctattaataatattaacttagtccaccatttatggatatttttttgaaatcacaaaaatttaatattttttttttttttgatttaagcgtttatatattacaacatgtttttacctgggactcgaacccaggacacaaaaatttaatatatatataaatttaattgtataaaaattacataaaatatttatgtcgagattttcgcaacaataaaatcttcggcgtgaaactcgcacaccaccactactattgtagagctgcttgaaacgactaccactctcaaccatgggcgtcttgtgttattatcttctccagtcattagcaacaaggatggatcgaaaagtatctggcttaaaagggagaattaatcgaactaagaataccaaaagtgaatattttagtttgtgatctgaatgtaaacaaaataacaggacatagtatagaatatagaaacaaatcatctctatatacacacaaagaaactaaattacttggcaagatggagagttaaggaatagtaaattcaggatagatctcttattttaaatttatttttattccaaaaatagacgaataaatgtatagatctccacttattaaaacatattaaaataatttatttttaaaaatatattcttgacacttttgtaagttttttatattttacatcattatttttttttgataagattcttcaaaataaaaaataatttgaatagtttttacttttaacttataattttttttattaatgtacaaattttcattaatcaaacatgcacattacaccaaaggcataccccaccatcctccaacctaaaaaataaaatctactaaagaactatgtatattttactagcttcacagtttctctatcttttctagacaaattgctctcattaagaaaattaacattggtcttgttattcgtgtttcaagtaagtgacatgtcgactcaaatagaaacttaaagcctattagtgagcccaaataacataaattgggctaagcccaaatgttatctggccttctggtagaacaattacacgtcttgtcagatgaaagttacgtcaagcctagttaacatacaaaagagtgtcaactttgtgtacctagaatgggttctcagtgtgtatccaaaagctggtctcagttttccatttactgctcccaacagaataagggatacttttctaaaatcttggacaaagtatattattctgcctaaaaaggaagactgaataaattgaagattaagtaattaatatcagattaattacccacgattataggacacgatatgaacaactattatgtgattagatctccacatcagcatacacatgttgctcttgggttgggcttcgtcagataagcccaaatctatgaattatctctaaacttccccttaaagggaaagggtaactaagtagggcctctattactcaataaatacccactaaatccttcatgcaaaaggttgtaaattcttgactaacttgctcaacaagagaataaagtgctcatactcattgtaatcccttaaacttttctagccaatttcataataatactgactcatggactaagactccttaacgtcctaaccacgtgaaatctctgagtgccttcttcatatttaattctcttaattgcattttctttaactctaacattaaataatttgttttctaaaa

SEQ ID NO: 224881 - DNA, 4466 bp, Cannabis indica
aaaatatattataattaaaaaataaattaagtagtcaatgaaagtctagatagttattgtctatttgcttgaagtattttttatgtaaatttttcttattgtaatttgataaatgctatggtgtaattttttttaaaaaaatgaacataaaagaatctaaaagaaagaagaaaattaaaatataattggaagaataaattttaaaaataatatttgttgatattttttttaatgaatttatgttgatgatttaaaaaagaaaaaaaaaattatgttgatattgttaatatgaatagttttattattatttatgtatttatttattttgttaactgttatgttatccatttcaaacttcaaagaaaaccaattcaaaagaaagcattcagttattatcagtcttaacggtcacattaaaagcgaaccctcaacggtcaatttagtttgaaaaatgtgactctgttcttcacaaaacctaaaaatatcagtcgactctatcttctttgttttcctaacattctcattcttttacttggacataatttgggaacggtaatggcgtccatgaaacttgcagaatcatcaaaagtgagggtcatagtgagagtgcgtccctttcttcctcacgagagcccccaacagaacccttgcgtgtccgttctcctcgaccaggactgcgactctgcgcaagatgtcactgtttttctcaaagataaagaaacaaggtgaatcctttttctttttcttttcttttttttgtgggatctttctctatttcttttctgggtctttttattcattgtgggttttcgtttcggtttctatttttgttttcagccggaaggagtgctacagattggactcgttttttggcgaagaggacaacaatgtcagtcagatctttcacagagaagtgagccctttgattgagggaatatttcagggatgcaatgcaactatatttgcatatggagctactggtagtggaaagacctacaccatgcaggttttcaatttcttcagctcatgactaaatctttctttaaattcttcatattgggtaattgggtaatcataacttcattttatcttggaacttatgttttctgaggcaacttggtagtattttgctttctttgtatagaaaacgatcaaaaacttgctgaagagtgaaaatttgaacgaagtgctcttttttactttgtaatgttggtcaaattataattcgtgttcagggatcagatgagcaacctggtctaatgccgctggccatgtcaacaatcttgtcaatgtgccagaaaactggacgcaaagcagaaatttcatactatcaggtctatttagataggtgttatgacctcttagaacttaaagcaaaggaaattgctgtgtgggatgacaaaaatggacaaattcatctcagtggactgtcacgggtctctatagcctccatggcagaatttcttgacgtattttcttgcggagttcagcggcggaaagtagctcacacagcattaaatgatgtctctagtaggagtcatggtgtgcttgtgatctcagtttcctctccttcagtggatggctccggagatgtccttataggaaagttgaaccttatagatttagcaggtatttattaagttcaaaaagtaattaacaaagttggagtctccctttttgtcattttcttttcttttttttaatcttaggaaatgaagacaacagaagaacttgcaatgaagggattcgtctccaagagagttccaagatcaaccaatctttgtttgcactgtcaaatgtgatttatgcactgaacaacaacaaagccagggtgccttaccgtgatagcaaacttactcggatattgcaggattctcttggtggaaagagtcgagccttaatggtggcttgcttggtaagagattgaaaaagaactgttacttcaatcttatatatctgtaaaaaaatggtttcaggaattgaatactgggatctttttattgtttgtaaatagaatccaggagagtaccagcaatctgtccatactgtgagtttagctgctcggtcacgaaatatttccaacattgttccttcaactaagcaagagactccaaacattaaggtcaacatggaagagaaattgcgtgcttggctcgaatcgaaagggaagtcaaagagtgctaataaatttggagctcttaattctcctttcatggggaaaaattcaacttctgttaagaaacctagtttctgtaatagctctttgaaagccaaagttgccaccaaacgtggtgcctataatgaaaacgacagagaaaggtattagattataaatttttatatatatttgatgatcttatctaatcattgatggtaatttggtaatgtttatgcagaaacaccgctgtgcctttcactaacttgtttgatgaggatctacaggtaagatctaaagtccattgtgttttactcatcaaatacattcagaggttgaatttctaaatgtttctgtcatttttaaggaatattggtcaaaaactttgaaagaagaaaatttgaaaaacgactcaattcccattcgcggagatgaaaaagaggagagagaggaaggcgctcatgggattgtaacagaatcaagtaataaacatttgccaggtacttggacagtttgaacatataaaataataaaaaaaatataaatatcaatttagcattcctttttagtgttttagtgttatctaattattgactgtgtatggtatatgaaacgtctaacatacatttgttcaggcgagccattaaatcaggacaagagcccggccacggttgttgcatcttcacctgtaagtgggaaaaaaaacacattgaggagtcctttgagaaatgttctttttcccatcaacaccaatataagtcaaaacaatgccaaggaattctcgttcacagaaaaaccatgtgacctttttgagcctagtactccaaaaacaccttcaattttcacctgtacaaataccagactacaaaagattgcaaccccactggataagctgaactctcgaggttctaatctaaaggttagtgcttaaaatatgtcaattctgcagcctcttctaagtcaattctcaaaagtatttcctcacacataattcaatgtgcaggacttcctggctcaagagtatgtccatttcttgaatacagccagcaggtatggttcactttacatcattcttttctattctatgcatcatataatctaatctgcacacaccatactaattagtagtcctaactggtttctaattatttccagggatgagttgctggagttaaaggtacattggccagcaatgctggtgtaaaaaaccatcatttgaaatgactgatttcattacattttgtttctctttctctttagtattttgactgttgatggtttgtttatgataggggattggggtaaaaattgcagagtacatactagagctgagagagacaagtccagtaaaatcggtaagcaaagtttttcaaatatattgtcacctttttgtgaatgaatactgaaatagagtattggatttgttctgtttcagcttaacgatttggagaagataggcttgtcatctaagcaggtaattttcactttatgtacaacatgtgttttagacccatattattatagtatagagaagataggcttgtcatctaagcaggtaattttcactttatgtacaacatgtgttttagacccatattattatagtataataaataacctagcgttgtttctatatgctatcttttggtaggtacgcaacttgtttagcagagcaacaagggcgatatttgagacagagaattacaactactagttgtttattctgtaaactggctatggtgtgttattgattgtgttatgaaacgaccatccttatccttatccgtagtactattgctgttgaaatactgtaacttgtgaattgatcatcctcatcggattagatgattattctagatgcttgtaattctttattttttttatctatttttctttttggatctaacagatgtttttaattctttattgtaaaatttgttctccttgatattctaagagagcttttaggttgtggagaaaggacatgagtttagttagtgttcactattattattgtataaacaagtccaaagttcaaaaaaggagtcgtcattttcaatttcccttcaattatttatggcccatgtgagactgatataggcagtatggctaagcctaataaaaaacaacacatgtaaagccaagtaaacgtgacgaagtccgttatcttcatcactaaagtctccaagaagtaccaaaattattgtatcaaccattatcttcactttcacactttcgccgtatcttctttttcttttcttttttaaagaaatagtgcactagttaccttatttcatttgagtgatgatat

SEQ ID NO: 224882 - DNA, 3089 bp, Cannabis indica
attgttgttgcatttggtgcaggttgagagatttgcctgcctgtataccagtcaagtgtcaaacttaagcttgtactctccagacaaatactacagacctagtgaagactttatgcccccatgagtttgatatcttcatgtgagctatgtttggttgggaggaagcatgaatgaacatagacctcttttacaataatgaaatttaactaacatacaaagccgtgggtttaattagcagctgaattgtccattccctctttgcttttagttttagcccaaaaactggcactttgtaatgtaagactgaaatctcagtttttcttttcaacattaaaatgtcggacccaactttttaattcacattgtgaaaatttatgtatttattgctctgatagaggtggtacggtttaggtaaggggtacacacactcttcttttaacatttattacgatgataaaatttcatcattttcagtccacttgacggaagagtctgaaaagactacaaaaaatcttcttggtccttgatattttttttttattttgggtaagtaactatacacactttttaaaatcagtgattcagtagattttctttttatttcggtatttagtgtggatgacaaaattccttttaagagtgtgtgtgtaactcatttttttctttatttttattttgttatctactagaattggaaaatttgacatcctactatccacaattaaaatattatgctaaattgtttacaaaaaaaaaaatatatatatgctaaattgtattagaaacaaggtcttttagttttttttttttttttgtaaaatgtgtttctatataagttgtcaaaagtgtccctcccattcaaccaaccgtctttgtcctctccttttctctacccacagccattaaaggaaccctcaaaagtcaaaatctcacccattcttcttatgtcctcctcaccgtgttgtttttagtgttgtaaatataggttggatttttttgaacatgacacaaattcaagagatatgagcacgaccaaaaacgaaaaaaaaaatataagcacaaacacaacatgatactataaattaacacgacacgatacgatatataaaatatgaacttaagcacgacacgacaagcccaaataacatagcacgttaaaaacctaatgctttgataatagtaataataataatatgaatatttgcttacaaatgcaagaagtcgatgacaattgtatgtatttgggtatacttaatattatgggacagaataaatcagtagttcttggttttttgatagaaagagttcaaaagaatatacaaagttgggacgctaagtttccttcaaaagttggtaaggaggtgcttctaaagatggttgctcagtcgcttcctaattttgcaatgagtttgtctgatgaacaagtattggtggaaatcttcatcgaactcggagtcttaaggatatttaatggatgagttgggatcgattgagtgctcataagttgaaaggtgggatagggtttcgacatctgaggaattttaacttagcattattggggaaacaagcttatcggttacttacaaggttgaattctcttgttgcccaaatctacaaagctaggtaataatctcatgagtgccaatccaaattctatttggaggagcattttggagactcaaagtttaattaagtggccttcggaggagggtgggttggatgttgatgttgggattttggagggtgcatggctacttgataattcttgggttacttctcatcatccaacactaatcaacaagaaggtggtgagctttatagtttcaggacggtttaaatgggatgaccggatgagaaggtggtcaggaaccttttcaatgatcaagatgcaacactaattttatgtattcctttctgtgagaattatttggaggattcgtagttttgggaaaaggaaaggtctggatgtaatactgtgaagagtgtttataagttgattcaagatgctagggcaaatcaaggtaggctaaatagttccaaattttgaaggaaattgtggatattactaaaaaatgagtgtttgttagtaaatagtcaaattttaataattctaatgctatttttatttgattatctgcaaaatattactaaaaaattatataaaaataattgaagctataaaaaatacatacaagttagtaattatcttattaattgtaaaaataaaatgtgtaaaaatagagtacaaatttgagcatttataagaaaataagacggctcaagtaaaacttggtacaaattcgagcacaatacaaaaatacaagttccgtgctagacctacttttaaaaaatagtacgatatgacataactcatattttttttatatagcataatatgacacaacccatattttttataacatgacacgacatgacacatatttacatcacattccttttaatgttttcatgattaatccatacgaaataatgttttaatgattaagatatcaaatctaacttcgtgatacgattgtaatggagtaaatactgtattttgtataattaaatttataaaagtatataaaatctaaaatttaaactctaaaaaaaaaagttatacgatacttactaatttatataattcaagcacattatacatgatttattagtttgttcgcatatttccatttaaaatttaaaatcagcaaaattttgcataaaaatgataatttgcaataatctcataaaaacttaattttggagactcaaagtggcttatggtcctaaaaagttgatttttaaagacaaaaacgataccgaaaagatacaatttagatagtgaaatagaagtgaaatgttctaatcacaaaaaaaaaaaaaaaataataaaataaataaataaataaattaaaaatgacggccttatggcttatacatcgaaagtagatttttggaagtccaaaatgatgcaataaagcaatgttgttgtttgaatgcaaaatttaaaaaaaaaaattaagtggcgtttggtaatacttttttaattagttttttgtttttaaaattataaaagtaaaaatattttt

SEQ ID NO: 224883 - DNA, 2869 bp, Cannabis indica
ttgtttgctggagaattttatccatttaaaggcaatgattacgtatgttcaaaagaaaaaaaaaggcaatggtcacattgcaagtgattaggtgagtgtgtgagtggacctggttcaagtacctataatcaaactgttcactcatgccaatcattatttgatttgaagcttaatgaatatgagacatttgcaagtagtaatgattacgacacacaaagtttactctcaaaagttacacccaatggccaataatgtggcttaatttttaactgatatgcatatatatatttaaattgaactgtaccatgttcattgatggttagtaacgcgccataaatcgttaattgagttctgcatgtaaatttctgtttgtaatgtaagttgtgagtttaaactgtgtttctgagattataacttattcaaagttaaaccaagttgctccggaccaactatttggtttattttgtgatattatggatattacttttgtccttgttttggttatccttgcagaaaatggagtacaaattgtttcatgtggctgaatattttgctttactgtcgactgttttagaaacaccactagatctttgaagctatcagaatttgaccagtttatcacttttacagtgccgccttagaggaaaggtagattcaaatggctgcgtggccgctttcctggaagagcgattaaatatgggtcttaatttcattctttctgctgaggtgaggataattgaatattttcttcctcatacattattttcaaggttccctgagaatggtagatttttacaattgcacataataacagttctatatcgacccagggcaggcaattagtgtttagataattccattaacaaaatgttgtgggtttattatggtttgcagctagatcacagaaagaaagactacaagtttgggtttggattgactgttggagaatagaatggctggacctaatggtgttcttttttctatttttttttccgccagcaacacaagttcttctgccttgatttttcatgtgttgagttagattctaagtttgtacttgtgtaattttggtaacattgtttgtgggcagcatttgttgcagtttctctgttagcagcagcaaatcacggattttgcctatacagttgcagaattttattttagaataatgcaaattggattgtttagcggccatattcaccttcaatataatatagaatatgaagtctatttattaatacaagagatatttattctgttttgtggcttttcaacaaacttgcctcaatccaaaatctcaaacgactgtgtttttgtaattggaacaaatttatggttatatatttgtagaataaattggaattttctttatgatttttgtagggttttctaaatgaataatgtaatttttctcaccgaattataaatcattgtaatgtactaatgttccaagttatagaactaagggcacgaaaactaggaaggaattagtgtaattggatgtagttgtacaattttataaaggaattattggttgtaatttgaggtaattgtacagtttgatttgtttgtctatgtaattacaatataatatgagaagtttcaaatacattctctatataatatttgtgtaattatacaccaaaattaatttaatagttgatataaattttaattaattgttgttaattgtctttttactttgggataattatattattgactcattatttgctctcataccaattgtaaaattattcaaatgtaaaacataaagtatgattgttataaaaatactaaatgaactgtaattatattgaaattgtatatatgataaaggaccgaaatatctgagttattgattatttgagtttcaattccacgaactttgaatttataaaaaaaaaatcaaaattgacgttaagtattcagactttcaatttcaagccctttcttactctcttacaattaatttaataaatttaaattaggtaactaaaatatttaataattaaatagtgaacataattaaaatatttatactttataattagaatatttttaattagttggatggatttttttttatctataatgtattaaactttaattaattatttttaatgaatgttgactattttttttatataatgaatgttcatttgttaaaaaaaaaataatgaaattaatcctaacaaaaagtaataacaacaaccaaatcaagctgtaatatatgaaaattaaataaaaattaaaattcttcttcttcttctcctccttctccttcttcttctcctccttctcctcctcctccttcttcttcttctccttcttcttgaacataccctggcaccgtgtgtggtggccggcagtggtcaatgaccttgcatgaatgattgtgctatagggactgaccgtttgggtctcgccaagagaggaggcagagcgagagagagatggcggagcaacgacgtggttcgtgggtctcattgtatgggtttgggtgtggcctttcgcttgcaccgcgagaggggaacaaagagagaagggaagcagttgggatggatgaagagcttaaggtttttttttttttttttttttttttttttctagttcaaaagaaggaaagttttaatttttatttaatttccatattttaaattattttattttaagtattaatattacgtggttcaataaaatttcactacatgtatacttgtgtagtatgtctatttgacagttaactgccaaaaattaatggaatgagtgcaaaccaaaatgattgtgttggttgaggattttagctataatttttcaagtatgaggattagatcgtactgaacttaaaagtacaaaaagtttggct

SEQ ID NO: 224884 - DNA, 5436 bp, Cannabis indica
ccataatgttttattaaaggagtttagattaccaaatagcaaaatttctattagaagtgaatattgtcgtccattagtttctttagtttttctgttttggaatttggagtcacgttatggtgtccgagtttcatttttttaaggaaaatctattcaaattgtatattaggattgtgaaaaaagaattagaaaaaattaacttaggtcggcatgaatgaattgagtaaagtacaggaagttggagaagagaatcaagggagtgacacgtggcaaggcacaatgattggagttggcgtaagaatcgaatacgtgtcaagctaccatatcgaacacgccatctcttacccttgctctctccactctggagacccctgactttccagaaacttccaagaattcctggctatcaatgctcgacccatctacgggctcacgatttgccacgtgtcactctgcccacaaggctcgtcctacttggcatccccgtttttctgaaaatgatacgccccgccctttatgttttatgtttttttttctttttaattttattattgacaatagaccaaacgattagggcactttcacaaaaaaaaaaaaaaaacttaagaaagcaaaatccaacaatgaacacagtaaccttaggctttttaaccaatttctttgtctctctccaaacagaaaattagcagagcaaataggagacacctttgagagtcttgtaaagtaaaactgtaacgtactgctttttgaattttttacttgtcttatttttttcatttaattcacgccctttcgtttcattttctctcctatctcggaagaaccgccatgaatggcgatggagataaggatagagatcagggaatgaaaatggaagaggctagtaaacagagagttgtgtacatgtgcggctaccttcccggagctttgccgcagaggtcgccgcttctttcaccgacgaccgtgcgtctcccgccgaattacacgtggatggatgttagcggtggaggttgcggctttgctatggccatttcaggtgattacttccatcttggcttaccgtgattttgactgtcttttatttggcattacggttttatttttgttttaaaacatttaaaaaataaagttgatttgattagcttagcttagcttaggccaataagcttacaacactgttttcttagactactttgtccttttgtttgttctgccagaaaatgtgttattattttttttttaaaataagctggaaaatacaacgtttttattctctttggttgtcatgaaaacgtcgaatagaataaagtttatttcttttcttttatttattacattaactatcacaagagaatgaggttggggttgaattgaacccatgacaaacaactaaggcaacgcctagaagctataaccacaagtttacttctgttttagtttgattgtgtttaatgatgtttaaaccttaaaactttcactttttctgtggaaacaattcactctttactttttctttggttctgttttatgtgtttcgtagttgggctcttctattgacttaagttttgttcattaagctcttcgtttttgcctctttagaggtgcggaattatagtcctcataaatgtagttcatcccactttttatctccttataatgcagtattgaatataggatttctaaggtcagactgtaatgttgcacccctttcttttgttcaagacaattttacttgttcaagtttcttctgatggaatctattgcaagcaacctaattgtgtttatacttctggtttggtgtctaattcagtgtctggaaagctcatcacatggggttctacggatgatctgggtcaaagctatttaacatccgggaagcacggggtagagcagcattacacaatgctgaattaaattaatttattttacttagttgttttactgtggaatttaccatgcttctcaattcacttgttaaggaaattccggagccttttccccttccaaccgaggcatctatagtaaaagctgctgcaggttgggcccattgtgttgcagttacaggtaatagtaactccttactcaatttgacagcgagttataatattgtcagggtaatgattaaaagttatgtgaacaaacctgggcatgtatttattctgcaagtcttgttgcggctatagagacacattcctgcatttaataactttttctacttttctttgataagtatgttccattaaaagagccaaggggttgcaaacaatgtagacaagaagtttacaagagaagcaccttactcaagtaattggtttttcaattgcatagaaagaaaaaaaaaacattgtttatgttttatcaccttttactgctgttctgtttgatagagtcatcgcttgaaatgtaaggttttcttgtgtgctttgatgcagatagtggagaagtttacacatggggttggaaagagtgtgttccctcaggaaagatcattggagataaagattcgagttctgagaagaatacccttgaaaggcagagcccttttctgacagatcaaggttgcttcaattacaatttgacggttaaaataaacatgaaagaaaaggaatttatatgtataaatacatatttatattttcaatttggctgcttctgataacaatgtgtaatatgcctttcgtcatagactaatgtattttagggtatgtcatttggtttgtacagttagccctcgttctctgggtgagcgatccagtggaggaacaggttctggtaatgatgctagaggaggtggagaggaaactaccaagcgaagaagggtatctgcagcaaagcaagtagctgagagttctgcatctggggatgaaaacctttcggccttgccatgtcttgtcacactaaatccaggaatccgaatagccagcgttgctgctggaggacggcatactttggcactgtctggtaaatttatcacgttttgaataaaaattgttgttgttgagctactgatttgttgccatatggtatttttcaacaatataaaggagaagttggctagatttatgagttatgctaattttcactaagttgcagatacaggacaggtgtggggttggggttatggaggtgaagggcagcttggtttaggctctcggatgcgcatggtatcctctcctcatcctgtaccttgcattgattcatctccttatggaaatgacagatccaatgctatctcccgtggaagcttgggcgaagagcaaggttatagagtgcctggaaattacgtgaaatcaatagcttgtggagggcggcacagtgttgtaattacaggtgacagagcaatattttcttaaataaaattgtgggcattaccactttcttcttaacttctccaattatattggtcagtgagtttcattagaattaaaaatggtttgttcttggaatttgaagtcaattgaaaaacaattagaaatggaaaaagcttgaaatatttattttaatagctgaaaatttcatactgaaagttgtttatgtaatgttaaaaacaaatggtatttctgcattacagatgctggagctattcttacttttggttggagcctttatggacaggtgaattacgctagagcatttgtttcttattaaagtcatttttcattatttttattctttattttgttcatgttaagatatagttaaggctattcgaagttcactcctcactctttctcttagtgcccttaaaaagtgagcttttgctaattttctttcatcagattattttctatctcaagcttttaataaatggtagacaattttagttgtaatgactgaatataaaaaaaaaagtttattgagcgtatttgattattttgtttggagtaattggactttttaaactttggggttggttacgtacactccattgaaagagtcggtctttaatttttctttcttttcttgtaatctactgtatttttgatacacaatgcagctgtgaatataaaataaactagtttgctttggtcatggtaaagtttaagaatggaccatacatcaagtgcttattcaattgaataccaatctaagttgcttctgttctgtttacttttttttttattgcataaccatttatgatgagcatggaaaagaacctcatccagtgtagcctcaaaatatgcaaacacaatatgtgtaaaatatgctccatttcctcactgccatctttcacttattaatcgttatatcccctttgattggttggagtttcccatattgactattctcagattaatatgtaggtaaagtagaattggtggagaaaaagcagtgtagatatgcaagatgaagttcatcaacaaggaatatatctattctgttttctgctaacgataacttttcactctgctggctacttgctgcgtgttttgtttaattgttaattataacttacttttccttgttatgtttccttcaagtgtgggcaaggatgtacggatgatgagttgagcccagtttgtgtttcttccttactgggtattcggatagtgggtgttgctgcaggactgtggcatactgtctgcatatctgctgatggtgatgtttatgcatttgggggaaatcagtttggacagctgggaactggaattgatcagcccgaggtagttttctatgatttttagtttgcactcctatatattaaattctagtggcagtaagttcttggaaatcttgttaagtatatattagttctgcatttttatgcagtgtaagtgtagaatgctgatacttgacattaaagtttttctatccatcttctaatgattatttacttgtgtttatatcgtaaagttttgctgatagattaccttgcaacattttttttttaatccagactcttccaagacttcttgattctccttgcttgaaacatgcatgcaaatattgtctcttgtggagctcgtcatagcgctataatcacaggtatgtagatataatacaatcgtgaattcaacactccaccattgacatatgtcgtgcaaatttgaaagatcagattttgcgtgaaactagaaattttcatcacaccgtataatgttttgattttcaaatgttcgcataatattataatttgagttcagaagtttgaaaacgtaaacttatggttacaggttgatgcttactatagtgattcttacatcatgatctttttcatttttcatctcagaggatagcaaggtgttctgctggggatggaacaagtatggccaggtatcatacccaggctgatgtactaatcaaattagggccatcttatacgagccttggaaccttttttcagtttagtttttatattaacatatttcttgaatgaatgtggcagcttgggttgggtgacgccaatgatcgcaacattcctactgaagttaccat

SEQ ID NO: 224885 - DNA, 9530 bp, Cannabis indica
cacataatcaaaaataatatttaccttttataagtgccaaagaagctagttttccataatcatatacatttattttaattttttactgtaataaaacttttatattttcttattttaattattatacctcaatatataatatatttcattttaaatatattaggatatgtgaaaaatagctcatgtatcatatctataatttaatatcacttattttaccttaataaataaaaaaaattattaaccatttgtagatgctagtagaataacatagcaatttatgtaaaatgaaaatgagaaaatagggattttaaaagttatttttttgcactttaagtacgacatgtcgtataaaggatatcgtcgtttataaaaaatatacgacatgtcgtataaaagttatcgtcgtttatcaaaaaatgctactaagattattgtacgacatgtcgtataaaagctatcgtcgttttccaagtgaatggcgggaaaatcagagactccaatacgagccggcggcgatttttcttctaagcgaaaattttagaagaagaagaagatgggatcatggttccacccagatatttcattggaggaattgatgaaactgataaaagggttcgtagatatactcattctcacatctgggtatcaatcttctggtcgtattgctcactgggatcccattaacattaacaaagcttttcaatgggctttcttctttgaaaatgtaagaactttctatcatttaatgttgttcttcttttagttttgttgtattgaattcttatactttcatatgaattttcatttggggtatgcttcaattttctgtatgaattataatccttaggaattagcttccaacaacttgacagtaagattgttatgttggtttagaatcggttaagtttgttatagttcaagttttagtcttttcttttcagctttgtaagtaaaaatttagagtgaattaagagagagtaagtgagagttgatagcattgtaaagtgagagagagcttgggaaacctgaagtccaagatcagtgttcttggtgaaactctagctgagcttttttgggaggggttttctgtaaggctcttggatatgcacttgactggttctcagcattgtaatcaacattttagaatttgtttggtaccccgtattagattgaattatattaaaaaaatttatatatataatatatcatatttttgtataaaactatatgaaattttgatatatatcacaatatagaaacatattactatataaaaatatcaaatatatacgatatataatatattgtaccaaaatggactcttatgaacgaagcaacttaagggagtaacaggagtaggtcctttgtttggctgaaaacccgtataaaaattcttgtctcatttatttttcagttttgcattttagttttctggtttttattgcttgttgtttgatccattaagttcttgtttgtttgttgagtttgtgttgtatacatacaacatgtactgtgattgaaacttactatgttaataataggtcttgagaactttgagctgcttggacaatcaccaggaatctttgcaggaacttgatgcagctctatctgaattgacatctgatgtttcttttccccaggtaatatatatttttgtacttgtgcttgaaaattacattattagattacttgaaagtttatgtaattgtttggttttaatatgaaaaaaaaaaaaacagggttttacacatttatcatcagcaactcttactatggcaagagggtttttagtggaacatttcatccatgctttaccattaagagattcacatcttagagcttttttgatggcaattatcgaaatgatcttgatgagctctcaggagtagagcatgatcgcttaagtgtgtatctgaacaatttgaagctgcaagagacctcgttttcctctgttaagaataggatgttttgtgatgaagatttaatttcctctccaaacttatatttggatactaaggaaggagaattaaagggtaatagtttcactaaatatacagttcagaagctactgaagaggtcgtctgcagtgtcaaagatatccacgattgagagtggcttagagaccatttctaacagcattagatgttgcagttggagtgagtttgatgataacttgttcaaggaactaatgaaacagaatgatcctccagtgtaagtgggtgtgtgagcttgcaatattaaatctaatcacatccctctttgaattgtgtgtttttcgaaaattgatgaatggaattgttagtttcattttgcatgttttgacctgaattggttatcttctgtctcatgttcaggattgtggagcagctggttggttttgtgacatggaaccactggaaatcaaagaatcttagttattttcttgacaagagaactattcatacggtctcaggtgccagcatgatattttcgactccaaagattcagtgggtgcaagttcttgaacggttgaaaaattcagcagacagaagtgatgatgattttcgtgacacggttgtaagtagtcttatccttaagttatactctattctcttttgttttacagggcttcacaaaaaatcagtgaaaaaatcatgtgcttatagtgttatgtgaattttaattatttccaactccattgttgtggaaacaggagctcttgttacttgggtgcatcacagataggtggacttatttcatcaagcatttgatgtcagtttcttactatcccattacaacttcagagcaatttcaagaagtatgcaagttacttccaactgggaaatttcaaacactagactctaaacaagaaacagtgaattcaaaggttagttttcaccattttacttttccacttagaaaattttaaaagtattcatccatcaatacttttgttaatatatggtgttttcctaccaaacacaaatactaagaagaaactttgcttggactatggttacataattgaagttgaaaccataactcataaccttgatctcattaatccacttacaatgacattaatttgctagtgaaagctgaagctgagtgctgtttcatggtagtcaacactgctgctcatatgttatattgattaaagtttaatattttgctaagaatttgttgttgggttaagctcatactaaatttttgtaactaggaaagcgatattctcgagtatttgatgaacatattgagtggtcaactgcatccactgtggaatgtatcccctgtccttgcagcagccgcaattccctcctggtatttctactatggcctttaatggcatagctatgatcttccatttaagacattaacctcaaaagtttgaatcgataatcttcgtttcttccatccaaaataagatcttaaacaagtgtttaatgtttttgtggaaactgcaggtcactcctgtttagattttatataaatgaactggaaattcaattcagaggagatttttcaacaatgaggtattttttcaaagtcttttggctccattgtttttttttctagatatttgatccttgagaaattttaattgtagatgctgcagttgtattgaagataagaaggaacataatgattgtgagtttcacatgtattaagtgtaaaaaattgtagtaacaaatttgttactgaaaatcaattgattcccaggtgatcttgctgagagaatttggtgcctctatatttttcatgtttatggtgctcatcaaatgcatggggtccctagtagtgtttgatgccaattgaccaggttagtctccagtatatgtttatgcttattacatgcatatgtccacatacgaatgttttgtaaaaataatttttatgaaaaagtttattagtaaaataactttttaaataatcatgtttcctgccgactcaaaattacactgttcaatcataaaagggatatttgccaaactaacaatagtcgcatagtgtaaattcaatttggttattttgctaatttaacatttctgatatttttagtttggcaaatttcccttttagagtgttttgtaaataatcattctaaatttatggtcggaaaaagaccatgatggtcttttattggttacatagtgtaaattttgctaataaaatttttcataataacttatttttacaaaacactcatcataaaacgaccataatagtcgttttacgaccataaatttacactgtgcagttgtaaatttaatgtctttattttgcaaatcttacaatttcaagttgttagtttggttaattttcctccacacactttttttcacttaacctttgtatttgtcatgattggttctatgtatttttgcataaaactttctgcttgttaggtacaatagttaatcattttagttatggtgtaggttaggggcacctgctttttcttcttaaaaaagctttagttttttgttatcttccattcgtggcaagaatcagatgatctgccctgcccccatgaaatctgtgagcataaatctttatatccatttctcaatctaaaaagccaggtcaaacttgttctcttatgacatggattgggcaacttttgacataagagtaggccttgatctcatcattctttactaacatttcctggaaagttcacctccatttttcttgtttaagaaacccaacaacaacatcttctttaagaaggtattggatttgagaaaaaaagtgtcttgtcatcaaggatttgataacacctcattatgaggccaaagggccaaacattcaaaatcttgtcttttaagctggggcctatatgtgactctaccaaatatttagtggggaatatatgactaaggaaaaagcatttctttgtagataatgtcctttactcatttttttttctcaagatccccacaaatgagaaagtgacatctaaaattatatgaggctccctcaagtgggatggagctaatccacacatctacttatacacttaaagatttcattaattttcccacttctgatatcagtcctctctaaaaaaacacagctcaaaatgaaagtttcaaactttgggaagataagtagtaccaactctagttctgcagtaactctagttggtcatcaaagaagaccatcttatggctgctcttgctacaatgcaccatatctactgaggcaactgatttggaggttaaagtcacactggagacgaactttgggatcccgaagaagcggtgttcggtacagctatgatattcggagctattctcttaactttgatgatggttttctatgatgagttttgccccccattttcttcttttctaatgtgaagttcttgaaataagaaacagatcattgttttgttatgatatatgtttcacataacccattttgaggggtataaatatggtactcttgtaaatattatatttgtgaatgaatcacatatgtcatgaaacaatattttcagtccaaaaatgtaatatttcatcattggtaactatgacaatgcaaaagcaagaatgtttttgattaaataaaaagcagatttcttgagaatcttagtaaaaagaaaaaaagttaaaagggaaaaggggtaaaaagatttgaacttgttttatctcatctgctattttggttttaggttccttaaatcatggtatgaatgaatgaactgtaaagcaaagaatacttttttacttgtttttttcttcttcttcttcttcatcacattttattgtcaaaagataaatgaatgacccacaattggccagttgggcatctttgtttgggtctctctttatgggattctcaaccaatgttattggcatattccatttgttttccaagcaaagaccaaaatagtcatcatatagtagtagtgtactagtggggctcatattaataatatcatttaacacatgacattcttaggtaaagtaaagagaggagggtgtcaatcaatttaagcttaaaaatgtctccattaacctaaaacctaacaaatttgtcaaataaaaactcacttcatgcatatgaacacatattaatgagtcatagaagaagaaaaaaagaaaagtaacatacaacaagtttgaaaattaaaaattgtttacaacttcaaaggggacaatcttcatagatgtaaagcacgataaatacacagtaaatactaatggtatgtgtagcataaaatatgtattaaaatactacactaattacatctgattgaaataagactcgtactgccatgttattaagtgtagtattttagttgatattttgtgtgcacatatcattattctaaatatattgtaaaaatttgccattgtaataaatgtattctgtagttcatttgtgttacctacattatgtactacccactaactttattgattattaccatgtgaaattcaagaccccacatataatcatacaccccatactcatactctattattccctttaaccactcttatcaaacccatcaaatctctattcatttccacctccattctcatagctctaaaccatggaaaaactcatacttttctcactcataatctcaaacatcttcataggcttaacacttgcatcatcaaatcattggagcattttgagcccaaaattcaaaaatggactcatcaatgacagcttaaaaaggtattgtgagagttggaggatcaatgttgaggtgaaaaacattatgggatttgaagttgttccacaagaatgtgtagaatacatccaacaatacatgacatcttctcaatacaaggctgattctgaaatggccttagaagaggtcaaactttacttaagtggctcttgtactactttggaaaatgatggtaaagatgcttggattttttgatgttgatgatactatgatttccactattccttactataaaaggcatggttttgggtaagtcaatattcaaattatgcttgttcttttcaacccttttttgttgtttagatcaaattagattgttcattcttattagactatattagtagtcttttgtgtttggatataatggttcataactttgagatctacacttacactactttgtgtttggattttggttcattagaaaaatagagatcttatgcactttgtttgataatgcagtgcttaagattttttgttttgggggatatttttataaataccaaaaaacacaaaaagtttacaaaaatacggatctacaatttttttaatacttttataaatataggtaaaaaaacttagatatttttttttctttttttggcaatatttaaactttgtaaacagtagcaattaagtttctattgtttatttttacacaaatttttcagttttaataattttttttttcttttttgatgctgaaaatatttagaaaatgttaaattatgcacaaaacttaaaattttgttacaataatgaactaaagaacttaattgttactgtttttaaaacttcaagggtattatgcaagagattctttatgagaagtatatattttatgcttttatcccaattaagtaacaagttactctttttattttttggtaactaagagggagaaacgtaatacaacctcttgggaaacatggatgaaaaagagaaaagcaccagctcttaaacacacactcaacatttttcatgacatcaaagataaagggcttaagatctttttgatctcctcaagaagcgaaagtcttcgatctcacaccgttgataatctcgtcagtgttggataccacggatggactaaactctcgttaaggtacatatacaaactcttacatacttacccaaaagggtttctgcgtaaaatttatgtgttcgaaatttatgtcattttaggggtttggaagatgaacaacttgatgtgaaagagtacaaatcgaagactagacaacgattggttgatgaagggtatcgcatatggggcatcgttggtgatcagtggagtagcctcgaaggttatccaagtgcaaaaagaaccttcaaactccccaactccatttattatttgtcttaaaagctttaacaactctcttgtttgtgttactatcacaagattgttgccccccacttttgtcttgtgaaaagaaaatttgccttttggctttggttttggttgtgttctctaaatgaaatccactctaatatgttgtcactttcttaagaaataccatatgattatgcaccaactcaaaggaatcttattagaaataaagtcctacacatatggaaagcactaattggttttgagttttgatactattccttaaaaaaatgtctttcctttttttttaataaagttgctacttcattaaatttagcattcagaatacaagatatctaacattacaattggtgcattacaagcaagaatgctacgatcagagttagaatgagaaaacctagcaacaacatagactaatcaatttgatgatcatctgacaaaacataatttaacattaggtaaaaacaatacaaaagattgccagtcctggatgataaggccaaaagtagagcatataacatgagtacttcggattgtttgaacaacgggtaagctatcaaactcaacctcaacctttgcttttaacccaactaatagcctatttaatctctattgccctaaaaccttcaaccgcataggaccatcatgacaatcagttttggcttcaatgagagttttagaatgagatcgagcaaccataccaaatccaaacatattttctctatcaaacagagcaacatccacattaatctttagactcgatttactaaaaagctcaactccatcatcagtattgtcaaagcaaaaagatgacaaagaagttttatctttctctttcaaattgtaatatggttgcattagattctatgacatgtttcagatgacgtctacatacaaatttctcgactacatgtagtgtaaaaaaatattttcacaaattttttaagtcaatcttgtagaattatttaccaaatatcatgtttagtttatgttgtgtcctaagtcgattctgagattgagtgaaccttaagaaaaaagaaaaattattagaccattttattaaacaaaatatgtgatattttcaaaaattattaaaaatatatatatgtaaaatgatttttttttttctgaactggatggactctaaacataggcctaaccctaatctatcttagttcaggcccaaaccagtatccttataacattttttgttatgtctatgctttcaatctaaaatttggtagggtgtgctatagtatgtgaaatacaatcactttatatagaaaaatatacataaaaaaaaggttactcacacttaaatatccttatgcaccactgaacttaatacaataatgtgagaaagtggataaagaacattataactaaattcctttggagatcatattcatattcacattcacaattatctcaaaaaagaaatcaaatgaaaattcaagtacaagttagatgaaaaaggtgatattc

SEQ ID NO: 224886 - DNA, 2889 bp, Cannabis indica
aaattttattctattccattccttttccaattctcattcctattcttattcatatattttcattcctcccaaccaaatgccacctaagtgtattatctatgttatatggaaaatttataatttttctatttttactcggcgacgataaaaaatgggacagatgaccaatttagtcacatgggttagttagaatctttatatttagtgggatatttataagttgatgtttggaatatcaggattaggcagggttatgttattggaccattttacccttaagccattttattaactaagcttttatgtaagggtattttaggtatttaatttaagggattagtgattaattttcttagttggcagctggctacttagtcacttggcttgatttgtcttttattgattattaaattaatcaaattaagaaaaaggaagaaaagtcccatttttcttcacctttttttcaccctattcaaacccaaggagaaccatcaagataccaaagtcttgcttaacaattcagaggtgttttagcaagattcaagaggtgaaatctaaaggtaagaaccctagagtctatctctttaagttttaaagacttttctttagttttgagcatgcaaattatagaactaccctctttgaccggggaatctttcctagtggaccccctttgtttccctgactcttgatgcacggacatgcttctctgatctccacggtcctgggccagttttccctttaggaaacctaccctctagtggacctttccctttcgggagatcagagcaaactttctgtggatcctaagcctttttgttatttttaggcacaaccatgggattcccctttggggcaggcctttctgaagggtacttgtgggactaggccccctattcttttgtttttggcctcccttgggctgagagggctctccccaatcttttcttgtacagatgtgactgtagttggatccacttggatgtccgcattttccattgcttttttcatggcaattaatatttcttgcattctcttattttgctctttttgctctgccaactcaacctcatggtcggtagccttttgccttagctcaactaattctatgtaatggtcttcatcgtattcttcatattcttcttgatttgtatcctcggggtcattagtgtctccctctcctttagcgtccaccctagacgctgcctctttttcttttgggtattttgggtcgttaggttattgtggacgcgaagtgttccttttcatcaccatcgtactgcaaggttatttatgatttttttttattaaagcaagcttcatatagttctcaatgaaaataccaaaatattgaccgagatttttgacaaccaataattagagctgtgtgaagtagttaatgaatgttagaagagaagattttacatggttgtggcattaatgagagtattttttttacgaaaaatttcctgatcgatccccttttctatatatcattagggtatttataggctcattgtggtggtaaaaaagccgctattatcgtgtttgtttgaaccatgctttgcacaatttttcaaatctagccttagggcacgattgcctacgtttatgatgtatttgggttgtctataagtgtttggagagacttgactcatctcttatttatgattagacaattcatttatgcagtcatcaattgatgtatggggtctcgtgaaattagagaactatgggtttaaacccttaagcatgcctgttcagtgtaaggtgtcagatgctctttcacatgttacattaaacacttatacaatgtttttagcctcgagcagtgtgtctacttcccctatcctcatgcacctttcttcgggttgacttcacctgttgtctagtcagtacctcccaaagatgatcattttgtcattattcctttgtaacattaacctcctggggtattaagatttataattgcgcaattgtacacaatcacaaacaagtaatacaatgataagtaatcaaagttcttctccacatggactttttactaaataatgcaaaatcaactaaaggcaattcaaaaatttcaaataaaaataaagaaaagtaactaattaattcaagagaaaaaaattcttaacctaaattctagagttgagaagtaatattttaagctaaataaactaaaaataagaagccaaaagtaattaaagtggtgataatttcatatttggaaaatagacttggtagttaatttccacttatatgttctagttgatacagcaatgacccatcaatggctcaacaatcctggcagagttaacagattttaagaaaaaccagcaagctttttccaaaacttgtaatataccattcataatctcaacaatgcattcctacaccagatcagatcacaaatagtccaatataacatcaaatctttagttatgcatggtagcaaaatatgcctattccactactaattaatacctaaaataggggtaaaaatcatgcatcaattagaggggttcaactaggtcttacttttctaagtaagatctagcttactaaatgttaaagctggccaaaaatttaacattcacttaacatttcatcacatctaattgagcaaagacaagactactcattcatttcaaatcaaaacactagttcatacaagggttcataaccacccaaatctcaaagttcttagttcatagctaaaattaacaacatcaaaccagaaaataatagagtcatggagtttaagagaatattaaagagtagaaaatgatacaaaatggaagaggagagcaagagaaatgagttggtgagctcaaatcttctctttgtaggttgccttctcctacttcttcttagtcttcttcttct

SEQ ID NO: 224887 - DNA, 5139 bp, Cannabis indica
aagacaaaaatctacctgagtttatgaacaaagcaaagaggagaaatggaaaatagaataagttgattaagcagattaacaggagcaattaagagcaaaggaaatcaacattttgtattgaatatatttgttgcaagataaacatcagtgggcatttggtctagtggtatgattctcgctttgggtgcgagaggtcccgagttcgattctcggaatgcccctggttttgcatatactttttatttattatttatttctaatattatagttatattttgaggagggaatctaatcattaaaacagctgtcacaaatctcctctttagttttctattgttgttaatgtcacttgatttccagccagctgagaaccttgaactcttacatgaggggaattcaagtaaagtttattccagcaagactttaatagatatgaataatgcaagctaaagatgttgaatgctacacactttgtgatcacagtagaacttacaaacacatttgtcccaaaaaagagaaaaaagaaaaggaaagaaatcctaccaattatacttatataccattaccacctgaggattaaaacctctcaattttaatattgtaaagtcctgtttgataataaattcataaccgaaggcatagagtagataagtatatgtccaaacacatcttacaaagaatgcccaagtacaccatgttctcagacaaaagggcatatttaggccactcaaattctcacaaaatgcaagttgaaaaggcatgtactaaagagctagatgatcattacttaaaagcatgtgcttttgttgatgccccctcataaatgaaaatatttaaactgacaaatctatattaagtggcataaatttattatgtatcagagaatgccaaggcaaacaacacaaagtttataaatttaaataacaaaaaaacaatagtaaaattaacactatacattaggatggaaaccaaaagcattatgcaaccaaagaaatcaatcttctgcaacttaaatataaatatgaacagtaattgtcatttggtctggtggatgattcttgcttagggtgtgaaaagtctaaagttcaattcttggaataaattaacatagtgttacatttattttatctgttgttgcaattaatttgctaactagtacagtatttggttttgttctaaaatatgtaatacatatccagtaagctattaggatgatcacaaacaactttcacttttatatttcaatattaagtataacctgatcctgacacagcaaagggtgcttctatctagtgtttattgtacatacaccagtatcttagaatagcaactgaaatatttatacaaacagaaggtaccaactctttgttatatattagagaccagctaattcatttataagagtgatttcttttttagcttttcaagtaaagacaatcttctattatgtacgagtgtcaaaacaccaaggaaaaatctgaactgagtttaaaaacaaataaagaagaaaaatggaaataaaaaatagttaattaagcaaatcaacaggaaaaatttatggaacaaaaaaataataatatcctggtttaaacatattggttgcaagataaacatcagtgggcatttggtctagtggtatgattctcgctttgggtgcgagaggtcccgagttcgattctcggaatgcccctttttagcccaaaacattaattttaatatgatgttccaggaatctaccaaccccatataattttcaactcatttcatatggctttggacagggtagatgtgtcaattgagagcctgtaataatgcacaacactaaatctatacgacaataccttcacaaaacctctcaaaaatgaagtgtcgaaaacaacactggcaaataagttcatgctaagagaacaccttaactcttataggtaatagaaaatgctccctggcctgagcaatattattttcattcatgtgttacaagtgtccacatcaacaaacaagctcacttaataagcaatggcataaggcactggctaggcacaccaactgtaattcataagaatattgaatagattttgagatcaagtttatgacaaacaaaagggtcaggttgtggaagaaacaagagttcacaactggagaaactagacaatatgggaaaataattctagatgattacaaagtaagcaccataactctaccagtttcattcttgaaatgtccactatttagtcaaaaacatcgctgttgtttttaatttcaaggtgtccgacaaacagtatcattctcaactaactaatttcataatgctctgggaaaggttatctagacagtgtcattgcaatattgggcaaagctgacttgtgcaaaaaaaaaaacgatgcagacactgacaataaggtcgtgataaaagaagttaaaacaccttcaatcccataagtaccataaaatgcacccgggattgactatacagtctaaaagagcaatatacttctcaattacatgttgcaacatgctgcagacatcacactaacatacaaaactcaatatgtaacagcaatgcaaaggcacatgcaactattgatttttataaaaactttaatgtaaaatccttccttacccgaaaaaagaactttaggtcgaagttgccagctgcaatacttagaactgctgcaacatgaacaaaggattttcagtcttctaccttttcaactatgaaatccagcccaccacatcgatacatgaacacaaaacctgcgaagcacaaattttcagtaagttcaatatctttttaagtacacggaaattacaagtaaaattgatatatccaggttaactaatataatgccttaaatatgttaacatacggatacaaaacctagaatacaaggtccatcttagtccaaaatctaaaatctaacgtctagtcttattcccatcatggattagctacagcaactattattgtcaacaagttattttgttgccgaagatacttacaccgtcctcttaactatgtcaaccgataaagctacaatgaactcaaacaaaagtaaatagaggcagcatagagcaagattttaatgcatcaatataggtggcgatcaaactaaataagagacttaaccataaactatgttcctaagagtgatcaaaataataaacaaaagacgaaaccagacctcccaaaaccacaaataaccatttacaactgccattaaaaaccttgcaactcaaaccctaactaatccaatttacagtgccaaaaggaaccatgatttcaaccgacacatgaagcttgataataccattagtagctcagttaaacccaccaaaacaaaacaaaacataaataaataaagagaatggtcaatcaagtgagaaaaataaaaatttaaaaaagccaagcattcaaaacatcaaacacctaatagtacagtgatatttgtctagtatcgtttttcgagaacaagcaatttcatttctgaatccctaaatcaaatatggtataaagtggctcataaatactggaaagcatgcaatttgtaaccacaatcatacttgtaaccataaacaaacctatcaaaacaacaaaatatgcagcgaaataagcccaaattgtttgcttaagcttttctaatgaagttgaagacatgcaaaaaagacggaaaaataagggaaggcgtttaataagtgaggcttattaccagaaaaaggtgggtgttggattttcatcaatggaagaaatcagtaaatggaaagaaagagaagaagagaaatagtgtggtgtgaaatggagttgatgaaaaggaaccaaatatctcaaaacaaaaacattctgtcttccattctttcgaattcccgccgcgtggtagctcctcgctgcttttgttattgtcgtttttgttcttacaaaaatgttttattattagattaattaagatttttgccatgtattaaattataatttttaatattgttaaatatttgtttttttttttttttgacatcattaaatatttgttttgaaagtgttgaattaaaatttttttttttgtctaatttgatttaattttattaatataataattattcatatattaaatcgtgcctcctaaattttaatatttataaaatcatatctatttgtgtcacttaaatttttaaatctaacaattttaataattcgataaaaaattttaacaactaaaaaagtttaaatacataatttggtaatattaaagttcgcgagcaaaaatataaattaattttattataatgattatattattatttttttttttgctaaaaaaatgtacttttttttttttttatttatttttttttttttgtttgaaacggcaatgcgagaaatgttttattattgttaaataatcatcattaatttttgagtaatttgcggcataaatacctaagttttacgccgagtagcagataaatacctaagttttatttttggcggtaaaaataccttctgttagggtcttggaacttccgtaggtacctggacgttaagtgccaggtcacgatccaggtgtcactcgttcattggtccatatcattaattttttatttattatttaaatgtttaaacattataaaaataaaataaaaaactaaatataattaattttaattttttaacatttatttcttttttcattgttttttctttgaattaaacaataaactcaaattggaaaattgaaatcaattaaacaaaataaattctgatttttaacaaacccaaattcttcaacaaaatattcataaactatacaaaatttatttaacacatacagtaaacataaacaaacctagaatttgacaagaacaaaatttcatattaggatcccaaatcaaaactaaatattacaaacaaaatacaaattaaacaatcacatctaagcaaaactttaattttgaaacccttaaatgaggtagattaactccatgatcaagccaaaaccacaaatctataaacatatataaaaactcaaacccaaaaataaaagcacaaaccaccttgtattttcatgctcaactgagtcaacgccgatggtgaaatagggctatggtgaaatagggttgctctgatggtgaggaggacgaaggcgt

SEQ ID NO: 224888 - DNA, 2463 bp, Cannabis indica
ggggattgtgagggtgcctttacttctggaacaccggttccacatccatcaccttcaaaggttctgggatcatgccaggcgctgacccattttgttgttgttcgacttctggcaggtacagtaaatctgcaatggaaggagcgagttcttccaaagctgcaggtggcaattctactaggaagaggcagaagtttgcggtatccacctctgagatgggggacttcccccagttttgtgatccttagttgaagcagggctaggctcggccttcttaccttttggccctatcaatggtcccttcggtggggttcaccttccccgtgaacgtgattcctttctaccatcttgatatgcagaaggagagggaggcgaacagagccttgaaggggcgcttcgaggccaaaagggtacaagtccataggagggcggtcatttgccaacaatctataatgtcaaaatcttggaagacatgcagactccaccccgtacggggctgagtatggaggtcgaggccatggagaagacgctggcatacaaggtggcagagaggtcacaccttttaccgccgaacttctagaccagatagccgggagcgcctttgaactgcccatggagacttgggcatcctactgtagcgtagacatttttgtgctagcccattctgccaagcagcaggcagttggggtaaggcctcgagacattgcctccacttttctctttgttttggtttgtttgctttgcccctgttctaacacttcaacctttttaaacttggcttgttctgacaggcggccttgctaatggagagggttgttgcggagggtgacgtgctagtgacggagttggagcaagtcaaggtgggcaaccatgacatgcgtgccaccaatgagaccctccaggccaaacttaccgacgacatgttctagattgggggtttgcagcaggcgaattagcaactggaagaggaggtctgcttcatatggagcatgaaggctattcacgatctttacatagagatcgtagggtggatgtccagtgcaggctcttcctcccagttaggcagtctctaatcttgaacctccgacaggcctcctagattaatgttgttgttcgttctctttttttttttttgtataacctccctttagccatacttttctagctgcagagacaattcaaattttgccatggtcgtggggggctataatagtaaatagggtccttttttgctattctttacttggagatttgttgtggtagacttttgggggttggttgtgttattgaagcacctggttccaatgactagtgtttcaacctcttcctgttagtcgtaattatcccatggccgattcaagaacaactttttgacttgaccctttctttgtcgaggttgtgatgctttttgacttgccacccagagggttactcattcagagttgcctggagatggcttctttccgcaaaaacagatcttttgtcgttttcacacatcctctttaaggtttgtttctttcatgaggtcaagtttcgagagtgatgtcggcaactgtcttagactttagaatttttcccttttggtcctttttagcctaacattttagccaatcatgcaatcttatgggctaaacttatgcgaagtccacggagatgtagtaagaaagaatttgggtgtttttttttctttttcaagaattttggccgaatacgcatcttatctccggattcgtgcttgggtttagtctttgaggaaatatttcaagcgcatttctcttggagagacttagttgaaaacgtttcctattttttagttacatgcacacacagagactagtcaactttggacgtaaggagttgtaattgtaagaaatcggacacaccgtaccccacaaatgagctgggaatcttgggctcaaaattctttgtcatttgcttggagtctaacttgtgtctctttacaacttctgaagaggagtgttgagtgtagttctacctcgctttgggaagcatactatccttcaggggagtttctcgaaagtgcacaaccattctcaggcttccatgagaaggaaccatggggtctcgaatgcaaacccagttgtatgattcaccccaaacaattcctttgtgacataaacctcgtaggtgaatgcatgggcctcttgcagcatcgtgggcttttggtttcccagagggaaagctgggcatgtacctacgtgcgggcaattcccattatgatgagattttgcttacaaatgtcgaagggcaaggcgtgttgggtttacgatagtcaaattgaatttttatgaaataggcttggacttccaggaaggaaggctgaagttgcataaatattcaagcttagacatcgcttgaaaagatcaacgggaaagaatcatggagagtaggatagacttcaagcagtccttccatcccgagaaggagggttgaagacgtatcgta

SEQ ID NO: 224889 - DNA, 4196 bp, Cannabis indica
cgtaaaatattacaaaaaactggataactaaaagaaaaaaaatgcaaaaaacaaaaaaggccgtgacagaagacaataaatgttatatgcataattgaaatttatcaaaaacaatgacaataaaaaaacacatctcaatcgtgtatgaacctaaggatattcttccctaagtttaagattcaaagtgttctacacaaaatgttgtatctctaccctaaattgtgtattgaataatttaatgtctctaatctcttaaagtggtgtatgtcagctcccaattattgttttaattgtaagcataaaatttaaacttcctctagaatatatataaagatatgatattatggtaacaaaaatgtttacgaaaaaatgattaaatggattccagagcagctagatgcttgctctctctacaaaattagcagcacgagtagtacgtttatatgaattagataagatgttattatacacatttggatatagcaaataagtaacattctgttatgtagacttggttggtggtaaaatgtgtggtaacacctcctcatcctccttgtatcagagcattttatcaaaatcatgatcaaatttccctttcttttcaactcattatatatacgtgatccggagctaaaagtagtagcggttctccttgagatccggagcatccttgcagagtatcgatcggacttccatgatcgatcttggcggctctagatctttttcctgtagtgcattccctaacaattgctgcatctgagaggcaaaggtgtcgtccaggatctgaacacaaatcaacctaacggatcatttatttgaacatgattgccaaatctcaatatatctaaacaaagcagcaccgtatgacaggaaaatctaagctaataaagatatcaggtccccatgcaggaattccacaagggatttaactgtgataatatactttctacctccaaacacacaatatggtcctaaagctacaaaaggttgtgcaatgtaacaaaaaataaatcatcaaatatcagactttcaatcaagcaaaatcagctcaatgattatatctcagacaccaaaagtagcaaaacaaagtggataaatcaggagaaatatagctaggaatttttcaagccttctacttacagacacagcgattcgtgatcccttgtaccatgacctattctctttcctgttctccaagaagcttagaacatcctaagacaacaacaataaaccccaaataagatgaagcaaaattatgggccagggccagattgagcaaatttacaagtaacatacttgtcccattcgatcccagtaacctcgacagatagcaatgaacacaagagtctcaaagacagagtgaaggtgggttattgtattagtaagctggtctttcaaaggttgcattctatttcgaacatctgattctaccgcactttcctttgaatcttggagaatttttttcagctttgtcgcactctgcaacttagcctgaaaacaatgaagagcaaaatattaaaggcgaatgagttttcaatagaatagtctcctaaatgcaagattgcgagctacaacaatttatgaagataatgcaatgagatcaaaagtctcaagtaaaatctcgaacacagcttcatgtataaatactcatttgtatttatgttctcttttatgtatcaaaagtaaatacacaaaaccattctctacttttctctcatttttcaggtactcttggtgatttagtcctttgttgccccattttgtcatttacttgtacagattgcctatctgctccacctgcattttccttttcatttttccaaaaatttaaactagccctgccgttttacagaaacatagtttctataattcctcaatgccgtgcgacaaaatagctttttcattcgccatgaactaggcagtcacaatatcaaatcatcttccttttaatttccgagtagtttacatataggtataatgtaataaaaataaatcacaatgaaaaatgcaccatgtgcagagtggtacccacattttccaccagtttttctacaaccgcttgaagataatttctgaacttcgccctcagcatgactgttacttcactaagacgttctccaggaacagcatttccaccatcagggatgcaagatccccacgatttgaattgaacttctatcttaggccgcaggacgtcaagcatcctttttagtgaattcaacaaaatgcccagctgaaatacaagatatattcaaatttcattataatgtgcaagcctacaaggagccaagaagtaatgagaagttacacaaacctcatcggggaccacataggcactagcagatctcttggtaagtttttgcatatacttgaggccaaatttcttaggtgccaagttttccttcaatggtgctaatacatctgcatactgcttatctaaagcttccactactgccttctcaatgtcagcaacagcctttggtggaaagaaaattaaatatgtcaaataatacatattatgagtttgttaagttcaaatagaacagcaaacaattgatttcagaaaacagaaaagcttaaaactacatggaaattttgataagattatgaacagaaaaaccaggtactaacaataagaagatgaatttattatttctgtcttctaggcttacacattacaacatttcttttatatttagtcaagggagagctgggatgactacataagaatgtcttttcatgaatttagcatttattgggaataatatatatgctgtactttgaaacgaatcaaataatatataaccattgactaccacaaatgaacgacccaaatagtatataaactgtatcataagttcataaccgattcagcccattgcctcctacatgtctactggtatttacatcaaagctggtcatcacttaagttatccgtgccagtaaagacaatagttgtaagggcccagcttggatgttgacatgattaaagaacactttatgttggattcaaataagagtatttcacatatgattcgtgcaaactaaagttaaggctcaatgccaacttcaaggaaaacaaaaagagagaaaaagcaaacaagaaaagttgaggagttaatatgattaatgaagatgaagcttcttatttgatttgtgtctttattttgtcaaattttgcaattcaaaatttgtacatgtaataaaaatgtactatgcattttgtacaacatttggtactaaattatgacccaggtattctaatctcggtttcatcatgcacttttcgggaaaggcttggttattacaagctacaactatttgatatggataaaccaaccatattttctaaacaaagaattaatcagccaatctttcaattacatgattagaatatatacttatttgaaagtgattgacaggccatactgcgattttctatgatgaaaaaaaaaggcccatcatgcatacattacagaaatttaagtctaaattaaacaagaagtcacatacttgctctagaacaagagtgtactctggccatcgacatataatgatctcgtaatcactcagagtctccttcaatttatcatacatctcatcaacaaatggagttgtagagtgttgtgttttaactcctgaccattttacctgaaagttcatgattacttctattgagcatggaaaaaatgtataaaataagattgcttaaaaatcttgttctctgataaaagaaaaatacttggtaatttggaaatgatatcctcgaacctccaatggacaagcacaagaatattcatggataagtgatgcccaaaactaaacataccttatctaatctgcacgtttcaagcaaagactgtcgcttgtcctgaatccacaccatgatataaaggtggaacaattcttttgcatcaactccaccttttacaggactggaagagcagaaaatagatcataagcataaaaaattgtaagaacaattgtctattctattttgtttatggctgctgccgtattttgacaatagaaactagaacaaaaataatcattacttgatgttccagtttgcaaggtccctctgtaaatctgctgttgcaataacaagttctgctacaggaggtgaagggcctgttggggggcaagcaatgaggaaagctcgcaatctactgcacagttcagtgctgtatattgat

SEQ ID NO: 224890 - DNA, 9260 bp, Cannabis indica
ataactacttttgttttttaattttaaaaacagaaaataaaagtgtattatgtaaattcacttttattttcatttttaattttatttaagttaattctgggatggagacagggttagggtctggggttcgaagctggggtctgagtctagggtctagggctagggtcggggccagggtctgggttcaggttcgggtgtcaaaatcgggtcagaatttcaaatattgataagtttaacttttgtttgcaaataaatatagttaagtgtaaatttattatcacgtgttatttttattggtatatttaaattttataatgcgtaaaaacaaataaataatctagaccaattaggtagtgccatgtgtcattgactttgacttctcttctcttctctcactctctttcttcacagtatacagtatcactgatttcaagctctaccgccatagccatattcctctcaaaagtaatgaactcagctccaccttacttctccaatcttttcttctacctctctctcctcaatgaacctctccattagggtttcaaaagctcaaccttttcccaccaattccttctctctccttctctttcacctcttctcttcactccctcactataaccactcctcactttcagaaacccattacagagacctcttattcaccaccattgataaaaagccctgggctttttcctcttccaccaaatgggtctcccctaaattcagacccattattctcaaccccgagttgttcgtacgagtcctccgttgttctcaccaaagacccagaatcgctttgcgattattcagatgggttttgggtcaatctgaatttcaatactcagaattttccttttgtgctatacttgaaattcttgctcagaatggtatgatgagctcggcttattcggttatggaaagagcggttagtgttaatatgattggaattgttgatgttttgattaatgggtttgtttgttctgatgagattagtttaaagcttcttgatttgttgttgtggatttatactaagaaatcaatgattgaacaatgtttaaaggtgtttgagaaaatgactcaaagggggttagttcctaatgttaagaattgtaataggattttaaggttacttagagatatgaatatgtttgataaagctaatgaggtttatagaataatgggtttgttagggattgagtttactattgtttcttataatactatgctggattgtttatgtaaagaaggtgaagtgaagaaagctcttgagttattaccaattatggagaagaaaggctttgttggtaatgatgttacttataatgttttgattaatgggttgtgttccaatggagaagttgagcaagccaagggattgattggtgagatgttgagattgggattaagagtttctgttcatacttataatcctttaatccgttgttgctgtattaaaggattggttgatgaggcattagggattgttgatgagatgattgaaagaggtgttttgcctagtgttgtaacttataatacgattatttcgggtttttgtaaatgggcaagaatggatgaggctagacagtgttgtttcgatatgttgaggtgtaatttgatgccggatattgtaacgtataatactcttattgatgggtattttaagttgggaagaatgaaggaagctctccttatgtttgatgagttgagatgtaagaaccttgttgctaccattgttacttataattctcttatagatggtttttgcagaatggggcatttggagtctgctcgatcggtcaagaaagaaatgatcgatgaaggaattcgccccgatgtttttacttacacaattcttgtgaatggatgtctcaaggcaggttacttatcattggcaaaggaaatctttgatgagatgttgcgcgaacgcatagtgcccgatggctacgcttacaatacactaattgcaggcgagttttcgctcggggacacattgacagcatttagcatccaagaagaaatgcttgtaaagggtgtgtgtcccgatttagtcacctacaatatctttgtgagcagtctttgtaaacttcgaaatttgaaagaagcttgtgagtcatttcagaatatgataagcgatcgaatcgtccccgatcatatcacatatacaagcatcattcatgctcttttggtaagtagacatataagaatggctatacaggtattctacgatatggtaaagaaaggcgtatcgccttcggttgtaacctatacagtattgattcacacacttgcagctgaagaaagtagtctaagacttgcttttatgtttttctcagagatgcaaaacaaaggtattttgccaaatgtgattacttacaatgcattgataaatggtctttgcaaaggaaggagaatgagtgaggcttatagattatttgttgagatggaattcaacaaagaaatagtaccaaataagtatactttcactattttgataaatgaaaattgtgacatgggcaattggcaagaggccatgagattatacaacttgatgttagatagagaaattcaacctgattttcatacacacactgctcttttcaagaaactgaacaaagactatatgatgcagcaagctgttgagtaccttgagaatcaagttcttttgtagtgaagaaactgttgattcatcaactctaagatgaaccccaattgagaggcaacaatgtcgattattgtgttagttacaatgattctttatgagatgctaaattagattttagtcacatttttgttatgtaatttagattttggccaacctagtaaagatcataccagcctaggtttctacagtctgttaatagaatatactaaaagcatcttaactaatttatgtcttttcttctatagctctctgaattttgacttaaaaattctcatcaatgtaataatgacaatgctgtccacattacatttcacaacttagcaaaatttgaggtcatgttttctttttgtgcatagagatttacaaacaatttaagtggtatcctagtcaattttctcaagaaaaatattattaaattaataaattcattgaaaaactgaaagaaaaattaatcacatttgagatcatgtaatatatgagatcgtttagtaggtcgtatagtattgtataaaataacaaataacattatatttagataaaatattatattttgttaattattacgaccataaattttaatataacgtgagtcgtattatttaatacataacaaatgactagtattaacttgtattataatattcacaaaagttctaaggtcaacccccaccccaactccagacctggacccgaactctagacctcagattttaacttggacatggactcggacctggacatgaacctggatcccagactcggacccccatacttggacccccgaacacggacctcagacccctcgacccgcacactacacactacatatcaaaccccagacctagaactagccccaaacccaaaatccgaaccccaaatttcggacacataccctgaacttggaccaaaacctgaaccccagacctagatttagacccaaaccccagacctggacctagacccagacccctaacctggacccagactcgaaccgcgacttgaacccggaccccaaactcagacccagaccaaaccgcgacccaaacccgaactaagacctagacctggacttgaactagtacccagacccctgacccgaccctagatctaaacttgaaccaggacctggacttaaatgaggactcgaacctcggacctggacttgaactaggttccaaaccccaaacttggacttgaaccaggacccaggaccaacttagggtttggggtccgggttttgagtttacgacccgagttcgagtccgtggtctgggtttgggttcggggttcagggttcggagtttgagtctgggttcgggtccaggtacaggtcacggttcgagtccggtattggagtcgaatttattgtaaaaagtttataattttacacaacttattagtacaaatcaatattaaacatatcattgtattaaataatactaatacaatacaacataatacaatataatccaacacaatactatacactacaatatattacggtacaccaaatgagccctaaaaatattattatatatatatgtgtggattaaagataaatacaaaagtggcttaagaagttatatgttctcattttagagacataagtttttaagttactttgttttcttctaactactttggcttatttccaaactatttagtccgcattctaagaaaagaaaagtcacttgacattagatcctactgaattttcttagtatataaattattaaattcattgaaaaacaataatcaatagacataatagtgaaaactctagttttcaccaccattacaattgtcaccatgataaatatataaatgtatgatatgtaggctatttaggagttttctcatccgaattattatttatacttcttgaattttccagtcattaaaaatagttcttgaactattcacaatgttataaattgattattctgtcaaattttgtcacacgcgtcaaataaaataatgatatgactgtttagtcagttaccatatcagtgccatatcaatatcacatgtgtaattaatttgaaaaaaataatttaatttttttaatttagttttacgtagttttcttaattagatttttaatttaatgatttttaaaaatgcctaatttttatacttttcaatgttaaattatacacttggcgttgatatggcaattggctaaacatccatttaccacatgtacaaaaacttgacagaatgaccaatttacaatactacgaatagttcagggaccatttgtaacagattgaaaagttctgaggacacaataatatatatgtcataattcgagagagaaaaatcttaaatggccttctatatgtggattagggataaagacagaaattttgaagaagtcaaatgttctaattttagagacaataaattttagagaaatattaaaaggcactaatattgccaagtattttcttatgtatcatatcgctattggtgctagtaaatatcggattccatataatttcatttattaataacttttagagaatatttctaatcgatcgcaagataccatttataaatagtgttggacactactgatacccaataccaatacaatgcttgaaatttaagttaatccactttacttacataacttaaacaacacactagagctttgtactttacaacaacaaaaagtccaaacacattgtccaagttttttgattattcctatgaaataccacttttcaacaacaaaaaaaacaagccatatctttcaaaatgacaaatctttcataaaatatctttctttactcaaattttcttaggcacttccgtccattgcttagctataaaagaacacttcacttcccattactctgttacaaaacccttctcaaattacataccaaaaagaagagaaaaaatgtctgctttgtcatttccaccattcaatgccataagatgttgttctaatagggacaatgatcaaaacccaagtgttcaaaagtttaatagcattaattttaatggaagttcaagctctcaaactgatcataaacttagcctaaaaattggtcctttaccaagctccttttctttgacttttgtcactaaaaagaatccttcaatgatgagaaaattcaagagaataccccaacaaagaagcatgtagttgacccttttcgccaagagctcataattgaaggaggagtagggtacagacagactgttgttattagatcttacgaagttggtcctgataaaactgcaaccatggaaagtatctttaatcgtcttcaggtgagaacacacaatactaactcttgccatgttaatatgctcagggtcgggattggactaaggtgaattaggcacaaacctagggcccacccagtccaggggcaaaagaaatcattttgaaaatacatttttttagtaatttttgaacataccacattttttttaaagagtagctaactaagacctagttagcctcagagccgatcctgaatatgcttatgtatatataggtttcgaatgtagtcttgctctactttcgatagttctattctattttggagtaatttatagaagtagttttcacaataatattttgttaagagttttaattttggtgttataggaagtagcattaaatcatgtagggatgtcaggattcatgagtgatggaatggtgagaaacaatctcatatgggttgtttcaagaatgcaagttcaaattgaacaatatccaatctggtaagtccaatgaactatgctcttggtgaagctacacaaaccccatgtaaggccgatcttaagttatttgttcgagcttaatacaaatattaatttggtaaaatattgttaaataatattgtttaaagtaatggtaaagatgatttttaagtataagaaagtcacaagttcaaaattttgtaccaacttttaacacatttatgtataattccttaggggagagagagtggaaatcgatacatggattggagcatcagggaacaatggagtgcaaagagattggctaattcgaaatcaagacaccggccatattttagttcgtggaactaggtaagaatatcgtcaaagaaagatttctcaaaattttgtaagaaaattatttttatcaatttttttcattcaatcatttattgatgtagtactaatcaaaaattataaaacagtacatgggtgatgatgaatcgagaaacaaggggactctcgaagatgcaagaagaggtgagggaggagatttcgccttggttcatagagaaaaaagctatcaaagaagatgttattgacaaaattgtcaaattggatgataaagctaagtacatgaacaccaacttaaaggtaaaaaagcaataaccaaaacttatcttaatcaaccatattcttgatccaactcaatcaactcatataacttttccttttgttgtagcccaagagaagtgatttggacatgaaccaccatgtgaacaatgtcaagtatgtaagatggatgctcgaggtaaaaatttgccatttttcatttttactattgtaagagagtcaattgtagtgaaaatttagatgaaacctcgtgtttcttactatacaccataaactattttctaaactagattttcacattccaacaatgttacttatcaaccattttataaggacatatacacaaagtatttaaaatgatactttttgtacatttttattgacaaacttttttaaaaaaatatttttatagaaagcaatgtgaaaatatatattctaaatgtagcagcaacatgaaaacaaacgtgcaaacaacatagatgttaaaacaagtgttctaatttttgtaaaaataaaaacttcaaacttataaaaatattaaaaatattgtagattcgtgttttgttaaaaaaaaaaacagggtaattgtaaaaaaaattctcattataattaatctttagtactcatttttcatttcgtttcacagatcataccggatgccatttcagagtcttaccaattgtctaaaataaccctagaatacaaaagggaatgtgggagtactagggacatagtccaattcctttgtcaacctaatgaagatggaagagggttacttaaacatggagtaaatcaagataataatcataacaatctactaaatactttggctattgaatttctcaaaaacaatggattcacggggtcctttgagatagggccatttaggtacactcatcttccccaaatcgatcatatagagccttctaagtgtactcatctccttcgattcggtcaacttctgcttcaaattctcttcttctttgatcatgttcttcgccacttcttcaatggagtttggtattagttctgaaagcaaattttgctggtgatgtcaacaagaacaagaaagcaaagagatagagatatcttaacggtcaaagtgaatcctttcattccgaattaaagtcaaatgaaagagactttgaaaaggagtaggaaaattatcgagttttaaatctgttattttcagtatattgataaattgtaacattattctttttacatgatggtatataatgtagttctacgtgatctcacataaattttaaggaattctagataatttaggatgttgagattaagattcaaataacttattgtgcgcgtgcatgttttgatatttatgtatgcgtgtaatatgttatttgagtcattattttagcattcaaaattatttagaatttctttaaaatttatgagaagtctttaataataaagtaagattttctgtttttattatataagtttttagaccatcttcaatgcatggttataatttgtgatatttatttttgtactcatgcataataatattttaagatgcaaattataacaacaagtaagacaatgatcattcaattctgttacaatatgaattagaattttaataaaaaagaaaattagaaaattttgataaaaaaaaagaaaagaaattcctttctttaatttaattaatgaatatattaaaaaatcaagtaacaagtgaaatatgtgagaaataattcataacaaaaaaatctatttgataaacttctaaatgatcctaataatacaacaatttaaaacgaatttataaatcaactctaaataaattacaaaaattttaaaaaaatattacttttattaataaaatattaatcactctatctaaacataaaaatctaagcaaattacatgtgtctaacaaaaataacaaaataataataacaaaacaaaacaacttaacaacaactaaactttaacctcatatttggcataaagaaaaaaaaaattattcatgttatttttttttatcttgtttaaaaagatagaatggaaaaaaaattaaatgtgtaattacaatttaataattttatataaattatttttgatgaaaagatttttaattaattttgtaagggtttaataaattaattaagattttcttacaaaatgtgattaattgaataaaaatattatataagaatttgagtgtgagtactaagaaaatataaaaataaaaagatagaatgagtgtttctaattttttttttttaaa

SEQ ID NO: 224891 - DNA, 6427 bp, Cannabis indica
tttaaaaaagaaaaaataaataaaaactagcaatggaggtcttaatgtacatatatatatatatatatatatattacaaaaagcccaattttaatcttttacacaaggctcctaaaatatttggaccgaccctgagtggatatttttaaggagatgtgacctttttttgtgagttagtgattccgaaagccctcatagtcgctcccgaatgcactcctacttatgctgacgtggagaccttgctcaaatgagaattgattaagttagttattgcctaactaacttaacaacctcaatttttacagccaccgacctttaagatcttgatcctaaggcctataaataccacattcacttatcattttgagacaacgatcagattgaaactaagaaagagagagaaaagattgagaggtagagagagatatatagagaaaagagagagattgagtttgagttttgtaagaagaatcttttgtagataaagaagattctaaggtaagatcgtgagagttgaaacaatttgtgagacctcatcagagaatcgatctcgactgtattgtacatttttcttactcaatcaataaagagaatttggtggtattccagaattagagtagagccatagatcacatcgatttaacggatttgaaccaatatatatcttgatgtttattttattattatactgctttaatttgtttttggtttttcacactctatttatcactatttttaacgattattattcgtgattttttaatcttgtcattgttaattgtttaattatttaaattttaattgatttgattcttcacatttagttgtaattttcccataccgtgtaagatgaaacataaaaattcaaatttcctcatgtaaatacgtcatcaattaatattattttattttattttttataaagtgtcatttattgatttttgcaactaaattttatattatttatatatcttacattttgagataatcttacgtgtcaatttttaagagttaaccgattcatatcattaataacaagagtttacttagcaatattgttttgttaatttattaattaactttaaataatatttgcctttgtttaaagacaataatgtagaaattaattttgttcaaattggtttataatttcaaattttgagttaacaacattattaaagatacattatcctaaataataataacttatcctttcaaaaattcgaatcactgttaataaaaaaatatcaattgtagtaaagccaaattaatactcattaccaaaaaaaaaaaatacaatattcaaaaataaaatttatttattttttactcctagctaagtaaccataaaataaaaataaaaataaaaaataaataaagaaaataaaaagacaaccagttcaactacccagttaccagtttatttaaataaaattaatattttttttttaaattataacaataaataaatatataaaatataaaaataaaaataaaaaatgattgcttttataatttgttttccttacattctctaatttatatatatattttcttgtccaatctttcttatcttttctcagggtcaccttcgctgtgttacgacaacgttaaaaaaaaaaaaaccttttttcacggccaaaacccgattttgacccgactcacgaatccatacccggataatcaaacggcttcgattcgttaccggagaagattaattgggggttgccccccatttctgtttcttgtcttgctttcatggagtctgaatctgtaagtaattttaattttaatttttttttttaatttttaaacctatttgtttggacggtgcaacttggaatacgagcatttgtttaatggaaaccctaaagtttgagtctttgagcttcatttataatgttttcttggaataatattaatggtgggggtgtttatttttgtttacttgttgaaggatcttgggattttaatgctgtttgtgttcttcgcaaattgaggaattggaggcaggtgggtattttgggggcagtagggtttttggggatttgaagccattgttgttgtgtttgggggggaagaagaagaagattttgttttgttacatttctagggtttgttgataggtgtggggttagggaggataatgtgtatactttgtgttattcagaagtggtctcgccgggttgctacaatgcttccttggttagttattccactgataggtttgtgggcactttctcagctactaccaccggcttatcgatttgagattacttcgcctaggttggcatgtgtttttgtacttttgattacccttttttggtatgagattttgatgcctcagctgtcagcttggcgggttagaaggagtgctcgtcttagggagagaaagaggtctgaagctatagaattgcagaagcttagaaagacagcaactaggcgatgtcgaaattgcttaactccttatagagaacagaatcctggtgggggtcggtttatgtgttcgtattgtgggcacatttcgaaaagaccagtcttggatttgcctgtgccaactgggatttcgaatgctggtattcttaaggatttggttggtaagagtgggaagatattgaatggaaaagtttggtctgataatggatggatgtgtggccaagattggttggagaatggaaattgggttggtggtggtagtccggttgctggaaagaatactcattggaggaggaatgggagtggtctttttggaggggatgaaaattgtttggctgagaagtcttattcgggtgttgttatttttgcctgcaagcttttaacgtcttttttcttgagcgttagatggctttggagaaagatttttagaattagttcatccacggaagatgattcttctgatgcagagcataagggaatgttggcaaagagttgcgataatggcgggagttatgagagtagaggagaaaaagcacgaagaaaagctgaagagaaaagacaagctaggttagagagagaaatgttggaggaagaagagagaaagcagagagaggaggttgcgagattggtggaggagcgaagaagattgcgggatgagaaaatggagactgaaaaagatcgtgagaaaatgccaactcccgtcaaggagaaagatagtaagaaagaagcggaaaggaagcgtcaagagagaagaaaagagaaagacaagggttctagcaagagcaactcagatgtagaagagctggaaaagaaaaccggtaaggaaagtgaaagaaagaaagacttcgataggaaaaatgagaatgatcgaagggaacatcataaatcagggattgatcctattaggggccagaatatggacatggggggtcctgggatgagacatacttcaagtaactttactcggtttaattcaggaactagatacctagatcgtatgagaggtacatttttgtcgtcttctaaagcatttggtgggggtagcttctttggaaggggaactagcaatgctgctacttcggccaaggaaagtaaacctaatagttttacagatcagggccatattgctgttcacaggaaggatgtatgtccacccgagcgtgtggctttgagatcttgtacgaatctagatgataagaatactaaccgtctggtacgttctcttgcaaccacactgaattttaatatactttctgtattgtctgtgcttccctaggtctctttttctaaggatagcttttgatttttctgttttaaatgttattgtgttaggtttttgtcacctcctgctgcaaccacatatgtatattttgtatcgaaatatagtttgtcatctacttccgatcttactgttatgccattttatgctttaaaggcatttattatcatgattcataggattgagctctagctttgccagattaattagttaggatgtttaaagtagaaatgaactgtggcaattggcagtgggctacttatttactatacttttcaagtgagacatagtgacacagtttataaaattctatggtgttggctcatttatcagatgacagtgttacaatactgagctttccattgcaggttcacactgaattacaaccaggtaccgctcctaagaaatcttggcagcaattatttactcgttcacctgctcctccttcaaatgcaaatgtcataagcagaccgaattcaaagttccaagcagaagttcaaagcccacagttatatggccagccaccgacaacacaatcatttgataatccaataaattttgggtcaccttttactcttcctacgtatccaaacgtaccaactagcagtagtctggggttttcacctgcaattgaacccatattccctcgtgttggagaagggcctcgtgaacataaaccagaggagtcagagctttttgaagatcctagttacatcccagatccagtatctttgcttgggcctgtttcagagtcgctcgataactttcagctagacttgggaactagccgagctaaggattttggattggaaagggcgcgtactttaaaaagtatttctgctccttcggacgtgaacaagccatctcctattgagtctcctttgtcacgagaaaaacacatttctagtcggttcccaactactccaaatacgcaaaatttacctttggatgattcaaatgctaatgaatcaagtatgtggcaaatgtggaacactctccctctcggtcaggatggtctaggtttagtaggcggtcctgctagctggcttctatcccccgaactgaacagacctggcaaggatgagtttgtgcatccttctgctcaaaaaacaatggcctcgttgtttacaaaagaggaacaggtccattcaggcagtcgctcaccacaaaatatttttcatggtaatggccaaaatggcgggacatttagccccgttactggttcaagagactctgatccatggtcacagaaacctttctttccacctatgtcatcgggagaaaacctttctgttttcaaaccccaggaggaatctactcagaatgaaatgatttatgggagtcccaggcccagcagatcgaccaatcatccatttgagcagtctccagccaatggttggtccaagtaagtttgtgcatcttgaatcctctcctcgtacatctcaaactgtcatttctgaaaattcataggccatttgttttggttgttattgtctgctatgttaattttgaaacaataatctactcattaccttgcccgagaatagcgatttgtcatgttcttagggagtaccacgatcaaaattaacttttgcagtgaatatttcggacgttggatatagttaaagcttagcattgtttccccttgatgtcttttttaggcttagtgtgttgtagatattcttttactaggaaatttctgtagtaatgttaatcacaatgtaactttgtagtttttctttccatgtgttctgacttcattccaacttggaattgtctttcactttcctcattcttgaataattttttataattacttctttttacatcaatttttaatcacagaaaaatatgtcagccattctctaaagctaaattaggttgtcagtgtcttattcttcaatacatggagaatcaaagtccaaatgacattatggtgtatgcttaaatttttaattaaagaagtagagaattttgagtctaattattgtagatgaaattgcaatgattggttcaatgatttgatgaggacaactctcaatgataattaaagaagttaacctaactaagatttattgttctgtggaaatatttatgatttcaattttattttattttttttaaaggggaaagaaaagatgaatgtgttgagtgtaaatgaacacatttaatgactatttccattgccaattgaatcgattgtcattaaggctatgtttggaagttagattttagtggggaagaaagatgtaagaaaaatgtaagtgaaaaataataagagaaaaaaaaatcagtttcttatgtttggtatggcaaggaaagaattgtatggaaaaaaaagttattcaacacaatttttgatatcaaacatgaaaaattgtttttttttccctacatttttctttctttactagaattcaacttccaaacataaactaaagagggggaaaatgggaaaataattttagtttaagaccttttgtaaaaactatgtcttattatacaatacaataaagggattatttcacaaatacacaaaaacaacaaaaaaaattacaaaaataagattttacggaattttaaatatttttacgatttttttgattttatttgcagaaaatacgatttttttatgttgtacttttgttaatttgttgttgattttttgttatgtgtatgctatttttttttttgttttgatgttatttagat

SEQ ID NO: 224892 - DNA, 6974 bp, Cannabis indica
atggccccccatgagaattggatgtaattacattgtgtaattactaaaaactttccatattaaacattagctactaaaaaatattattttcccttgtaattactaactattttgccaaacaagaaattaagaattcatatgtaattaccacctcatatccaaacacaccttgcattttaaaatatagtgtaattactaaaatgtgtaattactaccctagtaactaccctacctagtaattacacaattacttccaaacacaccctaagtattagttaatacatgatggaaagtgatgaaatttgattgattctttcagatctaattaattgagtaaaaccaataaaagttcaaataaaaataaataatatatataacttgtttatcttggaagatttttttattcaagaaaaaaaaactttaataattacaagaaaacttacaaaacaacaccactccacacctacaaacagctttcaccaaaacaaatttaaaattacttacaaataactctgttataaaaattcatctccggatggaggcttctttccaaattatattcattattttaaaataaatcattaacttactatccttcacaatatgctaaaataacttcaagcttctttcaaaatcaattgtgtcgattgagtcatatattataaacagtagttgttgtcactctatgataatgctcccaatcaaatgtttccttttcctatttagccaagtgatccagctattctaattcgctggccaagccatgaaaccaaaccaggccaaaatcatattaataatctgtttggacaagaaacaagtgaaaaatgaatactcatgaatctcctgtattaactcgtaaacatgatatagaatagagaccatgttaacattttcctagctaagaggtctctagtaaactgttggtgataagagatctgagattggaccatagagctattatataagcttattaagttgaatttatcatgcatttcagcagcagcaactgaggtcttattaaacacctttcttaaattacagagttttttctagtaccagctcgagtcttatttaaaataataggtccagaaatcctcccttttcaagtaaagagctaacccatttaacccattatacaaggcttcttggttaaggcccagatgtacctagccaaaatagtcttgttccggtcaaaacttttcctaaaacctataccaccataggacttgggaatggaaactttatcccaacttgcaaaatggagtttaattttgtttcgttagaaccccacaaaaactgtctacacaatttctcctcttccttagtcacactttggggaagaacaaatatgctcatccaataattttggagacccaataagaaagaatggattagctgcactactagcaaaagaaagataccgagtaatccaagtgtgaagcttgagcttgatttttttggtaataatgtcacattctaacattctccactttgttggtctcattggaacaccattgtactttagaggaaagctacttttttcaaaccgagcgtcttcaagaatgttaggtttgacctccttagaaacccctccaaaatagatttaagacttactaaggttggcttgatgtttagacatgaaactaaacttatttagggtattctttaaaattgtaatagattccctaatccctttacaaaagaggatcaaatcatctacaaagcacaaacttatgatcttctaagtttttgcacatagggtgaaatctgaaccctgctgaactagaagccatttgaaggtgcctagtaaaatattccatcaccaatataaataataagggagaaacgagatttccttgccttaaccctttcattcctttaaaagagccttgaatcctttcattcataaccaaagagtagggtgtattctttaagcatggcataatccaactaatgaatcttgaagggaaacaaagagctttcataagatcttccaaaaatagtcaatctacagtatcataagccttacttaggtagatttttatggcacatcttggggaagctttttttctaacatagtgtttgatcaaatcttggaatatcgtgatgttgtgagctattgagatgtgtttaaggaaggtcccttggttttgatgcaccagactaggtagaatagaagctaatcttaagccgaggagctttgagatgcacttataatgcatagtgtagcaagcaattggtctgtagtccactgcttgatttggcctctcaatcttaggaatcaaagagagtattgttgtagcatgaagatatgaagggaactgacatgtatcaaagaaattacacattccctacaaacttccatacctatatcaagccaaagaactttgaaaaatgcagaaccatatccacccgggtcaggactcttatgattagggatactaaacatagcttttttaaaatttccttacagggaaatgtcttcaataaggctaattgattatccaaattcaattcggtaccataatccacactctacaaattgatgttagctcttgctgtgctattgcttcccatgtcagttttatggtaccaaatcattgtaccatagtcccaagaatctttatatgtatatatatattaaattaaaaatattaaatacatgaaagaaatgtatacatcttgatgactatcggggtattttcgaaacttctcgtaagttagattcaataaatctcacactgtagtcttccatatcgacccaccacacacaaggagtagtgtgtgctactaggataaagtgtatatgaagttcttgtgtaaatctcaacacatgagcaataactctttcttatgtgatagtgagaaaaaggtttattggtaaaaccctttttaagctttcaaaaaaatttcttgaaaattctattcacaaaacttatgttcagaactttgttatgagatacatttaaataaatccaataaaaatttattttattaattatttaaattaaaatctatttattatatcatatttaattatttgaataaataatataactaaatccggttataaatatttacatctaataaccaattgagagaatttcttaaccacttgagagaatatttcaactactttttaaattcaaatatttatccatcaaatcaattaactaattaattaacctaaaatggcaaaagtaatagggacaccccacactatatggggcgcatgcactgtgtccgacacaatgcatgtggggcctcctatgtcttgtttaagacaaggaataagccttttgtccagacaacttttgtctcgataacttttatcttttccctctttaattaattttaaaaataaattatttattgcaaaaaaaaaataattactattttgctaattcaaaatagatttttttgaacttccatgtacaacatttcttaccccttgacagtgtttcaaggtggtgatttggggaccatagacctataattctaagttccagtaaactagatttatttattgaatctcattaatcaaataatcttgtttattaattctatgattacttcactataaatataaaattgaaatcttagttattatagaattatatttactaatttttactacaatgtccattaatataattaattttagtgattagccctccttgagttggttcgtaattagtgttgattaaattactattttacccttctaattacttctctatcatttagtaacgttaattcactagtcaaagtataatttagatccaatctaaaattatgaacacttggttgactacaagctgtgagtcaatatagagtttgatgtttttagcgccaacctctttcgctagttgtaaaccaacgatcatagcctcgtactcaacttcattattggaaactcggaactcgaaacgaagtgcactttggagctggaggttctgtggagatattaaaatgattttggctttggaaccttttttgtttgacgctctgtctacatttatcttcaagacttctctctccaggactgacatttcaagattttcatttatccttgtgcactccacaatgaagtcagctaaggcttgatctttaattgaaattctgggctgatattgtatatcgaattgactcaattccattgtccactttaagagtcttcctgacgactccaacttctgtaactcttgacaaagagggtggttggttagtacccttatggcgtgagcctaaaaatatggtcttaacttccatgaagcaattagtaaacaaaaggaaaaattctcaatcataggatatctagactttgcgcccaacagtctcttgcttacatgatatactagaagttatacctttccttcttctcgcactaaggcggcgcttatagcgtgatctgaaattgccaggtatagaaacaacgactctccatcagctggtttgaatagtattggagccttcactagatgttcttttagttgttggaaggctgcttcacattcagctgtccattcaaatttgttatttccttgaagtacattgaagaacggtatgcacttatctgtggatttggagatgaatttgctatgtgctactattcttcctgtcaacttctagacatctttgtattttctaggtgaaggcatgtatagaatagctttaattttctctgggttttcctcgattcctcaagaactgactatgaaactcaagaacttccctgaagagactctgaaagtgcatttctttgggttcagcttcatttcatactcttgaattatggaaaaggcctcttctagatctttgtggtggctctcggaggttttcaattttaccaacatgtcatcaacgtaaacctccatattctttctcagaacattcttgaacattttattcaccattcactggtaagtggctccagtatttttcaatcggaatggcatgaccttgtagcaatagattcctttgtcagtttggaactggtgtgctcctgaccagccacatgcatttttatttagttgtagccagagtatgcatccatgaaggttaagagttgatatcccgaggtagcatcaaccatctgatcaatacagggaattaaaaaataatttttagggcaagctttgtttagatttgtgaaatctatacacattctccaagtcccataggtttggtaccagaacaaaattggcaagccatatgggatacagaacttccttaaggaaatcaatgtttgtcaacttgtccacctctgtttttactgcttccgaccttgctagatctagcggtcttcgcttttgtcggactggttcaacattgggatcaatgttcaatgcattgcaaataacatggggactaatgtcagtcatatcaaaatgactccaggctaacacgtcactatttgcctttactgtggaaattatcttttctttcactgccagaggcaagttcttccctactcagataaccttggtgggatccccattatctatgcatacttcttccacttcctccattatttctatgatacgttccacgccaattcgtggatcaagctcatcttcctagaccactcccagtgctggctgggaagatgttccgactttagagtcatttccttctcggaccatgagtacagttctggttgaaacattgtagcaacttttcacacttttttgatctcctctgattgtcccaatgctttcgatatcgcttgggaattttaagcacagatgtcagatggatgtcactactgttaaatctattaaaaatggtcttcctaggatagcattacaagcagtagggcagtcaactatcataaatgtgttgtacttgaatgatgatgttgtgtttcttctaggaactttcccatttatagtcatcaaaagttgtattttgcccatggggattagtgtatctccattaaaccttgtagttgaatcagacatggtagcaaattggcttccactaaaccaatggcatggaaggctcctttaaaaatgatgtttacaaagcttccattatttatgaggattttggaaactcttttgtttgctatttgagcctctattaccaaagggtcattatgagggaagtgcacgaacccggcatcatcttctgtaaaagtcattggcaaattcatcatccttggacgttgggcaagtgattgtaccaagtggcaagctttgccttgattcaactcatttaggtactgcttttgtgtgttacgagtgcttccaacaatatgaggtccacctaaaatagttgctacatgaccatctaagactagtaatgtagattctgaagggtatgggtttcattctgtgccccctgaagggcttgtgcattcggggcttgtattttatgaacttgtggatgacctactctctgaggaggatttatggctccatgttgtcctagaatgaaaaattgtctgtgtgtgactgcctgtcctagatatatgactgggatccttacccaatcggttaagtgtccattccgcactaatccctcgatttcatcttttatatagtcacattcatttgtggtgtgaccaatatcaccatgatattaacactttttgttcggatctcttctttactttttgcctttatacattggcaaagacttcctgtagtgtaccatcttacaagttgtcttgtatacattttctcgagtatctatgagacttatgtactcggtctatcttggctcttggatttttcccttcttcacagactcactccgatttgaacccttcaaaatcctcttactccatgagtgggttatattggagtctggaacttccacttcttagttcgtttgtttaggagcggcactgtattcgatttgtgcagctacaaacccgaaaagactaacttgtgtagttggctgcatggaagtacttattccatataccgtgggagtagtaaatgttggaatttattttaccaggatct

SEQ ID NO: 224893 - DNA, 4605 bp, Cannabis indica
tgctgaggagatttgtccgtctcgaattggaccagttactaacatttggtgctttcattgtttttcattttcagaatgaagaacgaagagctagctgccttacttcaagccatggatctcaagtgggatcaacgggctgaatcacagatgactgaactccgagcggtgattgaggaacgtttggctcaagttctaccacccaattcttagattaatcatggcgaaagtagtgcagttcaggaacccagtcgacgttcgacaagttctcaggatggacgtgaagtgaattccattctcaaaaaccttcgggttaaggtcgctcgcttcgacggaactaatgtggatgattggatttacaagatcaataagttttttgatcttcatcaagttgaaccgagtatccgattgctggtggttccttttcatttggagggagtcccatccaaatggttccaatggatggagaagagtggagcgtttggggattggcatgctttcatcaacgcactacagttacgatttggagcttcgatctatgacgatcctttaggtcgcatttccaaactgacccaaacagggagggtggcgcaatttcgaattgaattcgaagaattgatgatgacccgagtacaggtgtatccgagaattattcatgaattttttcatttgggggttgaaaatggagattcgtagagagctattgttaactaaaccaattgatttagcggatgccatggctaaagctcaattgtttgaagatagaaatgaagattcgttgggtcgctcaaaaggggattcctaccgatctaactggtccaccaaaacaaattcatctggtgtttcatattcacctaggcccatgcctacaacgccgacaagcgtagctgctccgacagcaccgaacccgaaaacactcgctgccaataccgcaccgttccctgtgaagagattatctccagctgagattagagagaagagggagaagggcctctgtttttcctgtgacgacaaatacagcgtgggtcataaatgcaagaaccggatccttatattgacaggtggagaggatgaggaggacaacgatttagcaagagataatgttcatgatcagttagatctggaggagaatatgggagaggaagtatcattgaatgctctgtcgaactcagcgaacccacgaattttccgtttgcgggcgaagcatggtaaagaaatgttagaagtcttaattgatactggtagtaataacaactttattcaggaatctctggcacttaaattggggttgaaatcggaggatactcagtgcttcaaagtgtatatgggcaatggcaactcattgttatgttcgaaaatatgttacgcagttcccttggtgcttcaaggtcatcagttcctggtagatttgtatattctacccatttggggactcgacattgtactcggaatgtagtggcttcagacattgggaccttgcgtccatgaccacaaggccttaacgatggagtttcaatggcagggtaagacagtgaaactggcgggttcaagcgacaactcgaacaactctttgcaactcactcattttagtgctttattgcgggaaggagaatttcgtgaagcatactgtatcacggcagtgaccgaagactccataattttgaattcttcttttgaagcgtgggttcaacaacttcccagacagtgcatcgatataatacgccacttttgggacgtgttcagggaaccaacagctctgccaccttttcgtaagatagaccacagaatttttttggagaaaggatccagtccagtcaatgtaaggccataccgctacccgtattttcaaaaagacataattgaaaagatggttcgtgagatgttagaatggggatttgtacaacaaagcaccagcccatactcttcaccagtcttacttgttaaaaaaaaggatggttcatggcggttttgcgtagactatagagctctcaatcacataacagtaaaagacagatttcctatccccaccattgatgagttacttgatgaattgggttccgctacagtcttttctaagttggatttacgcgcaggttatcaccaaattcggatggacaaacgtgatgttcataaaaccgctttctgcacgcacgagggacactatgaattcttggtgatgctgtttggacttacaaatgcaccttcaacatttcaagcaaccatgaaccagctgttcaagctgattttaagaacttgtgtcattgttttttttgtatgatatactagtctacagcagcacgattcaggagcatgagattcatttacggaaggtgcttcaattgctgaaagacaaccagttctatgcgaagggaagtaagtgcttattttttcaatcctctattgattatttgggtcatatagtatctgctaaaggcgtgcaagcagatccaaaaaaactggcagcaatgattgagtggcctcaacccaaaacaatcaaacagttaagaggatttttgggcttaacaggatattatagacgttttgtgtctcaatatgcctccattgcagctcctttaacagatttattgaggaaggacaattttcagtggacgcctcaagcaacggttgcttttcagcggttaaaaactgccatgacaacaacaccagtgttagctctaccaaatttttcgaaagagttcgtggttgagaccgatgcatctcttacgggagtgggcggtgtgcttatgcaagaaggacacccaattgcttttttcagcaagcaacttggaccacgttttgctggcacttccgcatatatgagggaattacaagcaattgttgcggctgtcaccaagtggagacaatacctactgggtagacattttgtgattcgtacggaccataagagtttgaaagaattattgactcaagtaatccaaactccagaccaacagttctttcttcgaaagttgatgggttttcagttttccatttagtacaaggcgggcaaagagaacatggcagctgatgcactatcgcgtcaatttgagaacccaacaacaaagctattactggcaattaccaccggctgtttcgaatttctaacagaattgaagcaagaaaatttaacaagcccggatttgcgccttcttcatgagcaagtaagcacagggacagcggagttacaagggtatgaggcgcgagatggactgttgtactttaaacaaaagttggtgattagcaagcattctaacttaaaaaaatagatattgcaggaatttcatgattctcctttgggtgggcatgcaggtaacaaaagaactttcctccgtataagtgcaaattttttctggattggtatgaagagagacatttatgaatatgtgaagcaatgcttagtttgccaaacggtaaagtactctaccacacaaccccacgcgttactacaaccactaaatatccctgaaagaatttgggaagatttggcaatggattttatagtgggattgcccaactcgcacggtcttacaaacattttggtggtcattgatcgattgaccaaatatgcacactttggcgcactttcagatcactatacagccacgaaagtcgctgagttgttcaccaatatggtcattcgtttacatggattgccacgctcgatagtatccgatcgagatcccattttcaccagtgctttttggaagaagttatttgaattaatgggcactaagctaaaaatgagctccgcgtaccacccacagaccgatggtcaaacagaggtcaccaatcgttatgttgaacagtatcttcgagccttctcaacagataatcccaagcggtggagtaaattccttccatgggctgaataccactacaacacaagttttcattcggcaattggcatgacgcccttccaagcggtttatggtcgggaaccaccatcaatatcagcatacaccaggggaagaacgacgattcaagccgtggaggaggatttagtatcgagggatgacatcttacaaaagctgaaatagaacctgcatagagctcggaatagaatgcggcagcaagccaataagaaacgcagggatgttgagttcaatgtaggggaattggttctagtaaagcttcaaccgtatcggcagtcgacggtagctaaaaggctcaacaataaactgtgcaggcgtttttttggaccatttccagtggaagcacgaagaggccctgtagcgtatactttgacattaccacctgggagcaagattcatcctacctttcatgtatccttgttgaagaaattccatggagatagtaatccaacctactacccccttcccgaaacaagtgtggccaacaaacctctcatggtccctcttgcgattatagcaacacgaactgtcacaacccatcacaagaccaggcgacagatattggtgcaatggtccatcagctctcctgaagactccacatgggaagactttgaagactttatgcaaatgtacgggttacacaaccttgaggccaaggttgtttttgagggagggagtaatgatagctcggcccaattgaaaatcccaatttctttagagcccaagggagtagaga

SEQ ID NO: 224894 - DNA, 6755 bp, Cannabis indica
gaagacgacaaattgaagctacagattcataaagaagaaatagatcaattgaaggcaagtgatgtttaatttttttgtagttatctttctctatacagtacatgtgccctcttggcaatgagtcttaagaaatttcaggggattcaatatggagttcgatgaattttttctccaagatctcgtgattgcatttcgtaatttaaatagattgttccaaatatattaagttggaaattcttcatgtgtgtacactcaataagtggaacatctgagacgtctaatatggattgggaaaaagtgtttttcccgatgcatttcttgttagggcatcttaatataggatgcttcttaatttacttgcaggagagttggcttcctactttgagaaaccttgttgctcagataaatgagacattcggtcgtaacttcaaagaaatggctgttgcgggcgaagtttctttgggtatacatcgtttagttcttagtaaatatttattaattgagtttccttttgcgcactaacctctttatttaatttcatcttcttcttcttcccagaggagcatggcatggactatgaccaatttggtatactgataaaagtaaaattcaggtagcctgcaaatttgaagttttgtatacatgcaatcatgggtataatgaaaacccttttatatttgtgtcttccttgcttacaaatttcttattagttgacatattcgttcggttttgtgacaacagacaaacgggagagcttaaagtcctaagcgcacaccatcagtcgggaggggtatgcttctgactaaatgttgggaattttattaatgaaatgatagcgcttaatctcactgtaactattcaaatgtccttttcaggaacgctctgtttcaactatactctatcttgtttctctacaagaccttacacattgcccctttagggtggttgacgagataaatcaaggttggtttatgcatgtagtaagtaatattgtcacattttcatatacacaaaaccacatataacactgatttacttcttttacagggatggatcccattaatgaaagaaagatgttccagcagttagttagggctgcaagccagccaaatacgccacagtaagtaccaattacaatatcaagacatagaataaatttaggaaatataatattttagtactatactatataatattttgtaagttgtcaaatcaattaacaattgtatctttccacggattttgatataatttttgttttttttctttacgaaaattgctgagaattttgaactgatttaccatattgtaatgtattaaaatggtgttaattaagcaatagaatattgtattggtttaagaacaaatgataaagtactaaaacagtatatccatttacatatatgttgttggacatacttgtcttagtttttattgccatgaactttgagttgaacttgtgtaatgacgattattcaggtgtttcttgcttacccctaagttgcttccggagctagagtacagtgaagcatgcagtattctaaatataatgaatggtccctggattgaacagcctgctgaaggtactaatgcctcactcttaactctaatttttatatataaatatgggaaaattctaaaaacatttatagtacgatctacattgtagtcatagtagacattaataatttaatttaactgtatagaaaacaggttcaaactcagttgcacgtgtgttctacaattaactattttgaataatattttcgatattgtaaattattcaaataaatttttattataactataatgtagactagtatatgaaaaaaattaggattataatttctcaaaatgtagactataggctaataacttgctatatttgtttatatactcagtttggagtggtggagaatgctggaggaatgtgaccggcgttaaggcgcagtaggaaaatgttaatatcgaaacttcttactcccttgttcttgtacttctctactgataattgtcttagaacataattttgatacaagaatgtatgtgaaatcatttcttggccttttttgtaagtaaccacaacagggttgattgattcaaccaaacttatcattgtcattattttgtacagaaacttcaagtttagtattctgttagtttatcaaagcattgagtattaaaattttaactattttcacttaattatggatcatatatgtatgtacaatgttaccattatagataagccttttagcatttctcataagctaataatagaaaaaatccaaatcagcattattcccaaacttggattataaaagctttttaaactcaaaaaaataaatttaaaaaaaaggtcagaaattcactacacacccaccaatgccatcatgaggttttgataaagcctataacagaaaaaactgactgataaaataaaagtaaaatagatagataataataataaactaaaaaagaaagtaatacaggggcatttctgtggaagaccattctctgtaaattcttcaaatcaaaatacaaaaatttaaggtcttcttctccactgtcatcctagttacccttctaccatgtttttgttttccttgtctactaatatcggcatgatccttggcgagacgagcaaaccaaccttacgaggcttaataaacaaattgaaggccaacatttacaggttttgttctcttcattcattcatctgatgaaggcttgtaatccaacatctcctttatgtttaaccgaatcgaaggccccattgatgagcatataaatgcactcttccagtaaacacctttggctcctgatggtttatttgtttctaccgatttctgtcatattcaagtgtcgaaaaacatgttagtttcttttgttagctgaaagtgagtgaattcaatacaatgaatgaaacgaagaagacatactattgcagcaagcaagtttataataagatcttcctcggaaaagtcaatctttccaaaaggcaaatgaactatcccggttttgtccgctctgaattcaacctttccctgcttgaattctgcaatagcctgaagaaaaaaaaaggtaatggagaccggactcagtcaaaactaaaaccaactgcatctacaacaaaaaaatatttcgctacattgaaataaggttttcaatttctccattttccctgtcaagattcatagtttagatttagacagacatgcatttttgtgaaagtttaggaaagactcgaagtcccacttaaagcgactacacatttatcggaaaagctctagcaagttgctaagagaaagtgatattctttaaattatacctgagggatattaggggtcactgtgccagctttgggattcggcatgagccctcttggtccgagaatttttcccaggctagccacctaagacgaacatgaaaatcattaaaatgtattatttattcaccgattattgaatgttatgtttaagcagttcatatatattagtttagacaagatgttcagagcaacaccttaggcatcatatctggtgaagcaatcaacttgtcaaactccataaatccacccttaatctgctctatcaaatcttctccaccaaccaaatcagctccagcgttctttgcttcatcgaatctttctcctgtagttacaataatatgtagtcaatacaagcatgtggaagaagaataaaaggaaaactcaatcatagcataaagagtccatgaaccttccaaagaaaattaaccaacacaaacccacaaaaaaaaaatgcaaatttcagcaaaacacaaagattttccgcagacgaaatgagatgcaataagtaggcaggaagttcatgcacacctcaggtgaaagaagataaatcattaatttccacaggccaaatcttgtgcaattagtaggtgggggagggcataaaaaatgcttttatgggaaaatcgtcaagattacaagcacaagttcataacccgtctattatacactaaatatacgaaaaatgataacacttgatgaccctaagtgaacaaagttcattcagtaaggagttcccttgttttcagtttgcagatattgacaacggggaagggctgatataacatggaatatatatatcatcgaaacatttcctaaacttacatccaccaaagatcatgtaagaggggtctaattggttctttaatctactcacacttacctcaccataaaacctttaacttgtaaacgaaacaagtttcaagatagagacacaagtacacatgataacacatacaaagaaatctgtatgtatgtggaaatagagagaagcaaactaggaacaaccttgagtaagaacagccactttaacagtctgtccagttcccttaggaagatttacctattaaagaaaacgccccggatcaaagtaggaataaaaagtagagaaacaaacatacacacaattgtcaatcaatcaccaatcaaggatcattaaacttacagttgcccttagctgttgatcattatatttcgggtcaatgttaaggcggaaatgcgcttcggctgtttccgtgaatttcgaacaagccatttgcttcatcaaagaaattgctgtcttcacatcatactcttgtttaatttccctcaacttttgaatttccaagaatctcttagaccttgtctgacagttgttaaaacataacaaaaattgagtgtttgatccattaaactaatcttcacagattgtgaaaactaataataaagattttctttctcttatatgcctcattcataccaataaattatgattacacataacaaacaaaagctataaaaactgttgtatccttaatatgatcaacaaactaactctaacttttttccatgactacaaattctgattatacccaatatcaaccaacaaacaagcccactactttctcacaaaatccaattctgaaaacaaaattcaacaatgaagaaaagtcctttacttttttcttttcataacaaaagtgttactttgtatgcatactattgtcaatcaaaacaagccaattcctcataatactaaaacaaaacccaacaaaaaatcactcaaaacaaacaaaaccaaacacagaattctcctaaaacatcaatatcatttgacaaaaattcaacaaatgaaacataattaacaaaacccaatataatgaacaaactaaatccaaacacagaatttccctaaaacatcaatataatcaacaacaattcaacaatgaaacataattaagaataaaaattcaaactttatcatcacatactctatccctcttcaaaagcaaagcagcttttccctttttgggtttcttaggagcagtaacagcagccgacccaacagctccttcttccttctcttccaccgcctcagccacctcagcctcagcagccacagcggaaacagccacaagtgggtaatgcccagatgagttgttggagtctctcctcaaatacccatcaacgaatttacatggttttctctctctacgcctcagaacaagtgggtagagagaaaaagttcttgaaaggggttttggtttgaaggagagaagagaagagtggatgttgatgctgatatcttgtgggtgtacagaagaggtggcgtatgatagcacgagcgaagaagatgttgttgttgttgtggttgtagtacaggtcgccattgttgaaaaaaagagctctctctctctgtgttgtgttgtgtttagtgtttgtgaaaatgaagaagatgaagattttggtagaaatgttatctatccataaaaaaaaaattggagataagaagagagaggcttttttcttgtctatagtacaacactctttcactatttaaggttttatataccatttttatggtatatagtacaatattctcaacaaataaatcattttaacataaataaattcaataaataaaaaaaaaaaaataacgacataagagcatctccaataatattttctaaacacacgacttgaaaattgagattttgggtgtttataaaatactcaatttaattcaattcgcatgattcaatttaatatgcaaactgtgcacttgtgcagattagattggattgaaaaaaaaaaatttacacttgtataaattagatgttgattgacatataaatataacaatcaaatctaattcacatatatttaaatacatttaaaaatttatatatatatagttgtgttgtggggaaaataattatagttatgtttgagaaaaaacagctacataaaactatagaaaaaagttaaacagaatgtttggtaaattataaattttaaagtgttgtgagttgttaaaattctattatattgatactgataatgttataatttagttgattataattacaaacatataaaaacttatgctatataaaatttttatatttttaattattttctccttaaagtataaatttagatgtatttgataaaacaaattatattatatttttattacatgtaaaaaaaattaaaaattcaaatatatgagaaactctaagttgatgtggaatattaataataaaaatataaaatataaaatattcttttaaagcaaaataaaaaaaaaagaatatttaaatattatttattttattataatttatttattatataataaataagtaaatatattttaagtaaatcaaaccagtattttttaaaaagttgagttgtaacaattttatcttctaggggtagtttctct

SEQ ID NO: 224895 - DNA, 4379 bp, Cannabis indica
ttttctcaggttttaaagcatcccctgtttaaaaaaaaaaaaaaaaacgtgtataggaaaacaacaaatagttgcaattttggcttttaggtgtttcggcaaaaaaacatttatttatttaacgttattgacttttattataaaaattaaaacataacataagaaaaggcataatcatatagttttatttttattttaatttaaaagaaaaatgaacaaacatgtatactttaaaagggacacaacatcagtttactttgaaattaattgaaatttgaggttaggttgaaattttggggttataaattctaagattattgcacacaatgtaccattgttgtattgtttgtatgtgtcaaataaaagtcaatcaaaattcaaattaacccttttggtcaatcttttttgagttgttgatgaagagagtacattgctttaacaaggatcaatattggtgccaattaccagaaatataatagtcggggaacaaaaatggaaaattatctaaacccccttttgattggcttaaaaggctaaacaaaattaattagttagattctacaatgaaatcatacatagtgctcttctagattgggcccactactgatgggtaggcccaaacccataatgaattcaattgaattccttcgcttaggtaggacacaaataagagaaagatgtttaagcacatcacatgtgagagagaatcaattcaatgggaaaaaggagactaaaatatcaagcaaaggataggatgctttatccctgtggtgatattgaatggaaatgtcaacatcaagtgttaggttgtgtttgattgaagaaaacacacaaaaataaaatctagggtttgaaaccattttctaacatctatttattattccaaaaaccatttaagccaacaatttcaatagaagtgcttatattaatgtttgtcattaagcagggttacatttgactatgcatacttaaattaagtgtatggttttattatatgcctccctcttaaatatcaaaagaaatatgctatattcttttttagtactaattttactcctcaaataataaaactaaaccccaattactacctcccctctcattcctgtcactctctctctacaaagtcacacacaacttgcgagattctgcattgccggagcaccatttgccggagtccatcaattttgcttgacaaccaagtgtctaggagcaacctaagctccctgccaacataatcttttgaaaaaaacaatgggtatgtaatttatttagtaattttattggattaagttatatttaattgtatttaggttgaaatgaatagatctacacatattattcttttattttgattgtcttattcctaaaactcgagcttgcgaaattctacatttttgggttttttttcgagttttagcgataatttgtgatatatagcgacattagagtatgttgaaggttagggatgacttttcacgatattttgcgatatgtagcgattaaattcacgacatgggccaatttatgctcaccgtgtacgatttttcgatgtctgtcgacattgtttacaacatctggagatagtttagagttatatgttggttaagttggggggaattttgtcgacatgttgcgatgttatgcaacttgcttgtcaacaggatttataatttgttgcgacataacttgcaatatttctcgacatatttttcattaactaattttttttccttctctttcttttgtagattcaattgcatttgtagttgtactgtataatggggcttggacagttgaacgtttcaactgaatattcaataacccaaagagtaagatgttattgtttgaagttgacactactttataaaagatgcatgaaattttgtatgaagagttggatataaacattcttgtgtatgaactaaaagtagaggtgtgttacatgtacatgaaagacaataagatacagttgaaggttttagtgaaagatagtcaagtaaaattgttcttaagaatgaaggcaaaagtgagtgtggagaacttgttgccactgtttgtgactaaggttaagaggcatgtaattttaagacctactctgccaactatccctccacgaagtattgttggtacttttgtcccagaagcagattcagaggtagatttgaatgagcaagcccctactaatatagatgaggacatggctgacaatacatttgatgagtttgatgctcccttttataataatgatcctgtggtagatttaaacaaggatggtgatgtgaagttacaagttgatgaagttgtagaggtacctactttgagattaaaactacctctaaggaactacaaagtgtttgaatgtttacacaacttgtatatatgcttcgaaatatggaactacatagattggaaaagatgaagttgtatcattgcacaactcatttaagttcataaagtgcaatcatcttttagtctgaactaatttacactaaagaaaatgtaaaatccccaaaagatttcaaatatatcattcaccaaggtactaacatcatccttaagagaatagaaatgtaatgtcaaacaaaaattagaaacagaaaccccaaaatgcaatgacagaaaatgataaatactaaacaaaatgattaacagaagaaaccaaatataacccaaaaccaacacccaatgaattcaaagaactaaaaactaagtataatcaattcaacagtatataattacttcttctacacaaaatcaagactcttacccatttcataaatgtgattctttcttttctttttcttaaatgtttcgaattaccgtgatgatacattattattcattgatcaaatcatcaaaacaattcataatcaagcaagctctaaatcatattcttctgggaagccatttctacctacaatcaaacttcagagaatgataaagaagaattccattttcgctattatgtaactacctaagctcagtataataagaatggagagggtttacactgaagaagatgtaaaatcccttaatattgtggtacatccatcatcctcaagagggtagaaatgtatgaactaacaaagtaaattcttgaaaatctatatcaatcagatactaaacaaatggttaacagaagaaaccaaatacaacccaaaaccaacagccaatgaattcaaagaactcataactaagtataatcaactcaacagtatatgattacttcttctacacaaaatcaagactcttacccatttcataaatgtgcttttctcttttctgtttcttaatcgaacttctcttaaatgttttgaattaccatgatgatacattattcattgatcaaatcagcaaaacaattcataaccaagcaagctctaaatcatattcttcagggaaatcatttctacctaaaatcaaactccattttcgctattaagtaactaagctcagtatataataagaatgtaaagggtttaagggtttttactatgaataatatatgattgttgaagaaattaattaatggagaggaagagattgcggcaacacaccgggaattttgaggatagaccagatgagctcgacggcgacggcgacggcgacggcgaccaaaacaggcggcgcgaggagagcacggcgaatgaggcgagttgagtttggcggtgaggtttaaatagtaatgactgatccaaacatgggattggaattacttatccttattcttattgttaattattatgtgccaaacatgggattggaattacttatccttattcttattcttatgtgccaaacaggagactagagctaatgacaaaagtctaaatggtagactagactagagttgtgggttgtatttggctaatttttttttgtataagttttctatataaattatttgatttttataaaaaatgtaaaaaatgataatatttaattaatgaataaaaaagaattttaaaaaataaaaataaagctaaagaaaatcaaacttattttgaaaaaatctcttcccttttgaatgagataatcacccaagtctttctttataattttacgggacctaaaaaaaattaaaattattagaattttatctaaaatggtacaaaataaatagtacgttttactcaattatcgataatattctttttaaaaaaatatatttgaaaataatttctaatacgaatggttgtttaaaatgtaattgtcataaaacttctaatcgagttattattatgttttattttgataaaaaatcaggctaggtactattttgttctattttttaatacacatgattcaatttgtcatttaacaacacaaatagtctaatcgataatttttacaaaacacaaagtttaaaataatattta

SEQ ID NO: 224896 - DNA, 2542 bp, Cannabis indica
aagagagtctgcccatgttagtgctctgcggcagttgattgtccctaatgggttttaactgtttttcttttaactttttccagaattccttcagtttctcttagttctatagcagtttttttttcattcttcccatttctgttaaactttacttgttctttcccttgaaattttcctttgtccttgtatctttaacttttgctgtgatggatccacttctacataagatgaaatcaaaaattaacctcactgaagatgaggaatctgtttttgaattccatgatactgaagccactctcccacaagcatctaacgactctgttctatatgcaagaattattaccaaaaagaaagtgtggttatcaactttgcaaaaacaaatggccgaacactgggatgggagattccctgtcaaaatatctgaatctctggatatgtttctgcttactttcggttgtgaaggggacaagattcgtgtattggatcgtgaaccctatcactttcagaatcatcacatagtcctatactctcctgaagttgggacaaactttacatctgaggatctgaaattcacacctttctgggtgcaagtataccgtctcccttttcttagcaagaccaaatctttggctattgcacttggtaacattattggggattataaagatgtttttgaagactctttaaacgaaggatggggtcccttcttgcgtatcagagtgctgttggacgtgtcgaaaccactaaagagaggaagaatgatttctctaagtcatgttaaggataagttttgggttgattttcgctatgagaggttacccgaatattgtatggaatgcggcgttattggtcatccgtttaacaagtgcgtggtttatcttgaacaattggaccgtggtgaagaaccggccttggaataccagccttttatcaagggatctgctttgccaacttcaaattatgatcgctacagaaccgactttgccaagggggatgcttggcctttgatcaccaggctggcaaaaagaagtttaacatctgcaatccctcagttaaacttgcgtgaacaacctcatcctcgcattctttatgctggagaatcatctgacaacaatactaatgaagtccctggtattaatgttgaaaatactactgctgctagtatcatggtgccaaagtctatgaattcaccaataacatttaaaccatcttctctaaatccacctactatgttgaattcaatttctttgggcagaattcgaaaaaattgccaaaatcttttgtctctgctgaatctactaccaatttctcagatctgtcatctatctatatgcctgctactgctcatcatcctttgaatacgtttgccacataccccccctccactcattccattgacgttcttaataaggagtctttggtaacccctgctacaaagacactgaatgttgaagctgccactgtaacttcaaatattgcagtctcgaaattggaaaaggagaattttaatccaaatgtgcagtccaaacggcaaaatgaaagtctttcactacgacaaacattaaagagatgccgaggaacaaccactactgacttcacttcaaccttgtcagttgaaaagaatgatcatcttcatgtttctaatgattttatggattcagatgatgaaattgacaattcagcggagactgttctgcagtcccgcaaacagccatgaagatcgtaagttggaatgctcgtggtttggggaacccgagtgctatccgaaaacttcgtttgcttgtcaaagagcaaacccccactgtacttttcattatggaaactaaattagcttgtaattctgttgtacgttttcgtagtcttttacatttcaataatggtttagaagttcctagagttggtcttagtggtggtttaatgttgttatggaaagatgatgttgatgtaacactaaacaatttcaatataaatgtttttgattgttatatggctttctcaaatggcccctcctggcacttaacggctttttatggtgctccttcaattccaaaccgattgcatacctggacactcttgaagaggctaaaagatgttgctcctatgctcccttggatggttattggggatttcaatgaaatcctttatagccataataaaaaaggaggtaacttgagaaatgaatcccaaatggatgagttcagatcagttttggatacttgcaatttgaatgaattgccttttaagggagacccctttacttggactaaaggaaggcatcgagtggacacaattaaggagcgattggactggtgtttcactaatgatttgtggaactcttcttttcaacctttacaaacatcacatttggacttctactcttcagatcatcgagcaattgcagttaatgtgctaactcttgactcttctcagcatgcaccagcaaggagaacacggtttagatttgaaaaaatgtggcaaaaagaagaagaagctgctgctattattcgaaccaattggtcttcggataacccaagggatattg

SEQ ID NO: 224897 - DNA, 5201 bp, Cannabis indica
gtcaatattgtttttaaaaaacactaaccaatcatgattgttaaaacttcaaaaattatttttgttctcatttctaaaaataattttttcaaaacaaaaaacagaaaacaataccaaacatgctcttagctttcgagattacaaatcagctcacttgagaggcaatgatcaaacacacattgctctctttaacatccctccaattcactctctaaagactcagaaaactttagcacaaaatgaaatataggataaggactatagctaggacagaaactgaaaactaactaactaacatttctccttagtatttatattattttgtgtgatgcaaatatcactttgatgtatattatttagtgctgctcctgagaaattaagataccataatctgtctatcctcttgtgcaaaacaaaatatgaaaccacacttatttttctaatatgatttcactgacccaatgagaactgttcgaaatgtagtttaaatattttaattctattctatatttctccaagaaatattgtctcataaacatatcttgcattatatgttctcttgtcaaccccatacatattgttctcttgttgaactgtctaaatgattaccttaattcattgctcactaactctaaaaaatcaagcatacccaaaccttgacggtaagtacaattactcattttaagcatgattttacaattacgaattaatatttggtgtcattttcatttaatcttgattgaatttaagcttcaagctatcaaatttagctgtcatatatatatttttgtagtttcttgttaatttcaaaaatttattactccataaatcatgaacaggcgtgcttgttgattatattcactcggatgtgtttgaaaaaaatttgtgaaatggtagattctcaggagattgtagactctatacaggcaaaaatataagatcgaaagatgttaaaaaaataattaaaaaattacgactagtcaatatcattactagtgatgctgaggagatgaaaataaaaaatagaagtgtgaaagaatgacttaatgaactaaaagaagcttcccatgagttagagaacttaataaatgagataagaacaaatattttggaatgcatagtgaaaagtgagcctggaagcagttgtgaaagtcaagcattttcacttattctagttgtcaaagtagaacccaaaataagagagctactagatgaagtagaatgcaatttaattcaaataaatgttctcaatttaaggaaaaaataattaaaaataaaacattttgatcattaccttgcccctttagtgaaagaatgtgatatcctaagtaggagttttgacaagaatcatattgctgggtagttaaattcaattgtatgcagtactcaaactgatgtcctttctatagtatgaatataactaactcatttatagtgatgatagagtgaacgattattttaatagtattgtcaacttagagaaaatgagtctcagatacaaaaactattataataaagagctttacgatagcaatgatttcaactccagatttacttgaaatgctttttggccagcaatttcttttttgtcctagatgacgtataaaacgaaattacaacaagtgagattatcttaaaagttgttttgagtcttgagcttgggaaagtaaaatcgtaatgactactagaagttaagttgtagcgtcaaaagttagtaatgccacaagctatcacatgtataaacactatccaatgattattgttggagattgctaagcatgcctttaataatgttcaaaactcatgtggacattcaaatttagaaacaactgataggtagattattacaaagtgtaataattttacattgacagtgaaatcaatcaatggacttttgcgttcagaattaaatccaaaaaaatggaatattttacttaagagcgacatatgaaagttacccgagagagaaagtaatatcattcaaactttgtggttgagttactattatctgctaacacatctaacgaaatgaataacatattgctcgatactttccaagcattaataatttgaacaaaaagaattagtctggatgtggatgagagaagataatttgcaatgcgagaaagagaaaaagatagaagatgttggggaagagtactttgagcatcttgtagctaggtcattgatccaaagatcagggataagaggttttattatgcatggataattgaatgacttggtaaaatttatttcgggaaattttaattgcaggataaaacttgatgaatttggtagcattagaagcaatttactcttcatgtgtcatataaaaaaaaagggacattgacagtgtaataaaatttatggactttgttgaaataatgtctttgcgacatttttaccattagaatacccggaagctggcgaggagcttgtatgaaacaaacatgtattagataaactcttgtagtttgctaaatattagcaaattctttgtcttttttattatcctataccataattgtctagttttattgccaaattaaggtgtttaaaatacatggatctataaacaactcttcttatattgttgtcgggtgagatttgtcatatttatacaatttacaaacatcattgttgaaaagttgtaagtacctcacctagttacctattcatatataattgataaatttgcagatgcgaacattattgatacaaaaataacataaatgcaaggagtaaagtttgcacatcttttatgtctgacattcctgctagcatttttgttacttttgtatcaatcatgttttgataatgcaaacttatcaatcttcctatatcaacgggtaaccgaacgaggtacttaaaacttatcaatagtagtgtttgtaaattgtacaattgacaaatattcttcgacaacaattaaaaagagttgatgataagtccaagtacctcaaatgccttgatttgccaatagaactacacaatcatattatacgataataaaaaagggaaagaatttgcaaatatttagctgatgagaagagtttatctaacatttattcatttcatacaagttcctcgccaatcttcgcgtattttaattgaaaaaacattcgcagagacgtcatttcaacaaagtccataaattttattacactattaatgtttattttcaaatgacaaatgaagagtagaactgcttataatggtactaaattcatcaagttctaatgtgcaactaaaatttcttgagataaattttctaggtcattcactaatccattgataatgaaactattgttatcatcaatctttggatcaataacctagctacaaggtgctcaaagtactctttcccaacatcttttatgtttttttctttcttgggttgcaaaagactttcttccatccacatctaaactaatttcttttgctcaaatatataatatttgaaaagtctcgagcaatacgcttgccatctctttagatgtagcgacaaatagttgtaacttaatcataaaggtagaataatattattttctcactaggataacttccatatgttgctcttaagtaaaatattccactcttttgtatttaattctgaacgtaaaagttcactatgtgattttactgccaatgcaaagttattgcaattcccaataatatacctactaactatttctaaatttgaatgtttagatgagttttgagcatattattaaagatgtgcttagcaataaactccaacaatcatcaatgaatggtgtttatataggtaatagcttatggcatcactcattttttaggtacaatttcacttttagtagttattgtaattttactttttcgagctcaatactaaaataacttttaaaataatcgcaattgttgtaattttcgttccacatcatctaggataaaaaaaaatactggctaaaaagcagttgcaagttaacctggagttgataaaagtcattgttatcataagactccttactttactagcatttgtatctgaaattcattttagctaagttgacaatgctatcaaatagcatctttatcagcttatattcatcgtacttgtaagatgcatcaactcttgttataatatcaaaatatttttttattctatcatcactataaataaattaagctatattcgtcttcccaatcccaatcatttattcaataaaaggacaccaagtttaaaactgcatacaacttaaaccaaccaccaatcaatatgattcttatcaaaatcacacattgaatatcgcattcttacaccaaaagagcaaggtaataatctgaatgctctatttttaatcctattcctaaactgaaaacatattttttaattaaattgttttctactttatttagtaggtctcttattttggattctactttgacagcgagattaagtaaaagttcttgactttcacaattgcttccagttcacttttcaccttgcatcccaaaatatggattcttatctcatctattaagttttctaactagtatgaagtttcttttatttcataaagttagtcattcacatttctattttttatttgcatctgcttaacatcacaagtaacagagtcaactaactgtaattttctaattattttcttaaaacatttttccatccaattttttttacccgtataaaatctataatctcttaaaaatctactctttcactaattttttcaaacatgactaagagaatagaaccaacaagagcatgtgtcatgatttatggagtcacaaattccttaaaataagaagaaaccaaaaatatgtatatgacaactaaattagatagcttaaaagttcaattcaatgaaaattaaatgaaaataacaccaaatattaatttttaattataaaatcatactaaaaaaatttcgtaattgtacataccatcaagattggatgagctttgtttgatcttaagcaaatgcagcggcatctgaagaagctccgtaactttcttgaagatttacaatgtatggtttgggcctgtttgatttccatagattttcagagttagtgagttttgaattcacaatggtaatcattagagagttgaacaagaaacattacagtagttggggctttaaaaagtagttttactaggaaacaatgaaattgcatgatatatatatatatatatgttt

SEQ ID NO: 224898 - DNA, 2965 bp, Cannabis indica
aaatagaagacagaggtgtagcatgattgagttgaggagagtcaaatttgtatagccctttctcaagcttcccaactaataatatcttctgagtgactgaatccttgacacaataagaaaattggtgaaatttaaagaatacattattatcttgtgcaaacaggagactcttgataatagatggaacatgtaagagattattaatactgagggattgagaagagaaaggagagagaagaaaggatttaccaatatgctcgatgcttagaccagtgccattaccaacatagatctgttcattatctgtatagggtgtgcttgtgccaagattggagttgtctggtgtgaggtgatgagtttcaccagatctctagataccagctatcaccacatacagattcagaggtggcatacatgacttgcatctcagcaatgttggcattagcaggaaagtttgtgaaagattcaagacctgtaaaagacttgtccaaacaataaaaatattatttaacagtatggccaaccatgtggcataattggcattgaattctctggccagaagagttgttggtgccacagctatttccagggggaccaccaaggccagtagaaccacctctaacataagggggaccacctcgtgacatggtttgagatgagggaccaccatacatgttaccagatccatcaaaatgagaggggccacctctgtgactggtaaaaggattctgagatccattaaaaataggtttggaaaaattgttatacccaattggcttcgtatgagaaagatttatctcacctttgctgacatcaagattcttggcattattatcgattctcatggattgaaccattaagagagcttcgattggccaagatcaaagacagtcactgaagtcagaagttttttttattttagttggatactatcaatgttttgttgaggggttttccaagatctcaatgcctttaacaaaattaactaagaaaaatcaacgttttttacaaatagatgtgaaaccagtttccatgagttgaagcaacgattgatcatagttttggtattagcattaccatcagattggaaaaaatttgtcgtttactgtgatgcgtctggacagggtctgtggtgtgttctaatgtaagctgataggactattgcttatgcctctcgtcagttaaaggagtatagtaacaatacccaacacatcaattatgcgtttggatatatacataaagtgtccgaaaatatttcatattctgaaaaattgaatttttattaagtttttgaattgaattttttatgtactttggtattcttttataattagtaagtatattaaacctaatcaatgatatttgaaatacaattataacaaacaatattcttgttaaagatattttttaaacagttctaatcggtgtaggtcgttgcaatcttactacgagataataatttttttagcttttgatgattatttgttattttagacctaatcaagggttaattagattgtaattactattcaatattgttcttatttattgttcttattgattgttgatacattataaattattaaaatacataaataataaaaaatatatataagcaaattaagggtgattatctactgtaaaaagttatctaaaccaaatcacgaataggcttttcctagtacgacaaagcaccgagtgcaatattgcgcgggaaaatattaatatggaacctccaaaatttaatttttgtcgatgcaatatacaagtcctacaaagttcactacttttgtcaacgcgaagaaacgtcaacataagtcaactatacagaatcggttattattttttaaaaggttgttttcccaacacataccaatttgcgccagcaaaagatccatgagtagccactacttttatctaactctctagttaatcttgcggaaaaagttttaactctttgacagtgcaaaaataaatattttcatcggcacaaagcgcaaaaacttatttccctgaagtagcttataacaatgctcttttaatattttacaaaagatcttgatctctcatcattaccatatgctctcaatacttagccaagtggtatttttctttatattattatgggcatgctattcagagttatttcaataggaaaatatatatatatcatttatataaatttcaaaaggaagtaataagagatcacgatcgatctattaaaggattaataatgattacaatttacagtgatataatcaaaagcacatggaaggatatatataggatccaaaaatactaatgcatgggccctaaaataaaatactttagggttctcttcatattattatcaatttatgatggtgaatatctttaatctttcacacacactaaaatataattttcttggaaaagtttttcaagaaaaagacagataaaaaaggtcacatcgccatatacatacgcgcacaatgatcttatggattagaaatgaagctatctatctatctaaaatgtatatatttttttattttatattattttaaaatttataaatatatatattatattaccgttgcgtttttcctaagaaagacattaattttatggactatatggtgtctttttttttcttttaaaaggataaaagatatatagctatgttaaaggaaacaagaacaaacagcatgtaacacgaatgcactaataaagaaacacaatatatcctttcaaattaaacccaaaaataataatcactaaataaaaacttttgtcccaatcttggttacagctaaacttcaagacttattgtatactaataaaattaacacaacaagatgtaccccaccacatctatatacgcgtgaagtggggccctttctcaagtaatttttctttttttctttcatattaatttatagattactactattaattatttatatatgtattatgtatatgtata

SEQ ID NO: 224899 - DNA, 8898 bp, Cannabis indica
tgttgtaatatgtatacagtccattagttaatatctgcaagatgactttttttgttataacatctagtctaagctattattacattttcgttgttttagatggtgaagggagtcaagagaaggctgcactatctagtcagggaaaattacacgcgaaaggtggtcactcgaaaaaatcaaagaagggcgggtatgttcattttacttgtttgaatctgtgattttctgtttatgttagccttagaaattgtgagtgttatattcattcatgcacttaatgatatattgttagaccttagaaagatataaagatatgggtgcttgataactaacccctcttgctggtctcactattctatgctatgttttctgcagagtttgttgttctaattcttgtgtcttgattttcttacagaaggcgtcataaagccgattgtttatgtgctatatgtgttctaaagcgtcgtagaagggagcgtgaggagaatgatcgaatagcgaaaggtcagattggaggcagtgataataatctttctcaagagttgaagcaagaggtaacaattggtttatgatttgacagtttttatttacttttgagatgtttgggaaatttaaggccggccaattgagttgcaggaagaagttgctttagtattttgtttcatttcgtttgttctataggaatcttcaccggcagaaagtccttctggcgaaaattcatcgtcagatatggatgaatcttcagcagacccaaatgcaactgctgaaggggaagaaagaaaagaagggacaatggaggaatctaagcagcagtcgcaacctttggctgagaaggaaaaagaggaagagaatgaagacgaggatgaggagggggatgatgacgacgacgatgatgatgcagatggagagaatggcgtggaggtcgcaaatgaagaaaatgttgaaaccccagagcagtttgataaatcaaacgaggacgctgataaacgatctcaacaagcaataggagaggagtcgggtgacagaattcaatccgatactcatcgaaaagaagacacaacaatccagcacgaggaaagaacgatagatgttgatcgacataagaataaggtattcattaagtaatatcataatgattctcttgagggaatatgttagagagtttatgataatttttgtttgtttcaggaaatcgaagaatcacataaaaaatttaaagttaaccagattaagcttttggaaaatcctatgcttttggatttgtgtggagttctattccctgataatcccaagtccatatggagaggacctcattctttagttcactgtaagaatacttctcgtcgaagctcgattcacacagctatcgattcactcatgaaatcggccaaccagtaaaagggtttttagatttacactcttggcaacatttctcatggagctgtgagccaatctagctaaaaacattagcaaaatttctgtcttgttatatttttttttattttagttggggcaatatatgtgtaacatatatatcatgttaagaatgaataataatttgtagcatttatgtacaaatatgtgattatttcaattctcattttccattgtgctacttttaagtttccaaacagtctaatattgcaaagtacagaaaagaaacaagaaaaagaaaacaatgaattaaacaagaaacaacttggttcagaaaatcaacttgatttctacaagtctaaccaaaccagttaccagagatgtgtttggaaatgaacttcttcatctcctaatagaaatcagactcttttcatatatcggaactgtatcataaaatcttccatttttaacttagatcataatcaacacttcttaactcttcagtacgaatgttgcaagaaaccaaatgttgttttccatcattgtcaaagacttccattaaaatctcatcattcttccagaatggtagaaaatgtccggaatgcttttctagcggtccaatctccccagtccaaaaataatcacctgttacgtctttcttcaagatgaagatagaaagaattctctgaccaataggggtgaaacacatcacaaccgaatcattccacactgcaaggcgaagcgaataatcttcggggtcccagtctccatcacccaaagcatcaaaatctggcaattctatcatacgaaattcctcattactcatatcaaaactgaggatcatttcagtttcatcttgggcaatacaccagtaacaaacacctccacaacatacatcatcagatacctgtttacctctaatatactgcattatgacttgagatatgttgatctctttccaagaatcaaaacccactgtgtaaacctgaacacaacatttattatgatcgagccaaatagcaacacatttgtatttgttgtttctagaatcatgtccaaaatctataatgggaatagattcaatgctagcattctttggttttgggagaatcatgaattctttcaaagtaggattacataacaccatagtcttgagaccataatttgctagcaaaaggagtccatcacagtgaaacatgctatcccatcgattcatatccaaacgtggtaaagttagatcttctgtgacagttataaaatgatccttcttaccatcatcatcatcatcatcatcatcatcatggattatagtgagcaatgagtattcgattaagcgattatcgacaccgggggaaggctctttgaaacaaagtaaggacatagaagactggtttttggtcatgagaaggtgtttggccacaaatattggattgtcgatgaaagttgaaatacaagaataccaaaacttgttcatcaatttaaactctactaaacaatctgcaggtaccaacaacatgattttcgccacaacctcacttggcaaatcagaaaatttagccatttctgccatgaatgatcaaactaagcttttaatcaaaactaatcaaaacttgtttgttcataaagacagaatatactaaaaacttaagaccacaatatcaaaaaacttatctgaaagataaatgaaaataaaaatagtacagaaatgaagtgaagtgagtagctgaccttaatttgtgtatgattaagctcttcctcttctttcttttcaacctggtacttaaacctaacagattaaaaacaaaaatgcatgtaatcaacaatggtgggtatgaaatgaagttaaaaggtgttggtttgaaaatggagttgaatgaatcgattgctgcaaataaaatcaagaatagctgtaacagaaatgtacagctggacaaaacaacccttaacaacctataactaacttaatacaaagcttaaataacagaattccaactaatcctaacaagtactgtttgaaaatgagtgacatgttattaactgtcgttttctaatgttttgtgtcgtttttgtatacgacgaaaatcattatggttgagaaaacgacattaatcgtcaaaaaacgacactaactgagaaaaaggataaaaatggcttaaaatgagtcatgactaaatttgacacattcgatttatggtaagtaccatatttacatgattagcttataacaccacgatgagtggtatttaattaaattgtaggaactgatgcttaatacaaatagcaatataatattttagaaattgtaaggtgccataaattgttaggattttcacaaccttttctgtcttacaaacaactgaagaagaataagctagtttgtcacactctcatgcattttatatatatatatgtgtatatatatattatattgcaccagagcagtacatgaaaagtattctccataacacatttcaaaatcaattactcactcagtcagtacttgtcttctcttcttcagtagttggttagtgagttagtcaaaaagttgaacatcaaagatgataatgataagataaaaatctcaatttggatattcaaagtttactaattatggacaaagtttaactactaatgactgaaacataataagtagaagtactcctactgaagggatgatcatcatcatcatgaggatccaaaatcaccttcttcacaaaaatctcctcaaatttgtgttttcgtttcatataaatcttgaacacatgcctggctgccatagtcaaacttcttcatcctctcctaatagaaatcaaactcttttcataaagacaaactgaatcataaagtatgtgtatttttctatctagatcaaaagcaacatttcttaactcttcggtgtgaatgttgcaagaagccaagtgatttacgcgtatatcatcttcaaagacttccattagaatctcatttttcttccaagcacaacaagcacctgctgcagattcatacatggtgaagataaaaaggatgttgtcatcaagattgtgggtatccccaaaaaagggagccaaagacatggcatcatcacttgtacaaaaaggtgtactatagaacacaacatactaatatatccagtaaaaaacctatatgattaacctacaaaaaaaaaagaaagataataaatacaaaaatgagtggctaaccttaatttgtgtatgattaagctcttcttcctcttccttttcaatcttgtttttaacccttgcaaatttaaaagcagaaaagaagaaagaagaaacaaatatataaaaatgatttctttactatataattcagttcaaaaatttccatgactaagcaagtcttacaaaactccccaaatacattaaacccaccaataattatgacgtagaaagaacaataaccttattataggaactttgcaattaatagtaatgccagaatcaataattaattacttacttgtgttgtgttgtgttgtcaagaaagatcaatagcaagagttgagttgctcaacaaaatctcaccatggaattaaggagtgatagtgactgtgtttgagcctttgagcgtcaagaaccatcttacaactgatttctatatttaagtgtcctagttaaactttgtggtaaatgaaaatgtgatatgaacatgaaacatgtataaataagaatatgtcaaagctccaaatgagtttttgtattgtatgtaatgaattgagacttgagagttttcttttatgatataatcaatcaatataactttgttataattctttattgttgatagtcaagtattatcatggagatgaaaaactgttccgggcagcctcggttgggcatggttggttcttgatggagagttcatttccatggatttgaggatcacattcacattcatttccaaatccaaataagctcattttttgttgccttccaaaaagaccaacatgaaatttagaaccatttgggggaattcacattttattgtcctattcctacaaagtctaaccagtaaaccagtaaaagagattatctttttgaacaaatattcttatgtttaaactatatatcaaagtattaaaaaaaactgtgaaaggcatcaataatgacttcatttcattacatagataatgtttaaatcataaaatcaaacttaacaaataacattttagtctctacacttctagagccaaaccagagagtttggaaattaaatttccttcactccctcctacctaatagaaaccagacttttttcatacaaacataacgaattataacatatctctagttttctatctacaccaaaaacatttcttaactttccagtacgaatgttgcaagaagcaaagtgttcttcactaccatctccaaagacatacatcagaatctcatcattcttccaaaatggtagtaagttatagtaatacttctctagtggtccaatctgcacatatttggtccaaccacctgctacgcctttatccatggtgaagaccaaaatgatgaacttatcccgccatgggaaatcaggggccaaatacatcacaacagaatcattccacactgccaagcgtggattataagatccgaaccaatcttcagcggcatataaatgtttaaaatctggcaagtgtatcatacgaaattcctcactactcatatcaaaactgaggatcttatcaattccaagttggttacaccagtaacaaacacctccaaaacatacagcattgcatagttcagttacttcaggatgatctatataatccattacgtcttgagacatgttgatctctctccaagaatcagaacccactgtgtatacctcaactttacattcttctctatgaagacaaatggaaacacatttgtatttgttgtttctagaatcatgttcaaatcctatgtggtgataagctttaaacttaacattattcttcggttgtgggagaatcaattctttcaaggcaggattacacaacgccatagttatagtctcctcaataccataatttactagcaaaagaagtccatcacagtgatatattttattccatctattcatatccaaaagtggcatactcagatctactgtgactgttctaaaatgatccttcttaccatcatcatcatcatcttcaaggataatagtgacaacatcatcatcatcatcatggattacagtaacatcatcatcatagccgttgattatagtgacatgatcattatcatggattatagtgtcatcgtcatcatcatggattatagtgtcatcatcatcagcaccttcatcattaccatcaacatggactatattgagcaatgggtatgtgatcatgcgatgatcgtcatggggataagggtcgttgaaacaaagaaaggatatggaagattcatttttggtattgaggaggtgcttagatacaaattttggatcgttgatgaaagtggaaatacaagaataccaaaacttgttcacagatttacattctactagagaatttgcaggcaccaacaacatgattttctccacaacttcacttggcaaatcacaaaatctccccatttctgccatcaatgatcaaactaagcttataatcaaaataactttaaaaaaggaataagattataaaaagatgcaattgttcattcataggacaaaatatactaaaaaatcatgacagaaaaatccaaacttcaaagattttgttcagttgaaaaagaaaacaataaaaaaaatggaaataaattcagaagtgaagtgagtggctgaccttaatttctgtatttctgtatgattaagctcttcctctccttccttttctactctggtttctaactcaaaccagaaaaagaacccagaagaaggaagacaacacaaacaaaataaaaaaagaatggtatttctcttgaatttttctatgagctattcttattctacagtactcccatatatatatatataggtaaattataaaagcaaataatacattgaactgaaccaacccataccataattatgattacatagaaacaatacaatacacctttttgaaaaccccaaacaactgtaggacttcccaatacaagaagaataattgtcaattcatatttccaatacaatttaccaactcatttttatttaacttctccatcacaaaatattaactcaacattttttttctttcattttttgctggctgaattaagagtgatattgattaggaaatcctttaaaggttttataatggatacgattcaagtttaaacaataagtgatagtgattagtataacatatagtgaaggatttccacaaccatttctttcttagtgaaatatttcactgaagaagaacaagcttgttagtcacactctcatgcattttatgatgaatgaattatctacacaaacttattaccaactgtactctgtacatatatatatataaatatatgttataaagctgtcctaggtgaccaaattgtgacattaagacctgaaataaagaaagaaagcataatgcaccagaccagaacatgaagaagattttgaggaagctccaacctgaaattaagatgaaactgaatcaggagtttggattcaaaaaaaaatttggaccatttctcgatttgtgcgtgtcatccttgcgcaggggccatgctaatcttctctgtatcgttccaattttatcggatgtccccgaagggacaagtaatgtcactgaggtaaggatatataaacactctaaggaaatgttatattggcgatgtgggacaattagaatttgtactttgtacaaatcaaatctgtgggccgttatttacaaggtaacaaatttgttgttggtaaagaccggcccaatacaaacagagcctgctatgctttggatgagtgactgacttatgtgtcgttctcttatgttttctgtcgttttttgtaaagacttaaataaaagtttctatattttatgagtgccaaaagcatatataattaaactaaatatgtatcattggaaaatagtaaactaagccaaagagactcaacataaattcactaaaaaaattagatatcatagtatattattggacccatctcgaaatattttttcgcattagtcacaatgaattcgtactactaagacgtgaatatgaagattaatttcatgggaggaagccaagattgttgtcaatcacttttctaatagttacgttaagccaaaacctagttttcaagcactaacaatcatttttatcgaaattgtaaaaatctcacattttttatagtggtactccgttgtgaaatgtcgcccgaaccatatcaaaatatttatccccactcgtcacaataaattggtactactaagacgtgaataagaagattagttttgagttaaattttgttaaaatagcctcctaattaaacaattaaaaatattcttcttttcaaaataaattttaacaagttttttttttccttattcttacactcgttagtgttctc

SEQ ID NO: 224900 - DNA, 6032 bp, Cannabis indica
ggatgcacaaggaattaataagttagtgagtttacttggaaaattctgggtctccttattggaagctcagatatataggctcatggtccccatactagttgagacaatactacttgtcagactcaattaattgattttgattaatcaattataattctaaaattaaactatgtctagtttataaattttcactaagcaagggcttaattgtgaagaaagagtttctaagatttgtttgttaattatatcttgcatattatcaatgaatcaattttatataagttgaaaaaaattaaaatatcacccacaattaaaaattactgtaattcaaaaaataaacatcaataatattaaaataacataattaaaaaataatacataattttgttcttatttttcttttaataatctattaaattattttcaaatatatatataaatgtcaattcaaaaataatcttaatttcaaaaatatattaatattaaatatttaaaaatatcatttatgaatgttatattaacactttaaaattttatattcatattatcatataaattttaaatatgttaatcaataataacagaacataaattaataaatcttctctaatacaacaaaataaatacaatggtaaaatacaataataaaaacaaatacaaaatttagaaatttagagcgtctgcccacttcttggtgctctgtggcagttttctacggttaaggcagttttttcttgttttttcctagttttctctctgcattttttcacaaacttcctatcaataactgaattatcttttctgcattggatctccggttgctcggatccttacacgaataagatgaaagaacctatgaaacaaacagaggatgaggaatctgttttcgatttaactgatatggcttttgttgataatcatgctacttctgaccatgtgttatatgccaaggttctcactaccaaaaaagtatggctttccaccttcaagaaccaaatggcacaatattggaatggctggtttcctgtcacgattactgagtcttttgaaatgttttcactaagtttcggctacgcaggagacaaggcaagggtcctacttaaagagccataacactttcaaaaccatcatatcgtatttcactcgcctatgcctggatagaatgttcactatggttccctcatctttactcctttttgggttcagatatacaggcttccttttctcaacaaaactagagggcttgccaaagctcttggtaacatcattggtgaatatgtagatgtctatgaggattctctcaacgaggggttgggaccttttctacgtgtccgagttaatattgatacaacaaaatcattgttgagaggtagaatgataaatttacagcaagcaaaggaaaagttttgggtagaattcagatatgaaagactacccgaatattgtatggagtgtggcatttggggcatccttttgataagtgcctaatttatcttgaaaagatggacaatggtgaagaaccagagttggaatataggcctaccatgaagggttcaccactgtcgatctcgagttatgaccgctatcgaactgacttctcaaagggtgatgcttggccattgctcactcgtttggccaaaaattccctcatctcggcaattccaaatctgaaaaaatcaagatcctccacatccaagataactgattaaaggcgaagcctctcaattaagtgatatagcctcttttgtcacaacaaccattacaccaatacttgcagaagcatccaatccacacaccatctcacttggatgttcaaatctacacactgctcttgaaaattacaagtctgttcttgctgaatccctcactacacaagccaacaatgcatcaaggccttcggttgacttcacaccagcaatattactaccaatggctgcatcccatgctcttaccaacaaaactatgcaacactctgctgctatgaaccgctcaacatcacagcctaaaacaagtgatgcatttactgatctgtctggggtttttaccccatttgttgtaatgaacagagccccaaatgtttatgcaacctaccctccaacaagcagtccattcaagcaaacaaaaacatgccaacttgacactctaattccctgcaatacttacaatatgtcgcagccaatagttactcctggtgcaaaaaagcaaggtggaaaataaaatttgtcaccaaattgtcttatcaaaaggcaatcggagggaattagcttgaggcgaactcttaaaaggtgcatgggcaatcaaacacaattgttcatttctcctttgtcagttgaaaatgaaccccaccttgatgtttctattgaccaaatggattctactggtgcaaatgacagcaatgcggagtcttaggtccagcttcgcaatcagccatgaaaatcattagttagaactctcgtggtttggggaacttgagtgctttccgtcatctcaaattgcttgtaaaagagcaatccccaagtgtgttatttatcatggaaactaagttggatcctaattctatttctcactttcgtagtgttttacattttaataatggacttgaagtcccacgtgttggtcttagtggaggtttgacgttactttggaaagatgatgtagatgtaaccctcttaaattttaatataaatattttcgatttctacatggcttgtggaaatggtccaacttggcagtttactgcttttatggtgctttggctgctcataatcgtcaccacttggacacttttagagttaaaagatgttgcacctttgctaccatggttagtaattggagactagtaattggagactttaatgaaactttgtcaaatcataataagtcaggaggggctttgcgaaatgaggcacaaatggataaattcagacatgttcttgattgttgccagttgcatgaacaagcttttaaaggagatcaatttacatgtattaaaagaatacattcaattgatacaattaaagagcggttagattggtgcttcgttaacacactttggtgtgagacttttcaacaaattactacacaccaccttgactttaaccattcagaccatcgggctattgctgtccaaattctgccacttaattcatcacatcagcaacgtatcagacacacaaggtttacatttgagaagatatggttacaagaagaagaagctaccaacttaattcaacaaaattggcagcagtctttgatagaaaatgatgctgctgtcttcaaaaacaatctcagtaggtgtgctgattcacttcaacaatggcataaacagaaatttggcaacttcaaaaataaaaaattttgagtgcagaagaaggtagcagacttgaataatgctttagaccgaaccccaaatgttgtccaagaataattgaaacaccatgaaaatgttttagatgacttgctagctcaagaagaagcatattggcagcagtgctcccgtgtggattggatgcaaaatggagatcaaaacacaaaaaaaattcatgcctatgcatcatctcgatgacaacataacaccattaagtctctggttgataacaattgaaatgttgtccattcaaaacaaggtatgactgaaatcataacagcctactttggtgatttgttcactgctactgcaatgaattctgaagctttaaaccacacacttgcaactatacctactatagtcacggctgctatgaatgagtctttgattccgccttttacaagtgatgaaatctacaatgctctcaaaacaataaatctagataaaagtccgggtagtgacggtatgtcagcaatgtactaccataaatattggtccattgttggagatgtggtcacctaagttgttttgggagttttgaatgatggttgtagtatggagtccattaatcacgcactcatcacacttatcctaaagatcaaggctcctcgtggtatgggtgattttcgaccgattagcctatgcattgtcatttcaaaatcatctcaaagactcttgctgtcagatttaaggctattcttccagctgtaatatctaaaactcaaagtgcttttctcttgaatcgactcatcactgacaatatccttgtggcttttgaattgatacatcacttgaaacatagaacaagggggaatagaagctactcagcgctcaaattggatatgagcaaagcatttgacagagtggagtggttctacattcaagaggttatgcgtaaaatgggattccataacaaatggatttcattgatcatgagttgtctaagttccacaagcttctcattcatgcttaatggcgaagaagtgggttatgtccaacctaccaggggtcttcggcaaggtgaccctttgtcaccatatttatttttgatttgctctgaaggcttatcgagactattacagagtgaagaatcgattcagaaccttaaaggcttacgtttgacacgtcatgccccattgatttcacatctactcttcgtggatgacagtctccttttttgtgaagctacaaacagttcggtcattgctattaaaaaggtacttgatatctatcacaaggcatcaggtcaattgttggattcaatgaagtcagttatgtccttctcacacaacaccacacaagaagcccaggattttttccatcaaacattaggcatgcctatcagtgaatgtcatgaacgttaccttggacttcttgctttttctgagtgtgaaaaagaaaatagttcagtgacgtgaaagaacgaatatggcaaaaactacatgcatggaatgagaaactcttatcagtaggtggaaaagaggtacttttgaaagcagtagttcaatcaattcctacatatgccatgagttgcttccgattgccatctactttctgtaaccaactagaattcatgatggccaggttttggtggggttctaacaaagatggttcaaagattcattggagaagttggaaatcgctatgtaagtcaaaatttgaaggtggaatgggtttccgctcctttgtgcattttaacaaggcccttctagaaaagcaagcttggcgaatttttgaaatgcctaattctctgctaagtcaattgcttaaacatagatacttttcaaataaaaactttatggaagcacgatttggtcactcaccttcactcacttggcaaggaatctattggggacgtgaattgctagttgaaggactacgttataagattggcaatggtttcaatgttttggctggttttgacaaatggataccgggccataatgacttcaaagcaattagctacaatggtccagataatttaaccgtggccaacttcattactgatcatagagaatggaacataccactcctaaatcaatacttccagtctattgatgtggacagaattgtcacaatacctcttagcttctttccatccaatgattgtctcatttggcaccacactacttacacagttagtttaggctttcacttagctgagaatttggctgaggaacgtgagtctagtggttcaaactctcataggaattggtggaaaactttctggagtttaaacttaccatcaaaggttaaatttttgcatggagggtaatgcaaaatgctctacctgtagctactggtctgtgccaaaggaaattgatagattctgcaactttctcgttgtgtaataatacgtgggaatcgatcggtcatgctttctttagttgcatcaaagcaaggatggtttggagagaaactaagttcaccattgatcatacacatgcccataatatgtacaatggtgattacttaatccatttatccaccctacattctaagcaagatttcgaattaattgtttgtaccatgtgggctatatggcacgaaagaaatagggtcattcatggggagtgtcgaaaactagtcatgtcattgctacatttgcaagttcacatcttgaaaaatatggtcgggctagaacaagaaaccagcagcagtatgt

SEQ ID NO: 224901 - DNA, 7056 bp, Cannabis indica
tttaatttaaataaataaataaataaaataaactagaaagactccgaaagactaatggagaaatataaggcaaaagcaatgtgacaattttgtactttctaatcatatgacataataatatgtacaacgatttctctacaatgatctcattcccaaaaactacattctgcactgtgtcgacgactgactagccaaaaacatcatcaacacaagccactccttttttccctttctattctcatcttttttctatatccaaagcccatcttaaaatcctgtctaagctaacaaataacttcctactgaaacacggcctcaatttcattaccacttcaattactactatacctatgtacatatttgagaagaaatcagaaggagtcagaaagaaggctacagaaatcagggaaagaaagattagagattaggactatacaaaattgtgctgaggatgaccactggacatggggttactcgaaccaaaaggaaatgcccctgtactaccgaagctaggcatgttggagaattgcggaaaatttgagcattcgatatttgagaaactatgattggagttcaacataccagaaccttgttccattgggctaattccaaacaaacatcgggctgtgccgaggtgattcaccatcctaccttgcctactcaaagtattattccatcccacctgtgtcagataacatatacaaaatgtacgtggtaattaatattgtgaaatgttataattacattttcatcaaaaatagaagaaatcgagtaaaagaccaccaattacttgatatggatcaaatatgcaatttagtgcaagtaaactcgccaaagtcatccaattcaatacagaatatgccctttaacaagcggatcgtactcaaaaggatgagttgaatcggtttctcctttaaaaaagaagagaatattactacccactgtctaaaaacataatagacacaaaatatgtaatatgaaaatgaattatgaactattgatgttttgcaaatatgtggaatgaattaagagggaaaacttataacggcagcttattggccaattctgttagcttaaactataactgcaagtaaaaatagcaataatatactctaggcacttgtaccttttgctgctcgccagaattagcagatatgcaactttcaccataaggtaaagaccgaactctcatctctggacatgagcttcgcaaatcttgagaaggtttatcaggactgccgatccatgaattttgcctgccacaaacccaatgctcagtactcttcctcagtctcatatatgccgatggggagtgatcatgagagaccaagaaggagtagtcatgacgctcttctctacaaaaagcacgaggtgattccctacattgcttgggcaacgaccgcgagccagaatcttgatattgatcaaatatgcaagatgatctagaatatgaatggcctacgtcaaaatatccagatggagaaattctaccaaaacctaaatcaggtgactgattactagctaaatgtccaagatttggtgtcattgtccaatcttctattgttattccacgcttggcagcaaggtccaatatccgtctttcatcaagtcccaaccccatgagcaagtcccacatgttccttaccatttccctttgattgtggatgacttgatccctcattgccatttcaaattgaagttctgtattggtcattccctgagaaatgaaagtcaggaaaaatgtaactaaacacgtgtaacccagacaagttatggccatgcaatctttagcatgataactaatgacggtataacataaagtaaatctcatgccaagaacacctgtaagatcaggttcttaaaaaagattttaaactgtaaatattctaacttaagtaatttactaaaaataaataaataaaagccctattttactccaacacgataactgcataatttgcagaagcatatcaccaatcaaaaaaatcaaagcagattttatacagttataaacatgtaatgcttaccaatagcctgtactgactaagaatccgcaagtatgttttatttccattattactaatggcctcttcaatcatatcttgaagttgacaccgatgcttctcgttggactcaatttcctatagacagtgaactttgctgtaagatgtgaaacagtcaaaagttcataactctatgacttgagatacaatcttgatacattaccttctggtagttaacaccagcttcatcattttcacggatgttgtctagaatgacttgtctcctcgctctcagagcctcaacaactgatccttccttttcaatagcctatgagaaacgaaaaagttaaattgcatacatagttatccaaaaaaaatatatatttttcctaacagttctcaaatgatacaatcagtgtctttcccatcctcctcacccatccttatgaattataatcatttttttttggaagaaaagaaaaattatgttcaataatattaacttctctagcgaaagcaactccagagatcatccaaattaaaaattgtactaaacttggccatggtattcaaaagaagaataacaatctgacaaatacacaacataatcattacctgttgcttcgcaatagcatcatcaagatgttggagttctgtccggttacgcaggttggtttcctcaagttcaaatagtgccttttgtaagtttatcctttcttgaacattttcactggtctgatgactcaaagtatttaaccaggatagctcatcatcaacagctttctcagcaggtttgatgtttagctgggagtctttttcagctaattctttcttcaatcgacaaacctcaatctgtacacctaacaatgtcaatacaacaaaagtggaactctatgctgaaactcttcagacaaaaaaaaaattaaagcttacctgaagactgtcaatcatcctctgatagtctgagacatgagtatcgattgtaccaatatttttctgtgaacaaaaccataaccatctcaaagttaacataagttaaagaagaacaatttcttgttaatggtagcagttcagcttcagatggtggtaaacaaaaagtggaaaattttgcctgatttagataaaatcaagcaaaactggaaaaccacccataacaatatacattagcaaccaacagaaagcaaagtgtaccatagaaacacaactagttaagagccagcccccgtgtcagtaataccaagtaacaatggcaatcaaagattaatgaaaatcaacacaacatctataataaaatcaataccaaaatcaactcttcgagaatatcatgtaaatgttgaattatttggaataaataacaccgctcaagaaatttcacctgtatgtgtgtctttatttccttagctcgatcagcatatttcaaggtattcacagtgtggtgatactgaccgtctgcaggggatattgtagcaaccatgacagtttgagagttaccactaagaccatctttaagtattcgtgtaagtttgctgcagaaccatttagatcagccactgtagcaagaatttcatacagctaaaaatttgtaattaccaatacccacctatttctgtaaggaacataagcaaggcctttcttgtgctgtttccccagagcattgatgcagtttgctaatgcaagaagcgaacggtttatattagctccatcacgtaatttctggcctccgttatttgtttcagaagctctttcactgccagcaagatccacaagtgctagttttccccgcattacttgattccgatacttgttcctctgttttcttttaacagttatctccagaacagcatgagacctagttaaaaacaaaaccatttcatgaagcagctaaattaatttattcattaaattgaaagcaagaaagaggtaccggggctggagaggatgctgcaacaaggtgtactttgggggcaagtaggataatgagttttagtcccaacttccaataaaagtggaatagacatatatacatggaaagagaagcaaaaatcgtttgggaatagtaataaccatggagacatgctcatactaggtaaggaaatgtaactcaccgggaggatgttgcattagcctctgtgttttcagttttccttcgactattccccaagttcaaaagttcaagaatcctatcagctgagtgaacctgaattagaagcacaatatataaacaactagtaattaccctcattatataaattgacacacaagttttttagatatcaaaaaaaaaaaaaacaaaaccttgatacatctcagcccagccacagttatgccttgttctggatcctccctcaattccagatgaccagatgacttttcaagtaaatcatagataacctaaattcatcagaataaagattaaaaaacgtgtatatataggataggaaaagtactgtagcatagtatattttagtacaaagccacaccatacttcattatagacttcaagataggaacaggtaacttcaaactcatcagaactcttatccctttggattaaatcaaaaattctgtgcagactaagaaccataagtccaggatcatctttggttccaaccatagtgtaggttttaccgctgaaaaaatttagacacgatttatatattaaattcatagaggaaaaattataaatagacaatgcaaataataaagagtagtattatgataatgcgaggtgattgcaaaatggttgaggaaaaaggaaatgattattttcaatttttcattagtacttgtgatctcagttttcataatttagccaaacttgtggaatgtcaaggattttagagaatccatctcatcaccatttaaatactttatgaaggtgaccttaattatatagtctcaattttcgtatttagttgaacttatgccacatccaatatttaaaataatacaaaggtaatctatttatagaaaggaattgttattatcgtcagcacacaagattttaggagcaaataatacagcaagtatggatctaagaaaacaataacagcagaaacaactggcaactactaataacactaaatgagacatgagcaagcaagctccactttaagttcaacgataaaaaaagctaaagataccttccagttgaaccatatgcaaagacggttgcattgagaccttgaacaaccccagatatcacagaagatatgcttttcatataaacatcctgcataaaacaatagttattgcaaaaattactagctgcttatcaagtatcattcatttccttggttatcctcaaagtattaaagcaacaatagtacaaaaccattatttcattcatcagctgttaattatgtgagccgtgatgagttgcttttactaaaattgcatcatgtgtctgtttatttagagcattagtagctaatataaaaattatcttgccctgctatatgcagtacgcgtcgtaattagcacaaatgtataaacctaacataacttcaaacactagaactagcaacgttcttcaagttggctcaatatgtcatacaacatcatgatcaaacaaatcaaaaaatattcagtgctaagtaccagatttgtggaatcaggaccaaatgcataatcaaaactatatttcttttccttggttcgattttgtatgcgttcaaggtagcatttagacaagtcaggatccaaaacaagcagctcctagaaaacaaacaaaacatcatcatcatcaatatatcaatccaaaaagaaataaatgatatgaaatctcaaactatcaatgaataatgatccaaaaaaaccacaaaaccttctcgtcaataactctaacgatgtcgcgaccatgctctctctcggccaatggcctgcattttacggcaacctataaataggaaaaaagaaatgatcagagagactcaaagtaagtactcacgcgaaagaagaaaccaaatgcaattgcagaactcgacaacatatatacatatataagtacttacagtgagagttgtagctttctttgtagcaggggctctaatgctcggcatttttaatcaacatcgatttctttgctttttcagtaagaaacaaagaaagaaagaaaaaattcaagactaggtgctgaaaactcgaaaatcacattgcaactcagaaatcaaaaacgtaatccagaataagagattttctggcgaaccaaacagaaaaacggaaactaagacacaaatttcttctaacaataaaaaaaattaaagggtatggacgagtggccggcattccaggcttacacaaacttaaaaataattaaataaataagggaagacaataatttcccatcctagtaataaaattaataatgcgcgaaaatattggagaaaatttgtgagaacccgtccattttattttcatcaaaataataataataaataataaattaaaaataaaagattaaatacgtacatgagtcatgagagttgaggagagagagagagagaggtttatgcttagttggcatatagaaagaggaaatgattctgtggtttatggtataacgtcctactgtgtcaataaatgatcaattaagtgaaagatcgtgacggtcggcttaactggtagaggttagttttggtattttacaatatttgtagggactgaaccggaagttcattcattactagtactactgcttaggtcgtgatctgatctgaaatgaaacttttgagctttgagttgagacaattattaattttttattttatttaatttttattgtctttatactctttaaattttcatttgtaacggctagccagtgtccaggggtctgtgagtgctctggggcctttaaccgaggtttaggtgcacgcgtcacacgtgtgtggtaattttttttttttgaataaaggtaaaataaagtttatgtttatgaatattggtgaaataattatcatagtataataatattaatagaccttgggttaacaatcaattttggtttcgagttgtttgtccatttctatgtctagatgtctaattaatatac

SEQ ID NO: 224902 - DNA, 8831 bp, Cannabis indica
ggtttaggttctttttttttttttttttactttttcttttatttgaattggttttggaatgaggatttagtttttggattgattggttaagttaagtgtctgttttgttttaatttgggttaggtttgggaaacttgtaaaaactaattttactaaacttgtaacctagctgattattgatttgctgggatcttaatccaatttggataattatagttaatattgggaaaatattgtgtatgtgtatatgtgtagatacttttaggggtgtgcatagattcatttaatctaatgacaatcaaatcaattgatctaattataaccgactgctaaatattagatatctaatcgagatcggattagatgtaatttaatgttgaatgagtctccaaaaatttaatatatacaacattcaagcaaactaattagtatttttatgtagtttagatgagtaattagatttatattgttatacgtaaaatatatatgtaaatataaaagttaacattagaattttgcttttttttttcttcgatcgggtagatccaatctaatccaatacatattggatttaaagtattagatggatccgatccgttccaaaaatactaagtctaaaatatttgataaactcaaattaaaccaataaatataatatgtaaaatacattcaatagattgaatcaaattcaatctaacactcaatggatgttgaatcgattgaataactgaaattagttagatcgaatcgggtgataaaatctatcattcaatatataattagatcgaatttagatagatctaaaaatattgagaaatgctaaagaacacaagtggtgcctagcaccttcttatgtgtcaataataaaaatatttctcttgggaacagttccttcacactcttaacaattgttacccccatacaataacaattaaatttgtgtgttgtaaaaggtgcaagtagtgtatattataaaggacttaaatgcttgaaaatgtatactaaatgaagtcgtattgtttttttctccactaaaagacattaagttatagctttgattattataaacttactgtacttgaagtagaaaatagagtgaaatctttcctaacccgaaattgagtacactcaactcaacttgagttttggttatttgtatacaataaaaaatttatgaccaatcaaaaaccccattttcaagcactaggaatggatggatccaaactcaaattatcgaattttctttagaatggagtttaatttgcactcatgtagttagtttttggattcaggtgtaatactgctatcatcccggaagtgatgaaatactgctatcatcagctactggtaatgcattcttcactttacttgttcccctttcaactatgactctattttagattaattttgttcgaaaaacctttgcagggaaagctgcaacgaatgatttcgaagatgtaggccacagtgattcagctagagaaatgatgaagaagtactacataagggagattgatgcaacaactattccactaactaaaaccgacctacattccacagcacgaaactccacacaatcccaataaaacgcttcagtttgccatcaaaattttgcaattttagcattcgctgtccgacacttcaccaaccaagaataggttcagatcaaaactatagagaagggcagagtggttactatgcatttcgaagtacacttattttttgcagccattatgtgctcttctaatcaaattgagagtttgtttgagttgattagtttgtgtgttaactcataacttataatcacaactgtgtgctcagtttcattgtttatttttcttctttattatcaatatatatatgtgtgtgtatgtggtgtttgaaaacacatgatatatggttattcttagaagattcagaaagaaatagtaatgatataaatgtgttaatatgtagaatggtagatgaactatttcactagtcattttcaataggagccagaaaaataaataaagaataagatgccatctttatcaactaaattattggacggcaagacttatgtcaatgcccttttggagtgatttgatcattattgttgtaagatatgagatattaagcaggctttatctacacaagtctaaatcattaaatcatctatattcttattattattattattattattactatttcaactaaattattggatggcaagattcatgacttgaaaaagaaaaaagaaaaaaaaaaaaagataggaagaactagaacttgttatgcattcatttctttacctacatacctaaaagaaagggaaaaaataaacaagaattttgggataaataagaccaagtaattaatggattttctttcatccccataacagcagcctctacatgcccaaaaggcaaatttttaatgtcccaaaaaagatcgttgtatacaagagaaagcagtggaataacaagacatccaaacagatgggattttgttgcatcaaatttttgcctcaacagagcccttgtttgataactctttaagttttcatggcaaaaaaatctgtgacagtcccagctgctaagctaaggcattaggatttttgtttggttctgtttttttgcttatcttatgacccaatctgaattgccccacatagaagaatgaagcaaaagcagagcagaacataagatagaataaagcatagaaattagccaacaaaaaaagataagcagttataatgagagagatgactctatcttgtcatggagggtcaccaccaagtcatgagcatcatctaggagcttccacacatcaagttgtccagacatgctattacactcccttaagatttcatccatgctgctgtacttctctattatcaatttcctcttctgcaacactgatgctgcaattgcaaagagtagcaggtcttctgttggcggggctcgttgccttatcctgctccatgctgattttcctattcctgctcttatggctgcctgatcggcccacattacctcccataggcataaagtctgctcgaatgtcaattctctcctaaacagcaccaccaccatcctataaacaaaaaagcaatcctcggcctgaagtttctccaagtgccggtacaggtgggagtctttgcttttgataattttagaaactgtattgagctgccttcgaattccaacctcgtcaagtctgaagttatgccgagccttcttcatgaaacccacgaaacaccagaaagcctcgtgatcctcggtcatcacagtaattatgggagaaagtagatcactcataccctggcagtaaccaatctctgggtcatagagtgcataagcttcaagaattgcaaccaaccgggcagcatgaaaaatcctgcacggctccaggtgatcataatccttcaaaccaacagcttcagcagaacgtcgtgcacttgcttcagatacagcagcttgagtcgtggaataaggaatccactccgaattagcacgaactgcatcaagacgaatgatccgttgccaagaggaaaaatcttccattgtggggagttttggtttgctttctgtagaaggagaatcatccttggaagtgacttcaggatcaatctcctcctctctactttccgatgccgtgaaagtctgagttacttcagtgtcttcagaagagtctgagtcagatgagtcagtgtttagtgcagaggaatcagcatttgtgatccgcctagaaccttcatctccatccagcaaggtgctggaagcttcccctgaatattccatatctgggctccttccctcactagagagcgattccctggcacttacagcatcctccgagctgggagaccccatttcatgaataaaacccccagtatcaccatcatagctgatttctccattctcatttaatttaaagttctcattgctgcgttttataagccgacggcattgtctgcggagtttatcatattccttcctacacgtattggtaaaagaatgtcatgaaagaatgacagcatcacacgaaaacaaaattaaacaaagcataacacaggtagaataaataaaacaaaatgcctaaataaacaggtataagtaccttttctcggttcttatcgcatccctttcttcctttgagctgtttaattcatatctgttcaaataaccaccatcaaaaagtcaaattatagaagcaggacttcaccattctcaatatacaacataaacacagatgcacctatcctatgtttaagtgcatccaccaaatgtaaatcacagagcataaaaatatcataacaaacactggactacaagttccaacatgcattcaacaatagtgaggataaacacatcccaaaccttcccgtcttatggttttgattgattaacaagtacaattgactaccaaaatagattaaaataaatatcaaaccatataggaaaaaaaagtgcattactaaattatttaaagaaataggtgaagcttgcttacactccaagaaggaaaggccaaacctcagccctgatacttggatcaacaccctacaattaaaaaggtaaaagataaataaatctagtttgaggccacactgaacatggtcaaaagaataatttttttagagaagcagatatatatgctttgtagcagtaactcactccgcttcgaacttttttcaagaactttactccaccatcccgcagtttcccatctggtgtaaacaaagtcctccactgccgagttgaaagggcgtgttttcttttcctgcgggaccaagatgatttaagacgtcccctgaaagcaaaagagtaccacagttaactatagtaaagacagaagagaacattaatgtagaacatatgagtaaataagtaacagactatcgccaacaagttaataacgtacataaacaagatcaatatactaagatattgatagtttcaacaattgagcacataacaattaagaatgtggaaacaatggtcacgaaaaattgggatgtttcttttccttgactagctcatattgggaaggataatgaatcattgagggtacaatagggtggagaactgggttaacagcaacgataccacagccaaaaatactatcaccatatcaatgtgttcacactattcttgacctaaacaatttggagcaaacccattgctgctttgatgtaacacaaatacgcccaatgatcaccaattaaagttagttactacaacccagtacattccaatttaaggttgtaactcaaggaaaaagctaaagatggcttaatgaactgctgggtccatgtatttcttatcacactccaaatctagcccaatttcagttagcattataattctagcacatgtttagaaaaaaaagaatacagtacattgaagttagtagatcaagtcattcccatgaaccaacaagatcccatgtgaagaagaaaaaagaaaaaaatccaactaacagttacagtgattaactactcacaaaccaacagtgagaaatatggtctaaactagacagaacaactaccaagattcctccaatccaaatccaaaaaaagcaacaatttattttctttaaggaaaaaaaaagtatatctatctatggcagaatcaaaagcaggatcgattgatgtgaaagaagtggaatgatcccaaaagaaaaaggggaatgaaaaatcggagggaaacccactaaaagaaagtggattgagttacaatttgtagtggaggcatgactaagtatcactccgagatcgagatctgagatgaaatcaaatgaaaactactgaaatacacgaaaaaaaaatatacatatatatattgataattacaactaacaaaagagctaaaatttgatttgatggatagagagactcaccgatcggagtgggaacaataagctggggaagaagaagtaacaacaaatagaaccgaacgcaaatgaatccacgacgacgatgatgacgacgacgatgatgaagaaggagaagaatttgaagacgaagtgtggcttcgtcgaagagctttcatctatatccttaaatactctctagtgtaaaaaaaataaaaatggggaaaaatcaaagaaaccccaaaagaaaaaatcgaaaatggcagtcgaaagcctctttcttttttggttctactggtctagggttttgttcagacaaagcttcaaagatttttggatatggcttcctttcctttttatcttttttttttgtgttgaattaattacgaattagtaattacctactggcggtgtagaacatagccacaaccacagcgaagcccgccaaggccgtgacggcgacggcgacgttcgaaggcgacgccgccctgaaccaaattcctcccccgccacggccgccggagatttggatatcgtcggtgccggaggggaacatggaacttcctactaaattacctttatacccctgggttttcccttcactctctatagtctttatccccaaaacctaaggtcttcttcttcttctccaatgaaacccaaactcaactgctttgctttagagacttttttttttctttttagagagagaaagagaaagagggagagagagagagagagaaagagaaagagggagagagagagagactagtctatatatatctctatatttgcttcacttcatataatgttttttgtatttgattaaatgcccctaagttattctcaaattcaatattggaccccagttttattaaatatttggttaatgtggtatttttgtcacttgaactttgatatataccaaataataccctttgaatttttcaggtcattaaaatttttcctcaaactattaagattgttagattaaaggacttttgtccaattttactaaagaaaatttgacatgaatgaaaatttaggtcgcacaatttggtacatattaaagtttaatgagtatgatttcgtaaatatcaaagtttgggagaacactttagtatatggacaatcgacatagtagtaaaattaaataaaattaaacaaaagttcttaaatctaacaatcttaatagttcagggaaaatttttaacgacttgaaaagtttaaggatatgattttgtacatgtcaaaacttatggagtaaaaatttaaattagcctaaatattttgcaaaagaaaaattttatttgaaccctaaaaatttctaaaaatacctaattttaataatttttattttatgtaaaatttatatttttaattaaactaaattttttaaatttttttctttcaattcatattcttaaaaaatataactattataataaaaatataaaaataatttaaataaaaattaattatattttaaatattataataaaaaattaaaataaaaagttatataaaatttttcttaaaaaaatataaaaaatgtatatacatgattaagaaaaaaaatataaaaataaaatcaaaataattattaaaattaacgagaaaaaaattttaaaaatatattaagagtaattttaaaaattatttaagttaaagtagttattttaataatattttatggggtaaaaataaaactccctctttcaaaaaacatccttctcacttttattggacaaaaataccctcattttgtttatttcgcacaattcagaaataatataagggcagaattgattttttgaatttaggggataagtattgtatttctttattattattattattattattattattatatatatataaggtgcggaatatgtggattcatttcctttttaaaataaggttctaatttctaaatatattcttttcaaaaaaaaaaaaattctaaatatattattttgtttttttatttaataaaataagtataccaatttaaatttgactagcataatgactttctcaaatgacactttcttctccttcaaaaacaattacattatccatgggtgggtattactacccatataaaaaaaaggaaaattccataaaaaaaattaacaaatgttgaaatttagcttaattaaatatcaattgagtttttaatgttttattaattttgtatcatcttatctaaattttatccttctttggagattttgattcattccttttctcgagggttgttgaatgaggacataatagtcttttcacataaaagtgaaaagtattggagaagaatagattttcatttgagagagtttattcaacaaaagatcctttgttcggttttattccatgtggaagaatctagggtaacccccctagtccctccaccaatttggggagtctcattttattgttttttaattatttaatatatataatcaattatttcatttactttaaaacgacatcgttttggggatttctcaattcatttgaggataataacaataataagttcattatatggattgaagaaaatcttaggggtaatgaattagagttggtaagtgcaccaacttatattataagaaaagcttatctttgcttaattaatgttcatacattttttataatataataatattaatttccatacccccaaaaaaattaataaatattatataatataggaggaaataaataacattatcactataatacaaactctataaaattagcaatggtacactaatttttattttattttttatataagaaaaaaaatattataggacatttctttcatctaatcttgggatatgaaaggagggtcaaacatagtcaaaatgaattgatttagacaagttattaatatgattaattaataatattaaaaaaacttgaataaagaaaaaaatctatagttggtgtgacactccaac

SEQ ID NO: 224903 - DNA, 4474 bp, Cannabis indica
tctgtttcagagtgaagtttattgttgtatggagaagaatttgcaagtattagttcggcatgaaatatagcaactttctaaatgctgcacaattttcaaatgtttggataacaattatggaactataattattgatttcctaaatccctcaaattatgcaatgacagtgcctgacagctttgactaactttttttcaaagtacactcacttatttgtattgtaactacagctgagcgagaagcagtgaatgctgcagaaagagctgagaggaagctgcatctgagggagaaagtaagtttaatatttgtagcctttccccatgaatttatgtgattcaatggcatttatactagtctatatatctagtacattgttgtataactctttagataagcactgtcgactaacctaattaagtttgttgatatcagcctaggcactctgaagctaatatcttttgttaagcatcagaagtcgttcattattaattgctacatgttgtggctatgtatgtaatggctaatatgtcttaccaggaacttattttgtgatgaaaatgttttgcagaagcgacgagaggagatagaaagacttgaaaaggagagacaagcagaaatgagaagttacaaaggattgatggttctgaaaatatgacatctaacaaacagattgcatctgcgagcaaatccttgcaggaactggaagaggacttcatgtgagcattcttaaactttgagttgcttaagaagatatcctagaggttcccacattgagtgtctgttttaaagtttgtgattcatggctaaacccctccccgacctgttgtacctgtcaacctgttaagcaggaaaagggtatgcaaattgaaacaggacgggggtgaaaatcgtaaggggaaaagctgtttcgtgtattggagacagataattggggatgtttatcttatctgtgtaattggatcatgatgatcagttattagttatatggatcatcacttgtgctttaatggtcaaatttactaacagttactatggtaggttgaaaatcttgatttttttttttttactgtcaactcccttgtccttgacaaaagtaaaaagccctccttgatgtgcactgtgcacatttattcagctggttctctagtctcaacccttcttttcaagcttttggcatagaattcagggtattctttttgtgatgttggttccattgtgaatggaatttataataaaataagaataagaataggaatggtagttttattttgtagaggagattgaagttgtttaataatggaatcagaataaatcactagtgtgtattgactaacaatagcaaaaaaaaaaagatgggtttacaaagtaatgctaaacttgtgtatccacgtcacttttgtgattatttacagctataatccttactttttaatgaaaaatattggctgaaaagttgaattgtaatgaaaagagaagaatacatttacaagtgttttgtatttgaaatataagtatgttatattcaactttttacaaatatatataaactatctcagttcttttccacaaaaatgaagttacacaaggttaaactactagaaacgtttgttgtcttttttcttcttcctctttttttggaattctatctggacaatcataattgtagattgtcataaagtaatgatctatatacttgtgagattttatattttaaacttttgtcatttaaaatcttagaatttgaaagtgcggtttgatctaaggaagtgttttgttttctgatgcaactttgatcgttatacaaatggaaatattttggaatattaggagatttttcgactgttttcagtttttggaattgtgttgtcgaaattgagaatagaaaataattttgtcatttaaaaatttaattgtgtttggctattttttttttgctaaaaaaaatactttaatgttccacaccacaacacgaactcaaccccacacctaccttgacatggactccaaacattggcttcggacccagacctagcgatggaccgaacccatacctgaactcggccccaatccaaacttgcccttgaacctagacttcgaacctcaaccccagacctataactaggtatgtgagtgaaaacataaaaaaaaaatatgttagataaaaaaaatattttgaaaatatatagtaacattttaatgttttctgattttttatttttttttaattcaattttcaaaaaactggccaaacactctttgttggtttttaaaacagttttttatttttaaaaagtgaaaataatttttaagttatgaagtgaaataccctaagaaattttgggtttcataaggggggctaagatgtctatcaatcaaaattattctttaattgacactttagagatgaaagctatgattgcataaggctttagaggactgagaaatactttcattagcttagaagattgctcatttttaagatgagtaaaatgagttcaataagttttgtattcgaaatccaattattgggagggaaaatctttcttcataactagcttattccattatttgaaaaagaaaaaaaaacatatacctatcaaaaattccactaagaacataacaataaaaaaatatattaattattcattttataataatttcttaaaatataattttttgtttaagataatcactatttaatgattgattttttttgggtaagacacgcgagcaagagcaaagagaatccttctcaggtctctctcccgacgacaacaattcaaaaaaattattcatatgaggttgaaaccaagaaatttaaaggctaggttgatcacaattaataattaaaatgattttaatatagtttctataataattaaaatgatttgaattaataaaaatgtcattcaatttggcatttaacaaatgacaccttgaatttgattttataaaaatgcaaatatttaaggggtttttatactatatattgaaatttcatatttttttttttaccgtggggcgaatttttttaaaagtattgtgttttttttttgaaaaatattgtgtaaattttatactatgtattgtgttaagtttttacggttgttccatggttgttttttagttgtttttaattattttattttgttgtttatgattgttttataaaaagacagtatttttgtaaaaaaaaaatccgtatgatagtaaaattgtaaatatttatttaaaatctagtattttttttaaaactctatatttaaccgcaaattatcttattattaaatgtttagctagaactttggtatttatatttgcactgtatatgatttttatgatatataaacgttttttatttataaatattctatagttttagctaagcctagtaatttattttatttttatatagtttaaaaaatttgaaataaaaatatttttgaaaataatatgaattttggtgtgggataattttattgtttacatcatatcatagaataaaggtacttaaattattcttatctcttaaatgatctatttattatattcatggctccatacttgaatggtatcaattccgaacacccttgtaggaggtgggtatgactgtatgagaaaaacagttagacatggtggtgtttttggatggtatatatttgttggtgttgtgcacattacaaagatatacatgaatttgtcaaaagatgtgataaataccagagattttcatatataccttacgtaccacaaacagaattaagaatgatgaccttgccatacccatttgcaatatagaaaatcgacttgattggggcattacccacagggcgaggaggagcaaagtacgcagtagtagcagtcgactttttcacaaagtggacagaggctgaacctctagtttccataacttgcaaaaaatttattgattttgtcgtcaagaacataatttacagatttggaatacccattaaaatagtgtctaacaatggaactcagtttgatggcaagttattcactgaaatctgtgaaaggaataaaattattaagagtttctcgtcgatttcaagaccccaaacaaatagacaagtagaagttgttaataaaactttaaaggatactatcaagaagaagttggacgctggaagaactaccacagtactttgggtcacagacgacagagaaaacagcaacagggcatactccattctcgttggcatttggctcagaagcaatgctgccagtagaagttaatattgtgacccacagacgcgaattctacaatcaagaagaaaatcaagaactttcttaagtttatcctttggatctacttgaagaaagatgtattaagtcgcaaataactaatgcagcctatcaacatcgaatcatgagatacttcaataaaagagttaagaaaaggctcttccatgtcggagatttggtgttgaggcgagtatttacaaacacatgagat

SEQ ID NO: 224904 - DNA, 5439 bp, Cannabis indica
ctggacgtgggttagtattttacttcagcatttttttgttgactgatcattgtctattagttttattttaaaattcattctatcatttgtgtagaaatgagcttaagcgggaaggtgctgggcgtgggaactggggaacacccacagatgaaattgctccgtaagttttgaactttatttttgtttttgatatcttgaatgttggactcgtaattagggaggtagtactactttatgcttcattactatctgtgacatttatttcccctctcaaacagggaggctgaggagcctgttgctgaaactgagaagaatgttgatgctgagaagccattgggagaagaggaatctcctgatgccaacaaggatagtcctgtagctgagccagaagagaaggagcctgaggacaaggttgctttcattattctttttttattcgtatttaattattttttatgctttaagagaggttatcaagtaagtattcttaattctttactttttactacttcatgttaattttgaggttttaaagataagatcaacaatcaaacttttaatttaatgttgggaaatatgtttttgcctgttaggttggttaatgcttaacacaatccaaatcagagcgttgtttgagtaatgatccttttgtttttgttgatgaaaatctagtaatgaacttgtttgtgcatcgagttattttttggtatggtatattattttattatttcaaaaggtaagcctttattgttaatacctgatcatgattccatgctgtatatcttgtcaggaaatgaccctggaggagtatgagaaggtacttgaggagaagagaaaggctctggttgctttgaagacagaggaaaggaaggttgatgttaaagagtttgaatcgatgcagcagatctcatgtaaaaaggagaatcatgacatctttatcaaattggtatgactttggtgcactatttttattaattaaatgccttgtatagccagcttaaactgtatttgtatttactgggtatttacatttcagggatctgagaaggataagcgcaaagaagcagctgaaaaggaagagaaagctaagaaggtttcttcagtctcgtcctatttattgggttttagttttaaaaatatgcaaatgcaaatgcagggtagttctatttcattttttctgttgttacaaacataacaattggattattatttggatgcagtctcttaccataaatgagttcctgaagccagctgaaggtgagaggttctattctggaggccgtggacgtggtcgtggccgtggttcaagaggtggatatggtggtggatacactcctagcaacgtggcagccccatccattgaagatcccggacagttcccaacccttggcggtaaatgagattctactagtttctcccatcagctctaagtttcattcgtttggttaccgatgttgcatgaaagattttgagtgggtctgccatccggggcttacccccacatgatgaactttaaatttaaacctctttattgctgtcgtttttgtttgagtgtaaattttagatctttatgtcttgaaccaaagatgtcatggaatcagttttgattttaaaataggttgagaatacattcagttattttaatatttagtattgttttgctcctttatttattcatgattctgttctctcattctcagagtattccatttaagtattggctttttatatttttcactttaacgtacctaattttaattggggcattgcaatggcaatatgtgatgatacgattattgaatttctatatttattttatttgtaaattaaattcgatggatcatcttacaatccaagtagttttgtctattattataacaaagagttgacactttttgcaaattgctaatgatcaaatgttctaactaagtttgcataagaagatggtgttataacagttgcatcctcaaatagatgtaccggatctcatcaaaatttgtgcatgtttgaagaactctctttgacggtggttgactttgtgcaaatctagtcctactactaatctttaattgtgcttcttgttgtttgttaaggttaattatagggtaaatacttgcaaaaattattgattagatgttttgttaaatgacacaataaactttaataggattctgagttcaatttttaataattttattttttaatataattaaagataatttttaatgcgaatagatataggaaataattcaattagtaattttttcaaaataaatggtctaaaatgttttttaccctttattcctttggccttagtgtcgtgtctgtctctcaagttctttactctttttgtaatcgacgtggttagatgtttggtcatctctatgagaattgtacagttatattttgcataatcatattagattttaccatgaataaaatctacccttaaaaaaataaataaaaaagtgcataaattttagcgttgtacacttaaaaaaatcagaagggatgattatacataaaacatttttttatacactctagtttgagtgtttaacatttttattttaataataacttcgcagcaataaaaaatagatcaaaccttgacacatcttttttaatgtaactatgtaaaaagttaaaaaaaaatgtctaaatttcattttcctttaaataaaatttaaaatatttttatgtctaattcttttcaggtgacacatacttttaaggttctaaaattaatcaagatatgtttattcacaaactccattaagctagtagatcagctcatgatgaagtccaatcacagtttcggatctaactgcaaaccaactctaatctttataaggttgggtccttttggtcccagaagggcaactcgtccagagaaggaaagacttaatggaacatattcggatgccctcatggggtattccagaacaggcaatcgaagaggtgtccagtcctacgtggcacccatctaacactgaatcccacataattaaggggttgtcccttacgttagacacgggaaaggcgcacaacataaaagctacataccttttgtccaacgtccattgcactgacatttattatacactgtcggcagctgtgacagttagagttctgtgattcgcaagggtaaagactaggagttgtgcaatcccacatcgtctggggaaggttaagtgtgatgattctgagactgtgtaggtatgagactacacaacatactacctatatcaacaagatgtctcttcttttcagagtaatttcttgatgggtgccaagaatagcgtactcgtgtataacattcataagtctgtgggatttccaaaaatattagtaaacaatatatctaatatagtaatatataataagactcttaatcacctcctgcttgttttccctttatgccctcaatattcaaactttttaaaactttttaatgtcttttcatcatttgtcaacttaattaataaaaaaattttactcaattttttcaattactcttgaattgccacccatccatacactgtcgttttatcttttcaccgcctcatgagaaatttaacaatttttttttctgctttcttaattagatcattcatgacatcgtttatactacacaatattttatcattttaatgtttaacttctcttactatttttatcctaacttaaaaccttacatatgtaatatattatacttacataagttgctcacacccagataagtcttacatagtggtgccaaaattgttagtagtctgtcttttattgttttcgcagggtacaatttcaagtatgatggctcatcattagaaaaatgagttcttagtttttaaagaatgttttaattgaaacattatcctattttgcataaaataaagaagctgaaaattttatacatgtaataaaagaccttaggccatatgatcttcttaaggtccctttgtctctaaagctctttctagaaacaactgttgtgtttgcccatcctcaaagctcaaactcaagatgaggcttatcttttggtaagctctctcttctcatcttgtggattttaattattaccatatctattaagtagctctttattattttcataatgcagtagcttttattttgttttattggctcaattgaacttcaaatgggaagaaaattctctacctcaggctgactgggactaatgtcattccttgactatggagtactggcttctaaatatttgtcttggtctcctttattctacttcttgttctagggttatgtaatgtagtttcccatataactttaaaatcaaaataatttttataaaaataaacgtaaaagtgaaaaaaaaataacagtataaatagcaatcttttttttttttttttgagaataaaaattgttgttataaattaatataagagataatttaaaccaaaaaaatttataggcagaggaatacaaaccgaacaaagtctatattttccatccattaactaatgatcaaaatatacataacataataagaattgaatagttacttaaattggatttcttctcatgtgatgttacaagaaaaaacaactacattaaacgtaatgctatagaatcatgaatatcgttagtttttgaagtaaccaccaaaataaaaaataataatatactcactaaacaaaacggatcataaagctttattaatgaattccttcaagatgtttatataatacacaactttatatataagaaaaatggtccaaattacatagcttatatatatgagtaaaaatttgttaagtatactacatgattattaaactatctcaattctacaatttggacaaaatttactaacttatagccactcaataacacatttttcatgatacgcgtgagtgcatggtaacttagtagcttccaaaccaacagaaacatcctccaaacaaatcgaacaaaatattggatcatctttaacccaaactttttctaatttctcgattgactcttcactcgccgccacaaaatgaataggaacatcattcatatcatagtcatcatcattgtcgtcatcgtcatcatcatcccaatcaagttgaggtagttcatcaacaaaaatttcaacggaaacattaacaccgacttcttcattcaaattattgtcataatcattgttgttcatcatttttctactgcaatcaataatgccattggcaataaaagagagagaaggaagatagacctcagcaagcatatcttgaatgttaactagggcttcagtaacgtcgctcttcatcaaagtctcatacgaaattcgtccaatattttctaaaaaagcagttagatttcccgtttcatcatcgaataaagattcttcatcttcgacttccatagtagatgtgtgtggagcaagaatgaacttaacatttaagttaatagtaa

SEQ ID NO: 224905 - DNA, 8345 bp, Cannabis indica
ataaataaataaaataaaatttcaaatgtgttgaaaataatgttttgcagaattttatatgacatttttttaaaacatgttcttattaagttatacatttttttttataaggggtcacatattatactagtctttattgtgtcactacaattagatgtgtttctcaattaattataaatagtacatacatagtgcatactgtgtagtgtataattactaccctaacaatcacgtaattacttccaaactcaacttttttgaagtagcaaatattttttcaaaaaagaaaaaaatgttgggtattagaggaggactaaattgaaaatatttcaagataataaagggatttgtgtaaatagtaagaaatttcgaatttcgtgcaaatagtaaattagctataatttacaattaacccacttcttcttcttcattcaaaaccctccaaatctctgccctaatcttcattctccgccgatcaaatctttcgccgtggttaggccgtttctcatcgcggttcgagctcaccacagtacgttcgttatcctgtttctctaaaaaataatataaactattataatacaactattatatagtgctttttgcatgtaattactaaagaatgggtcttttgattttttcttgccatagaatttgattattatacatgttttagtccactttcctagattgattaggtattttgatattgttttggaagttaatgatgtttgtagctttcttttatatttttctgtctctttcccacaggtctaatgattttatattactttgatttgtttgggtgaatttaactgtgtaatttggatttttttttatattttggttgcaatgatttgtggtcccatcctatgtttaattttgactttttgttcaattaatttaatgccttttgaatgaagatgtttgagcacttccaatggcatcttagcaagactcactttttttctgctttacagtctaacttttaatctctaaggtggagtttttggttggagataatgaaatagaatggaatagaattagttgcattttaaagtattggaatgtcgtttccaataccatcatttcggtggaatgactatttccattctcattcctattactatgttttcattcctagttggagtgcctttctaatctatttcatgtctgcataacaaaatgactaatttctggtaatgggtattagttattttagctgacctagttcttgtttttatgcatatactacttccattgaacagggcaagtttgttagattttgtatattggtgtatgactctttatgataatgtagtttttctttttgtgttgatgtgttaggtaggtagatatggataatgaaggcaagttgattaaaattgttggattattgaatgaaactaaggttgcagctgttgaagcgaaacgccagattagttcaatgagagatcggttggccgagtttcgtgagcaacagcagaggacgtatgaacggttgtctgcttctttacatgcacttagggatcttgtgaatgataatctaagggcaaatgttaatgttcgagttgtgaataatgttgttggtggtgaaatagaagatgactgtgagtctgtgatcactgttgaaaatgatctgatggaagaagaagaagaagaagaggctgatgaggtggagagtgatgaagtgcataagctatgatgatgagttggtttggttatgaatggtggatcagtcagtgtaagtatgtttatgtttatgtttatcttcttaattacctaatttagtcaacatatttaagtgaagaaattcctagtctagagacatggacagacatgttctatatagtatatatacttgaagaagaagaagaaagaaaatacttcttttattttggaaatttcaggtgtttgttaatgttattttttgttggggtttgactttgaatattgttgacttgttttgatgatgatgatgatgatgataatgatggtgatgatgatgatgatacctaaatcgtaaacttttggacatttttgttcagcttatagtcatttttttatgcattttcaaccaaaggtaaaattcttaaatagaacaacaagaataagcttacaagcattatctcaagtgttttttttatactatttcactacaacatcatttgtaaacaagtaaaagaaaaatttagatcttaccattcctaggatagtaatagtatgttgattgttggagaacttgacttgatgaaggctaggaaggaagaggtgtcacaccacagaagcttcacatctagatggtgttaggcattactatgtccaatagcaatgtctttttttttacacattaatttaacacggagcattgctatggacaccagtggtgctcaacaccttttataagtagcgtttaatgttctctaaaaattattttcttaagttatatgagacccgatacttaattacaagattattaaatactagtagtgccttttagcaattttcttaacacactctgatcctaaatcctcccaaattttcaagacacctaataattaaaacaaacaattacgagactactagatactagtagtgccttttagcaattctcttaacacaccttgatcctaacttctcccaaatttttagaatacctaacaattaaaacaaacactcttttagtttaaagttcacttaactcgtttatcttttaaggggtgtttgttatggtgacatgtttaagagttttattttggagtttttcttttgtaaaatattaaaattaagaccataagaatttttttaatatggtaaaaatacccttaattataaaagagctataccattcttaacttaaattaaggatactcacactatttttttaaaaggtaaaattcattcatggctcattaagggataaaactctacaagtcaagcagaaataaagtaacacaaatcttacttaaatataagttaattgttagccaaccacatcgagaatcaaaggaaaaaaaaagctcatagctcatgcaagaattgctaaaggggagctcaatacaccaagttatgcccgaaagtttgccaaggggagctccatacaccaaggagagctctatacaccaaggggagctcccttgcgcgcctgcacgtatgcccgcgcccgcgctccgcccgcgctccgcacgtcagcccccgctcgctccccgtgcccgacctcatacactctcgtcaatcttcttttccctcttgacacaaacggtctaagcaaggaagtatcagacgagacaacgatagcataatgaatatggataatagagacagagttcatttcatccgaggtacaaatgaaaggagcatttttagtgtaacttagaatgctaggtacatcaaaccacttaggatacaacgttatcaagtgtgaaagtggcttcacattttatggatttgagatttggtgtgaaggtgtatagtttcaagggctcactataaataaggcccttgaattcattgtaaatgtgacttttttgaaaaataaaataataagattttaggagatcaaagattgtgagatttttattttaagtatttttctatcaagatctttcaatactattttaagtttttgttatttcgagttcttaccattaataatattttttaagaatatgaattagaagaaaaaattaaataaaactaatatagtcaaagatatatatatttattagttttcaaattacaaatataaaactatcttcaaaattcaaattagtttgtttacttgaagttgaaagggactaaattgaaaatttcttaaaataataaaggggttttgagcaaatagtaaattttctagaatttattactgaaacagtcaaacaaagagaatcactttctctctcttacttcttcctccttcaacccaaaccctaccatttcagtcagacaccgccgccggagacaccaccttctccgccgacgcatcaactcaaaaattctctcctcgccgagatccgcccatcaaatctctcgccgttcgagctctagccctgtacgtaaccttaacccctaaacttgaaagtaatataatcttttttttttgaagcaagtaatgtgatctattattataataaaaatatttacattattagttgcatctaaaatttttattgtgtgtgattttagaaattttcttaaaaataacacgatctgtttttttcttttgttcattgaaaacccaatttcataaactcagagaaaaatttgtattatgctgttgctttctttgataattttttttctttaaactcagagaatgatgtgttttgattttggtttattcgattgaatctaacaaagatgaattctttgtttaatgggttttaattattttattatatttggtgttcatgattaggtagctattatggatgaagataaattaattgaaattgctggattagtacatgagcaagtggataatgttggtagaattaaaagtaggctggactcgatggatcataagttagatatggttcttgagcatttgaacaggagttatgaggaggaaaaggcttcttatgtcttaattgggaatgcatcgagggtgttgtccaattcaatttcaagcttaaattgtaatgctccagttgtgaataataatggtgctgaaatagaagagtgtgaatctgggatcacagttgaaaatgatctcatggaagaagaagaggttgataaggaggaggaggagagtgatgaagtgcagatggaaaaagaatgagctatgatgatcagttggtttttggtcatgaatggtctgtgtaagtatgtttatgtttatgatcttaattaatgtagtgaacatatttaagtgaagtaacttttagtctagaaatatcattgacatgttctatatatgcttactttatttgaaaagaagatgacattatgaaattcttttattttggatgtttatgttactttttgtaatgatgatacttaaattttgaagtctagactttttttatatagtgtatattcattagcttatagaatctgctatatagatctcaaatgggaattgagtttttctttttcaacctacttatacaatacaaaagggtatgcagacattaagatgtttcaaaatgacacctaccttgtattagatattccacaagatccaagttttgggtgacttcttctataagagaagctgttgtgtaagttatgagtgagtttggtaatacttttttaattaatgttttgttttttttaattaaaaaagtaaaaatatttttcaaagatattttctataaaattatttttattttttaattttttaatgagaattaaaattttgaagaaaaaaagtcactttgactcttagacctaaggactcgaaccttgacccctgaatttgaactcggactccggttctagaccttggatcttggcctcagatcctattcttgtaccctggactctaacccttaacccaaatttggactcagactccgattctgggctaagtctttgaactagaccctgattctagcccaggcctcaaatacaaatttcgacccaaactcgatttatataaatttaacaaataaaaataaaatttacaaaacattttgagatgagtgctcttataaagtcttagccaaaaaagtctatatttttagtagctttctcaaaaaactcttggccaaacaagaccttttgaaagaaattccttcttttcaaaaagaaacaaaaggacgaaattgaaaattttcaaaataataaagggtttttaagcaaatagtaattattttagataatttaccgtacataacacctccttctcatttccctctctcttccccctttattcggcccctgctccgttctccgccgccgccacccacaaacaaaaattttctcaccgttttccgtcgccgtttgagctcttcaccggccaagctctatacgatcgtcaccctcagcttgaaagtaagataataatctgtcttactatcaaaattatagtatttgtttgttgactccatttttttctctataaataaaattgctaaaccccaatttcattttcaagaaaataaatcctaagaagctagaagaggagtttgtcatttcaagtattcatctttttacagtattactttcgatttttgaacttgcaaatatacacttagttatttcataatgatgctttatatgtataattatgtgttcttagattgggtattcttatacggtcaaaatccatgattgaatccgaactacataatgagttttgaactcgtatgataatctaatttggatgtttttcatttttgttttgtgacttttaaactcatagaatgaggcaattcggatgttttttcctttattcttttgtcacttaaaattcatataaagatgtaattttgatgttttttcttttctcttttgtggaatgaaagacttaccatacaaagaatccaaaagacagaaagttcagaagttggtcaagctcagtaatgtggaaatcccatgttgtatctaggtctttctctagtggctccttactggaatccttgcttttcaagagaacttcatgccgttactatgcaaaagaggcttcatcttcatcatcagaagccagacctaaacaagtggtggattttcaggaagaagacctctttgtaagctctggaatcagcagacccctttcaaaaatcctcaaacacctcaacaagaaagtgcccgattccctcatcaagactcgggtcgaaaatggactctcctcaagatatgtaccttggcatattgtgaaccgaattatgaacttacatgctcctgaatggtctggtgagattagaagtgtgtcttactcgcctgatggcaaatcggtatctgttatttaccgtgtgacgctctatgggactgatgcagagatattcagggagtctacaggcactgcttccttagaggacacaagttatggtgatcctatgcaaaaggcagaagcaatggcatttcgtcgagcttgtgctcgattcggtcttggtcttcatctttatcatgaggatatgctgtaatctaatccatctaaatccattatttgggattatagtttataacaggtgacacccttatacacacactcatccaacacttgaccctacagggcaagtgtaatttttcatgtcatgttgagatgtgtaatcaagttgagattttgtattggtgtatgagactttatgttctttaggaaaacttttgaactcacttcttgttttcgatcactaaaaatatgtaagatgatgaaagtatgttaagtgagtttgttagattattgattgctactgaggctgttgaagtgaaatgtgtgatggcctcagctaaacatgagttgacttagttgcttgagtatgaaaataaggaacaaggttcacaattcagggtatatgttaattttccagttgtgagtaatgatggtgctgaaatagaagactgagagactggattatggttcaaaatgactgttcatcatttatcttttgtatttgtatttgtattagtttagagtattaagggctcgtttggaacgccgtattaagttgtattgtattgtattatattaaatgtgattatatatcatatttttatataatattatgttaaactttaatttatattaaaatattatatatttaggtatccataaaaattaataatacatataattttacataaaaatattgcataaaatataatttaatataatactatagtgtaatacggcgtaccacctttttaggtttagtttcttatgttttgcttgttttatttattttgtttagttaagtattaaaggcccttttggcataatttttagaaaaattaaaatttgttttttttgaaaaggttgtgataaaaatgtatttagtaaaaaattgaaaaatagtttattgaagaattaatggagaagttgcagctaaaaattaaagctatagctagtttattccaatttttaaaaaagattgttttgattaaaagactaataaatttttttatcttaaaatatttttatttatttattatatattaaaaaaatatttaaaataaataaattataataaaataaatattattttaatcttttatttcttttattttgttttgaaaaatattttataatttttatttttaatcttactattataaaagtgttgtaatgagctgatagtttggagacaattttgctctttaagaaagtaagtattaacaattttgccctttgactaatcaataatgaggtattgtaattccatttaatagtcaaaattaacagctca

SEQ ID NO: 224906 - DNA, 6476 bp, Cannabis indica
aaagaaaaaagaaaaagagaaagtaatgattacatctgaaaaaacaaagattcttatatccccaccaagatgttgaaggaatcaaactaatcaaacatttttcactcactaagtttaagactatttgctttcatccttttctctgcatatgcataaagcttagtgatcaacaaggttttgcctccaaagtcaaaaaagtcaggaggaaaaacaccataacatgttccttcatggagtgtatcaaaggaaagaaagagaaaaaaaaaagaagaaagattaaaaaagctcataaatcaatggcatgctcattcaatttactaatccactactcctttaatctatcaaatatttcaagtgggtgcataatcatttgtttatgcttactagtgaacttaattgtcaacggttgtaatctcatgtctgtattgggtgttgttttttttttgatttgtttatttatttaaatttacataaatatatattaaataatcttgtgtgtaccatttcactaattatataaagtataagacaagtgataagtgtttaaggccattaagtagtagtactatcatacatatattgtaagttgtgttatcactatttgaatttcattgatagggatgtactttcatgtgtatagtaatattgatctttggatattattaatttcatgtatatatcacaatatgaggttggtgatattaattttcttactctattgttattgcaatttggtgtatttaatgtttttcacaaaaagaatgaaatgtgtacgattttttttgtgcatttacaccttgaggtttggctcctaaatatgcacaattaatgtgtatatatatatatatttttttctggaatgaattaatgtgtatatattaattagagaagataaaaatagcaaactcaaagtgcatttacaccaaagatttggtaggtttctggatttttgttataacctaaaaataagaaagaaaaaaatgttgattgatggaagaaaagaagtaaaaattggttaagtcaagactactagactgatgtgtagtttttttttttttgttattcctattcgagtctatttttattgggatttttacaccacatactaaaattttaaactttaattcttttttatagtagggggaatttttttcaaattatattgtgtactgtgttaagttttcattgttgttacatagttgttttttagttgtttcaccgttgttaattaatttgttttattgttttaaggttattttataaaaagacagtatttttgtaaaaaaaatttgtgtgacagtaaaattataaatttttgccaaaaatctatttttttttttgtaaaaaactctatttttattagggttaatttagcatcttatgcttttttttattcaaaaattgtattattatagaagttgtgggctagtaaaaacataatatagagttgtcgtattttgtaaaacaaagagcccaagaaaaagattgttaaataacttgggcctttttcaaccgaacaaattttttatcaagatataccatcattttgaatgtaaaaaagatttatatccactataatacatatattttttttaattttgtaccacttttacacatacccaaaagatacctaatatgattaccttttttctctttttcacttcttcagtattttcatttaggaaaaaacttccttttttcttttttttttttcaaaagggggagaagttcatttttatggctttttttacaaatataatataggcatttaacgtttctctaattgtatgtttttcttcttttttgattgaagaccctgaaaacaggggaacaaaaggaaacaacaaacaaccaacaacagaacatcctagcataagctgaagacgagaaaaccagagctaacagcaaagaaaacaaataaaatccagaactagctactaaaccattacaaacgaaactagaaactatgagcagggagattttgaggacaatccgcccctgcagacgcagaggtaagaatgccaatctctgaaggcaaatcaatccaaccaaaacgattattttgattcgcccatttagccacggaatgggccacaccattgcaattcctcggtatccaggaggcttcccacatagtgaactgtgtcacgatcaatctaaatttggccacgtgatcttgaacactataatggagagttccaacttcccgaacatcagtcttcaaagcgtcaattgcatttaaggagtcattctgaaaaatgatcttttcataccctttcttcaccgcttcttcggcacccttacaaaggactaaaacttctccaatgagggggtcatttaccgtgagccgaaaagttacacagtgaatgaatttcccaaactcattgcagaaaatagcagcccctgccgcctgctggttcccaatagagacatccgtgttacacatcacccatccgggaggggggggaagccattcagttaggccaatttgccgggttcgcaccttctccattgtttcaattattcttgtgttaatgtgttggatagtaatgtggagaggggtaggcgtgcccccgtgagataagttgtttctctctcgccaaatactttcgaagataatggcagcccctccaagaaaagaatgtaaatcgagtccaatgggccggttagcatcgatagcaaaccattgtaaccaatcttcccaatgactcatacaagttgagtccgttcttatctgccacatacacccaaaccacacggccctcgcaaagttgcagtgccaaagtagatggatagaggattcagttccatccgcgcatagaaaacacttcgtgtctgctataggaaacagagaatttagtttctcctttgtgagaagacaattggccataaccttccaccatgtcatctttagtctttcatgaattttagatccccaaagaactctccacttgttgtcacaatcggccatagaatccatgttttttatcaccttgtaggctgatttaaccgagaactgactgttgctttcaggcagccacaaccatgagtcctcccgaggcgtactaggcagtgagatgttcagaatacgcttggcatcttcctctagaaaccacgtccgtatgagcggttcattccagccaccttgagaaataaagttgcaaaccatactcatgtccgcggaggcatctaacttgggtttgggttgaagcgtgccccccggaacccaaggatcaaaccaaatggaagtcgagtttccatcaccaattctgcgacattacccctttcccaacttgtctcggctctttagaatggctttccaaagaggtgagtctgagcttttaatctcaatatcaagaaagctttggttctttaagtatttagcctccatgaagtgacgccaaaggctttctttgtctgttattattttccatgcccacttcattaagaacgccttgtttatggcgtcgcttgatttgaagccaagccctccattaactttaggacgacaaagagtctcccaggctatcggatgtacctttctctgttgggcagtatcaccccaccagaaatccctaaggagtttgtcaatttggtatgtcgttgaggatggaaccacatctgaggaagcaacataattggccaaggaggatcctaccgttttgataagacacgctttacccgcgtaggagagaagcttggatttccaaccttgcaccctagccaacactctgtccacaatatatttagtatcctcagtacgcttaagggacctgaataaaggtatgcccaagtatgatgccttttttgacattttcttcatacccaacagctgagtaattgattgaaccgttcgcggggggacctttttggagaagaagaccgatgatttctccacgtttacagtctgtccggagtacttgcaatattcgttgaggctatccatgaactgactcgcttcccggagagtggcctaaccaaataaaatgatatcatccgcgaacagaaggtggctcacggccaggccttccttccccattttgaagcctttgatcaatcccctctccactttatcaacaattattttggataatacatccgctccaaggataaacagtgccggggagagcggatcgccttgtcgtaagccccgttgtggttggaattttcctgtgactgacccattaagaagcagcttaatctcttccaccataatacatttttttatccactgaatgaatctatttgggaagcctaatctgcatagaaccgtatcaatgaaatcccattccattttatcgtacgccttttccatatcgagcttgatcatcatgaaacctctctttcctttctttctattcattgagtggactatctctcgagcaatcatagagttctccgctatgtgtcttcctttaacaaaggccgcttggttgggagagatgactttgtttagaatccatctcatcctaaaggcaagaacttttgaaattaccttgtaggaaatgttgcagagtgctatcggtctgaaatccgtaacaagggccgatgattccttcttggggattagcactattgatgtatcgttgatctctctcggtagctcatttgtgttgaaaaaatgcagcaccatttcaaccagatcggcttgaacggtctgccaatgatgagcatagaaacttgttggaaggccatccgggccgggggctttatccctgcccatttcaaacagagcggcattgatttcctcaactgagggagtagtttgcagattctccaagtcgtcgatatcaagcattggatggggtatatggtcaagtgaggccttagcacacgtagaagttttttgaaataactccttgaatttggatagaaaacattcagagatttcttttggatcttctatccagtcggttccattcagattctttatgcattggatgtagtttctacgccttctaacaattgtcgatgccataaaaaacttcgtacacttgtcaccctcttgaagccattgaactcgagacttttgtttccaatggatctcttcgcgcagcagcgcttccgacagtttgttttttgccttatggatggttaagtgatcattgggttgattagtttcagcatcccgaagtgaagaagtagctatctccacttgtcttttgagatggtgaaattgactatagttccatttcttcagcgttcgaccggtagcttttacctttcgagaaaagtttatcatggggtgttggtggagacgcttagcccaagtatccttgacaatccaaaagcatcgtgggtctctagcccacatattctcatacttgaacaagcggcccttgcacgataaacctccttttgaatccacaaggataggccgatgatcggaggtcgttgaagagaggtgcttcaccactgcattggggaatagaatacgccattccgacgacgctaatcctcgatcaagtctggctcttttggttggtcctccttgatcatgattatttcggtctttggcccaagtgtagcaaggaccttgaaatcccagatcaattaaacccaccccatttaccatccttcgaaagtcaaatgagtaccttgaggagtttccttgatgagagtagttgaagctttcggattccttaagggttccattcatatcccccacgagaaggacagggtgcaatgattgattgaccatgtctccaatgcttttccagtagtcttctttgtcttcccgatgaggcggcccatagagaccccattaacaaccatttgagtccttttggttcaaattcaattatcgcagaaattaggactttgagaatgtatcaatctcacattttacattactattccaacataagcctaagccacccgatcttcccaaaggagcaacatagtggcagttgtcaaatttcattcttgtgcatactctcttaaacttgtccagaggtatccgagtttccgatagaaggagcacatcgggattatgttgacggagcagggccgccaattgtcgaactgtcgcgttattcccgagaccgcgacagttccaagcgaagatcttcatggcgattgtggaggcttttttgggcaagtctccacagccccaaaacgaaaatcctcattcacttgatccaatcccgagtgcaacgaaaccgatttgtcctcctcaatctccattatggtacaagtacctttcaagctctgttgtttctcaaccagcacaaaacgattatccaagtcgatttgttttctttgttagtagacgttcattagttttctttgttataaatttgcaaaaagttatagtcgtaattccattagaatagttatgtactcattcatcttaagttacttatttatttatttcttcattaattttttttttcttttcttttttcttcccaactttctctttcattgtttttacttcttttccttttggtttttttatttttttcttttttcta

SEQ ID NO: 224907 - DNA, 2706 bp, Cannabis indica
aattgggaacgcggtttcccattggccacagtgactttctccttaccattatactcttccttgaggttcattttgtgatttcagatgtgatgtggttgctagcaccactatcagcgaaccaagcatcatgatcgagagtttctgaagtagcagtgaaggcagaagaagtgttttgagattttgctgattgttgttgttgaattcaccaggaggatttcccatgtaattttcgtcataccgattgtaacaatgggctgctgagtggccatacttgccacacacttggcaagttggccgaggtccacttgttctgcctcctcttcctcttgatctattatttgaacctcggttgttgctatgaccacctctgttgttgttgttgtgattccctctgtttgctcctggatgtggccctttgttggctaaacttgcagatggattcatgggaactccagtgagtttcgaagagccagagaatgagtgaagtctttccatcttgctgtcgagacttaacagcatgtcttgaagctgttgccaggttgtagatccacgggcttcaatcagcagtaccatgggtagatattcaatgtcaagcccagacagaacattggacacaagttgattttctgggtaaggttctcctgcaagcgcgagaacatctgcccactgtcgcttttgacgcaaataatcggccatcgacaaggctccttttctagccgtttgtatctttgtccgatattcatccattttcgccttggaatgtgccccaaatagctcttcaagagcagtccataaggaggctgaggagtcacaccccatcacttcgcaggcgattccttccgtcatcgagccgtatagccaaccaagtaagagttgatcgttaacgatccattgttcaaaggcaggattaacctgtccaacagagctaacactgccatctaggtcagttgaagaaagaaattcttgaggtttgggtaaagtacctttaagatatccatctagccgatgtcctcgaactatggcagagaccattgttctccacagggagaaattgtttcggtccagcttgagtgcgaatggctgattcagtgtgcttccaaactgaggcacaacaatattcggagctgagtattgagttgaagtatttgaggcagggacctgctggtttcctgcaacctctgctcttgtagcagaacttccgtcgactggtgagttctccatggattccggcacgcaccgaatacgctctgataccaactcaaaattataaagaaagcagtataataaggaatggagaaaatatgaatgctcagctcaacatgagactgaagctactgctgatatttatagtgtactgaatacagaggaagaatattctagagcaattacaaaatactctgccagctcagagtttgttacaaaggatagaatttgttaggagatattttttacagagagagaaaggacaatcaattgtaacggaaatattctttccaaatttcttggactgctgcaatcattacttgatcatgggccatcattactgggctggttctgttgggcctgctggttcattgtatttctaacaggaagagctttttacttttcacgcatggctgctattatgaatctgatctcagctgcaagctgcagggacaaaaatggtgacaatcagttgagtaacaactagatatacattcatgtcacatcacatcaaatgtattaatataataaaatgtgaacctggatggtatagtattatggcatgcatgatgcatgttccctacaacttgaaggaaaaaactagtacacaccataggctaataactattttgcctacacaaaacgttgagatggaccaaattatgacctttattcagaccgttaaaaattcttcatgaattattgacattgttgaattcaaagacttttgtccaattatgttcaatttcacttacgtgacgattgtccatgtactaaatcgcgtgcctcaaattttgatactccaaattttgacatatatcaatttgtgctccttaaatttttatctacattaggtttctgttagtaaaattgaataaaaaattttgaattcaacaatctcaatagtttgaggagaattttcaagggtctaaaaagcttaaagaacaaaatttaatacatgttaaaatttaaggtaaaaattctaattaactttcaaaatctataacctatacaatacatagcatggcatacaatgtacctgagaggccccataaaagctcttgtacttactatatatgaaaactcatttgtttttatgctgtgtatgtatagatatatatatatattttagtttataaagagtaatgatatgtacactttctacactacaaaattacaaatacttcttttgcacacacacactagagttggacttgactatatgtggcttaaactgaagagtgaaccctcaatttgtttgaattgttttactgtgtatgaaagatcttaatagtaatactagttggcaactttgtagagtgaagcacttgattgaatctactttatatataccaccaaaacccaaatgttccattaatgaatcacaacaataatctttagattttagggaccactactctagcttccacatgcacctacctcatcacttggactcaattcaaataccaacctacaaatctttattcatttttcctcattctc

SEQ ID NO: 224908 - DNA, 5407 bp, Cannabis indica
gttcttcttctgtaggcataaatccgaagcacaatttgcaccaaagaatttaaaaggagatggaaactttggtcatcttcagaatcagagcagagaagcaatggtatgtgtcctttcagtttaaacatactgtggacggtattgttcttttacactgacaaagttttgtaattaggaaatgtattcacgagttagtaaacaggaagaggagatccgatttcttcgtgaacaaattgctgttgcgtctgtgaaggtatgaactttcttctaactctagtaatggtatactcagtttactgatttaagttcacatccgagagaaagcaatgattttcttcgtactaggaactgcggttgcttaatgagaagtatgcgttggaacggaaatttgcggacttgcgtttggtatattcatcatctcttcagaagtgtttaatgatcttttgattttcactaagcctctctcttattaatgttatcttgttttttaactttgatatacttctcatatatattggttttcaatgttctaaagaagagaaatgcaatttcactgataggccatggatgagaaacaaaatgaagctgtaacttcagccttaaatgagctggctcgtagaaaaagtgatcttgaagataatttaaaattgacacatgaattgaaggtatgctactactctacttggttgctgcttttcctatgctgctacttgagggcttggtggttcggtggatgagtgagtgagtgtgagtggtttggggttcaatgtttccatgtatgtgacaatggtttactgtgtcaattatgtattgagcaactttgaatctaaagtgttagtatcacaatggtttactgtgtcaactatgtattgaacaactttgaatctttaatattctctcttgtagtgttcttcatcttcttttagttctttactttttcttgaactactattgtccaatgtttgctgctaataatggtgtatatgtataataggctgctgacgatgaaaaatatctcttcacgtcatccatgcttgggttattggctgaatatggcatttggcctcgtgtcataaatgcctctgctatatcaaacaacttaaaggtattgatttaatattggaaagcatgctttgtaagatttaaaccactgaattttggcgagaagacacttttgctgatagaatcttgtaaatctcttcaaatatcaagttcactttagattcagttgctttcgatattgtaaggttcaccattacatagttcagcctaatctttatttagttgtgcatatgagcttcttatcatatataataacttttatctctggttaaaggccactaagcttttacatactttccaggtacaaaattgctgttgtgttcattttttccctaacatatcttggtgctatttacatagttactcttaacattctttagagttactctcttaaacttactttttataggcgcctataggaaaaattaacaatcattgagtagcagaagaagtttggactgatttctctatatcatgtacttggattgatttctcaatatcatgtccttgagtaaggcgtattttttttcatgaatttgcagtaccttcacgatcaattgcagtggaaaatcagaaaatctcatgtaagcttatagcctagtgattagattgttcttatcgaagatttttattatttttgttgtagaatttgttatgtataaagtttaatgtttctcaaaatctctcatcaccgctactaatgtataatttcaaatggattacaataaaacatattatttatcgaatttttcgaaaactaattaaataagagcttaagaaataataatacagtaataaagaagacagatttttacgtagttcagacgttaataaatcctagtccaagagttagtgtattggtcttaagaggctggtatgttattttacaatagtagttacaagaaaaccctaactctgccctcttagtttctcttgaagaagaagaaagcttagaggaaatttggcagagcttcggctattcattttcctccccccctcttgtatgaagatccagggtatttataggctaaattgcaggtatgggcatgccatgaaccgcctagggtttctgcaaaaagcctactattgagataaaatacatgtaaaggactaactgttgggctcccaagaaggttcttactcatgtggagaggaggtagctagataatggggaccatcgttggtactgaccacgtgtcgctcaaaggttttaccttgaaaaagagacgcctagacaaaccatcaggcaaaaaggtatattcagaggtggggtgtgcacactactatggtctgatactggggacaagatctgatcgtgtgtcagaaaatatataatcgtcgctagagcgatctgagtctctctccatggtagacgtctgacttcctctgtgcgattagtgtctgtgttaggctcttcgggtgccttccaggtgtcgttggggcatatgacgagcttggccttctccgggttttggagagacggtaaggcctccgggtcctggagggcagtacactgcagggcaagtctccgtgtagcccttgggcttaatattttcccggacgtgtatagcttctctgtggcctttcttaattaaggggacttaattagtgacgttttaaggtcgtgcttctcattttatgccacgtgtctctcgctcggaaatgcagataacatttacctcctaagttttcgggacattctgagtcgcggaagcttgcaaccttctttcggatcatcgaagtgtatttgtgagtcgtgggtgacttttgagaacatggaagcatccttcctgtttggccttcaacaattaaaaggtcaaaaagtcttgtgcagggtgcaactggcattgcactcgtgtcgtgtttttaatgagttcgtgagcaacacacgcttgcagagagcacatacttcacgggaaatttttctgacagcagagttgttgacgtgacaactctttaatgcacattaggcccgaggtatgcaatgatgaaaattaaatgtttatattttagccgaagtatgttaaatgccatcttttcaactccccagccactgaatcatcctatgctttttgaagagatgatctgagctgctaattttgaatcactcaaaccgcccttggctataaatagacgcaaaaccacttgtcttcattttttccatcatttctcgattttctaacttcctttgtttccttgaaccagaacccttctcttagaacccagactgaaatatcttgatctgttactccatatcttcactagtgaatgaatgaaagtttcgatcttcttataaactatttcttgcacattcgtgcttgctgttttcctggcgccccgactctcaattttaagcaatccacctccagtcacacgaagagttcgacgttcaagcgggctttgaccgagtcatcaactgggcatgaaattttgaatcaatttcaacgaccatccctcttcttcgaatcgtattgtaagtaagttattctgaacttgttgatatttttgattctatgctaggatagaaatcgtttgttcaagctgtgttctgaatttttcttgcatgcgattgctttagatagaatagttagggtgttatatggtgatgaactgattagggtcgagaatgtcgtgccataagtgtgcgtatgtgttttttctgggaaataggtgtaaaggtttgatggcatgttcttgaaagtaaggtctcaactttttgaagggaattaacaagcaaaaggtcaacttctctgtcggtggatatctggagggaaacttacaaaaatactggaatttgggttaatttttacaaaaatactgtcacacggagaagttttcaaaaatactgtgtttttataaaacaccagtaaaatacaaagcagaacaactcaaaacaacagtagaacaactaaaaaacacaagtagaagaccaatgaaagcttaacacagtatactgtagtatgaaacttataaaaaacacagtaaaaaagtaaaaaataccgcctgacagtatttttataaaaaaatggcagaagttagtataccatgtaaattttcctatctggatttttcacccaacaatcttttgcttatgtaatacaccgacaattggactttcccttcatctcgcactaatgcaacacttacgacgtgatcagacaggtacatctcttctccttctacatgtttcgataggattggagctttggtcaaatgctcctttaatttttggaaggcttccttgcatttttcgatccattcaaatttcttgttttcgcgcaataaattgaaaaatgggatgcacttgtccgtagactttgaaatgaattgactaagggttgcgatacttccggttacactttgcacgtcttggactttacgagcatatcatccccgacacttccatgtttctcccaagctggtccttgaacatcttgttaaccaaccgctggtaagttactccggtgttcttcaatctaaatggcattaccttgtaatagtacactcacttgtccgtttggaaactcgtgtgttcctaatccgcgatgtgcattttgatctagttgtagctggagtaggcattcataaagctcagcagttcatacccggatgtggcatccaccatctggcctattcgtggaagtggaaaacaattctttgggcaagctttataaggtccgtgaaatctatgtacattcttcatgtgccatttggcttagggaccaaaacagggtttgccagccacactgggtataatgacttccggaggaaattattgcggttaacttatcaacctccgcatttagcgcttcttgcctttcccgggtctaaaagcctcctcttctggcagacaggcgtcatattctcattgatgttgagggcatggtattctcattgtgggggaaatgaacatgtttggcgtcgtcctccgtgaatgtgataggcaggttcatggtttgtgggtgttgtgctagtgattgtaccaaagcgcatatttccccttcattctctaactcccttaaatatttcttctgggaattccttgtatctgcaatgtgtggttccccggagatggtggccacatgatcgtcgattggtggtggagccaagcctggcggataggggttccccggtctcggagccagtactgctactgcagcgtgaactggcggagcaggcatgaccggaagctgggtttcaggagcttaaggcgactcactccttgtggaggattcactgtaccctgctgtctcgaaacgatcagctgtctgtgaacaacctctgtctgggatagataatgggatccttatccattggcctaagtgtctggccctaaccagagctt

SEQ ID NO: 224909 - DNA, 5623 bp, Cannabis indica
ggtatgcttacatttgttcttatatagtaattcctgtgttctagctttaatttataatgtcacaatattttagcttgttaacttgataaataaactttcgctttaaatttgtaggtgcgggatgatgatgaggatttgcaagagatgcaagaagaagatgaaaagttaaaatccgtatatattgataaggttgtccttttgtttttacctcacgatagtgttgcaaattacatatatcctcttctcttatttgcaactacagtggttattctaataatccttgctacttaatatcttaatcataacacatctaattttggtctatcaatcaggatgcaccttattcccaatccataccaggaaaatttagttcacacaaagaagcaccttgcgaaggacaaacaagcggtgatagattagagctgtttgacaattcaaacaacagaggtcaaattctggaatctgtacaggagtctagtagcccagagaaaattgggttgaacaaaaatggatcaagcattgagttagcaacatctacatcagaaaaagaatcagttataaacaagactagagttcaaacagtgaaagttcgccaaacacacagtggtccgctgatgcctggttctgtgcttactcattcagtatccgagaagttacgcgtctctgaaaggttcatcatgaattactcttttgtgattgttgtgatgttatttagtaacagatctattttttgttttattgtcggtcaaagtgctttgttccttcataaacttgcattgcataaacttgtgatagatctatcaaaaatcaattagaagtacttccattgcataaacttgtaatagagttgtcaaaagtaattagaaccccaaagatgcatgtccctcccacccttgctgtcttgtattccttatgctaacctcgctctgtgtcgataaatgtttgatggtttgctaattaaatgtctaggtatgagaatgataaagctccaagtgacaaatttcatagtgaagtacggagaacaccaagctttagtggtccattgatgcttccaaaccgagcttcagcaaatagtttatcagctcccataaagtcttctgggggtaagcaagtgtaccacaaaactaattactacttgtgctacaattcctactgttactatctactggctcagagagcttattgcaccaatttttcacttctactaggttttagggattctttggatgataaatcaaaagccaacctggtgcagattaaggggcgattctctgtaacatcagaaaacctagatcttgtgaaggtgagtattctattcttatgatctctttgtctattatttcagtttaactaacttaaaactttgccctaggatattccattaagtacagttccacgtcgatcttcacaggtaggcagcctgctgtacttaaatattctggaataaattatacttagatttctgcttcttactttatgttctgatttgtgaatccagggatccccgttgagaaagtccgctagtgttggtgattggatatttgattccaaacaagtggtttgtgcgctaacctcttggaattgaataagatatttgattccatacatttattgttagagaagcatcggtaaaagtatttgatgacattatactcacttttcagcctgtcaatctgtctcctaaggagtcgaatagcagcagcatagtacctgcaacacttctcatgcctcaccttcagaatctttttcaacagacttcaatacagcaggtaaaaggggaaacttggagagactttttttcgtgttttgaatttttttttttctctaaagtagacaactcaaacttctgaaaactaccgagtgatgttattcttgattttacaatgccaggagcttatcatgaatttgttaaatagcttgcaaccgaacgaggtggtagatggtgagtggaatatctgtcattttatgataattggatgtagttgtattcggcttttggaatagttgtatgttacttacaagctgcttctgttctgtagcacctgctcaaaatgggaagttgcctccactgcctcggagtccagaaagcaatggaactgtaagcatttgctctatctccataccgatcttcgtctcaattaggacattatttctgtacaactcttctgtttgtggcaatttctttaaaaatcgtacccggtacaaatgcatatcatatagctttaattctttcaactttttcccaaactattcgattgaacagagaaaaggggagaagaatacgtacgccttattgtttaggttatcttaattgaaattacagaatacattcacgggtccaaagcttctcttcaatatgagatcttacagaatatcaggcacagatacatgcaacttttttattctaaccatgttccctcagccaaaaattcattagtcgagctctcagactcggtgttttggccaagttccttctacattgcataaaatgtgatttgaatgtatagcatattctctatggttagttgcggactcattctaagaacatcctgatgtgagaacagatgtttatatagttactaatcaatcggcctgactaatgagaagaatgagttagttttatatgcctatctgttattgtcagattttatatggtttcgaaagatgaactggatatggacaattccaataagattacattcttgaaccaatatccattttttaatttagttcaattgttctacagcttgaaactgctgcatctgatagagagcgcctgttgctcatgaagatctcggaactgcaagctaggttggtcacgttttgatttgatgataatactcccgttttctacataccgactctctgtcttgtattgcaggatgagtagcttgaccgaagaactgacaaccgaaaagtttagatacatccaagtgagttgattcaaaatctatcatctttcttatacatcactaattatttgttgaacttttctaataaatagattttacttcttgaacagttgcaacaacagctaatcgccgtttcaagcgaagaagaaaatggggatagaggcgaaggggtaggcatttaagagcgaaaatatccattagtaaaatcgaatgtacatccggacaagatctgatccattcttttcgcttgtatggggactgtttccggctgtttatacgagtagaccaccctatgcaaatttaaacaaacaaaccgaaaaaaaaaagaatggagatgataattcgggtctcttcttctgctactttgtgtctttagtttcgcttgaagatcatcaccgctacctcgaacgggagattaagcgagaaatttacaggtatgaccctccacatgaagtgtggttaacattcaagctgaaggtgaaaaaaatttgttagtatctataatatagtggtagccatgcgaagggggaaaaaggtttagctataaatcataatattggtttataatattatcccatagtttcatataattattaattaattaattatgatgtttcaaacatagtatttcatctattattattattatttattatttttgtcaaaaagggatttatgagtttgtatatgatggcggtagaagaaacgtaatgggacttaattcatttccaaaatttgtgtaaattctacttgttcttcacaatattctggttctgtatttctgttttcaattacccccttattttattttacaatatattttacatttacatattaaatgaattctttaacatctaactatattgaattttatgtcctgttttggtggctgaatatatagactttgtaacctcaaattatggtatacattttttcaattgtgaaaagataataataatagtgaatcattacgaattacgtagtagggaggaaaaaataatcacctaataattgaaggggatggctttgagttcaagtgtagcaaggattgtatattttgacaaccaaaacaaactaattcaacttttttctagaaagaaaagaaaatagagtgatttagtacaaaacaatgaaacatcacatttgttgagagtagagatggaaattgggttggtaataagcagtaatgcactttctaatcccgtttttgtttttcatgtaaattagggaagattaatcataaaacaattatatgaaaaatttagaaattatatatctgagtcgaatatggggtgagtagtattactcacgattccactttgaatctactttaggtatataaacttgcatgtcactcttgttacattcagggccggccctaggcataggcgggttaggcccgtgcctagggctcactctttctagagttctatttataattttaaaacttcattacttaattattatatttaatgaaaattaacacttaatatagttaaattaaatctagcatagtggtagcctaaagaatggtaagtattatatttttcttggaacttgagttcgataccaccaaatttcaatttatattattaatttgatttatttttaccttaaataactattatataaataaaaaatattttttaaagtgtttggatatcattaaaatattttttttaaagtaaattaagagttatgtaaataattttaattttaaaaaatagttactcaaaagtcattttgagagaaattacaaatcttagctttaaatacaaaaaaaaaaaaaaaaaaaaaactttctattttttattcaatcatacttacattaaattgaataaaatcaatcaatggcaactaattcaggatacagaatacccttctagatagtacgatttgaggagaaacaaaaaatttgcgcttaataaacgattttatttacagatcttttaacaaaataaataaaaacaaaagacaagcatttaagtaaagtcttataattagaaacaatataactaaattaaaaaagagtgaagatgtattttataatagcttgaacacaaactaaactcactaactcgaagacaacattatttcatgtaaaactctcatgagaaaaaaaaaattaattctaaaaactaaatcgagcgggactataatatattaataaaatttgaaggagtttgtagtaaaatccaataatgtatttaaaaatagaataagaaagacaaagaaaagagtatctcttcccaaaagtaggcacaaagctcaagtcatactgagtcaaaatgtggtaactcgttaccttttaagtactgagttcacaactcggaagctattaaaacctacctccttacctcccatgtcagattcttacaaacaactccaatgacctccttccatacccatcatctttctcttcctctttccccaatccaaatccattcctcttccaaactcaaaccactaccaccttcttcttcttccttattcagactcaaccatcactaccattcaactcttcaatggaatctcaaaagacaaggactctgtagagcagctgaactctctcacgatgcccctttcgccgttgctattggtgcctctatagtttcttccctcttttttccggtcaccggaaaagaggatgaagatgatggagattcaggtcttgattctactgattcaagattggctgttatgagcatcat

SEQ ID NO: 224910 - DNA, 2496 bp, Cannabis indica
tagtttatcttatgagttattaggcacaaataaatattcgtacaaccacgcagtttttattctctatattgtctttcgtactacaaagttgattatttgtattcgcataataagaaaatgaatcccggccaatctcatgaccatgaagaatgcgaatcacctctcccaaacagctatatatttatattatatggtacaactttttttattaaccttagtttttattcaataatattctgatattaaactaaaataatctacctgttgccttaattatagttcttgacgagaatgtatttatcctcattcctcccctatttcttaatatttatttaagtagggtttcatgaacgtgacaatgttcaatgttcatacatacttattacctgtatgatatatatatatatagctagttatgtatatgcatatcaggtaaagtttattatatttgtggaatatgcattaataaactcggcaggtgtgtatgattgtttttttcttttttttttcatgtgcaatggcagtcttttgtttatattgctcttagtacctgcgcaactagatttatattcacgaaattatatattaattctaagattatcactactgctaattataaatagatatatttatttacaatggacacaatatataacaatattccataattatcatcagactaaaagaaattaaggtgatggctttagttatatttggttgtcctcatcaattacttcctttgaatgagtaagacaaagttcattagaatatataggttaaaaagagagaagtaataaactttgcagttctttttctctgtgtacacaagtacatatatgcatgcgtgtattaaaactatcttcttttcttagtgtggaaattctcttggaaagagctgtatcctatctagtcgtaaggaaggactgtcgtacctgttataattcaaacaatatcacagacaataatataaattgaaagtgatgactaagtctaataccacaattatactgagacatattgtgactttttctgttaaaaaaataaatcaaaaatgaaattaacccacatggctcattattattttgtctctgtcaagtgtatcattattagaccttccttaacttacatataatagaatagagtaatgcaacgtttatataagatgatagcaataaacaggagattatatataaatataatatacatatatataatatgcaacatgcgtactttttgtcttaacgttatctataaaaattgatcttgcttttccctccaaaatctcccacatgacaaccactcactaaaatgtttcaattttcaaaactagaaataggaaaaaagaaaagaaaacgaaagaagaacatcagagagagagagagagagagagagctaggcccgtgttcataaacttattaaccttttaaaaagtggggataatgtatctttgcatgaaacggtgatatttctaaaaagttagtaatctttttatcattttgttgattgatagatcatgatctttatgcatatacatatatagttattgagtttcaattatatacatacatctttttcacctttggttttaaattttacatgatgagtgtgtgagatcatatcgtatacattattattattcgcagacacacacacactatactgctttttatttttgtcatgttgaagagggtgggggatatggtagttagacttagacataactttggacgcagaacacttataaagagcttctttatctccctcatcttttgctccctatacaataaaattatatatataatgagaaaaagcatatatatatatatactattttaaaaagaaaaaaaccaaaataagccatgaattaaaagaaaaaaatcaaatgatggttttgggattgtgggagatttaagggccagaagatgaggacttttgaaaattggatggttgtgttttgttgtgtgtaatttaaccggtgacacggcttcttttagcatcatggtggcccatgccagtgaataataagcctttgctcatcagtaatgatggctattctttcactcagtactcactcactcactcctcaaaatacaaaattattatataaatataataaatatcatgctattataataatactaatattatttattcagtccatagggtaatgtcaaaagctgaaagtgaaacagtagtactagtaaaagaaagagaactggcaaaaggcatccctctttttaatttctttttacttttcttttattttttgatgatctaataaaaacaaatgccctacgtttttgcgccttaactcaaaagatagtgaacttttggcatccccaaattaaaaaggctggctgccaccatttcccttctcacaccccttatttattaaaaccactttcactacagacccaaaagaaaagaaaaaaaagaagaagcatatattcaagtgcatatggtatagaagaagacaaaggttgttcatttctgtag

SEQ ID NO: 224911 - DNA, 2049 bp, Cannabis indica
taatgagaatttttccaacactttattgattaaagaggtattatacaaagtcatttaagggaaaacagacataacaaactaacagaaaagcagttaaaccaactaactaactgcaacttgtttacaaacagtaataacagtatttacaagtactattacttgaactctccttaatttagagaaaagttgtaataatctctttgccatataaaattcttctttaattgtaaatttattttgagtctaatatatttaaggttttcgttttcatatctaaagttcactcgcaattaagtacccaagccgagtaccacaacattcctaacaaattttcactcaacaaaaataaagcactaatggacacggcttcgaatattaatttccttaaaattatccctagttaaagtaaaatttcatatattgtcctaataatcataaaatggaatacaggttaaataatcattttaactttttttcattaaactgtagtgtaccgtgaaaaaaaaaaatatggtcctttgtttctttcgttatatataaaaaacaatattaaataataataataatattaaccaaaaaaaatggtgggaaatatggttgattgaaaaacagtttgtttatttgttattgttgacaaattgagaaagattaacccaatttatatagtggtgagcgtgccggagtggttatcgggcatgactagaaatcatgtgggctttgcccgcgcaggttcgaatcctgccgctcacgtttttcgacatttttctgataaatttttcttaaagattgggaaaaaaatgagaaacaaaatcgctagaaggagggttcgaacctccgaccttgtggttaacagccacacgctctaaccagctgagctattccagcttgctgagagaaggaaagtttataaatttaataaagtaataataaaaaacattaatactttttcttttactgttttagtttttgatacatttgattacaacaatattttctaacagaaataaatgaacgatttttttgcaactttaccaacaataaacagaaaattacacttttttttaagagtttatttgaaaaatattgcatttctaagtttgccctttttgtatgggtttcggtattttttttttaactttttatggtgttgataatgccatgtttttgcagccttatgtttagaataacgtattctaagttttggtttaaaaaaagaggttttttcatgagaaattttaatggagtttatttttatatggcataaataaataatgcaaaaagatatgagattaaaaaaattaaagtttaaaatatgaaaaaaaaaactaaaaaaaaaagacaataaataaatttaatcaatcttctaataataagtatcgccgaaaaagttattgtcgctggaaaagttaccgtcgcaagaaaagtcgctggagttgtcatcgtcgtcagaaaagtcgtcggaattagatatcttagatataaattaaaatagaacggctctataaaataatgaataaaaataaataacataaaataattcaaattagttataattaaagtagaatcaattatataacataatgaataaaaataaataatacaaaataattcaaatcagttataattaaaatagcaccggttctacaacaatgttataatgaataaaataaataacacaaaatagctcaatccggttataattaaaatagaactgattccataatataatgaatttaaacaaataagacagaataattcaaattgattataattaaaaaataaaaagaaaaccagttcttaaaacaatagaacataaattagaaaccaaactagttcaacaataaattgggtaaaaacaaataacacataatacctaagaaatcagttataattaaaaaaaaaaaaggtaaggagtcaaatcttaaaatactgatgcataaatctaaacagaaccgattacataacaaaataaaaataaataacacacaataactcaaaatataagataaagaaacatgttatatttatcaattagttaagaatatgaga

SEQ ID NO: 224912 - DNA, 5256 bp, Cannabis indica
tgatgcaaacatttgaagtacgattttatgttataaaaaagacactttgtggtttagtattagtctctgatagttggttataatcggtcaattacaaaaataacagttgtgtttaggattggcatttactgttatatttgaatctagatgattttcttttacactcttccaatttcttagtatgcagctgctagggcatggaccaaatgggaaatgatgactgcccatcttattccaaacgatgacaacatcaagaaaggagatgatgattatttttcattggtaatatcatttttacatctatcaactattcatccctatttttcattggtatatcatttggcctcttttagttgggaaatcttgtctgctgtgtacagcttatagattcaatctgctgtatgtatgctattgttcttactctggttacaggttttgtaatttgatttgttctgatgactgaagttagtcattgttctttctgtttgattttctctacccaggcatttgctaggattgaaaatcattatttttccaacaagggattctttccttcagattcatacctgttggataacattgataagatacggcatatagatgccacaattgttcaggttcatattactttttcattcatgctcttctgaaatttttaagataattgtgttacttaatgattcttgaagctaattatcgtaaaagattatttttctatatttattaatgcaaggaaaatccttcataaggtgcttcatccttgtagctaatttactttatctaagttacagaaaaatacaacaatatatagaagatatatacaataatacatacatttaaattcaaatccctaagacttacaaattggaaataaatcttggcattctaccctcctctcaagttggacaatgtgtacttttcaaaccaagtttagaattcaactcttgataaaggacgatgtagagccttgtaagaatatctcctatctgaattcgagatgaagcatgcttccgtgagattgagatggagcatgcttttgtgagactaccttgccttctatcttcttgcttgtaatttgtacatcaattttcacatgttttgttctattatgatgggctagatttgtagctatagcaatagcaacttgattatcacacaataacctattgctttttactccaccatgtaaccaaattacaccatacataggaatagtagtcaaaatatgattttcgattgatagtagcctatgtgcatcaaaataaatttcaagtgataaattgtgtgtgtttaaacatgaatccttctcgatagtttaagattcaactgatgagttggatgtgtccctttgaacgattgcttaggttttggctcaacttaccaaactgacaacaaaagcttatatccaagaaagtataagttagatagatcaactttcgcacgagacactagaacttccctctctatccacatttgttccttagcgtccaatttaatgtttgaattcatgggtgtttccgctggtttgtacccactcattctagtctccctcaaaaggtccaaaacaaaatttgcgttgggaaatttagataccatggatggaaagtgccccaaatccttgatctcaaactccttagaaagcaagtgctttagatggatgatttcctcgtcatgattttttagtaactactatatcatcaatatacactatcactagcaattctaatgtcatcttaggttgacattgcgagtaaccatctacttcaagtactctagaaaacctttcaaaccaaactcatggcgattgtttgagtctataccgtaaaaggatttgtgatgtatacatacattgtgctttgagtggttagctttcaatatttggtgggacatctttatatacatctttcgtagatcttcgtttaagaatgcattttcacatctaacagatgcaatcgctaatctcgattcactgcaactgataagatggctcaaattgtgtttacttaggctacaggagcaaaattctccttatagtcaattccataagtttgagtaaaacatttagccaccaagtgagctttgaacctatctatgctcttttgtttgatcaaaaaaatgcatttatgttccagtcttctttttaggaggtaaattagttataatccatttcccatttagggctcagatctcctctagtgcaacagccttccatttagggactggtctagggccaagatgaaaactctaaagttctgagacaaacttaaatatgatatatagttttggagtgggtgttgagtgcatgattggactacttttctctaagttactgggttgtctagttctgaatcacactcagtagcagagtcaagtttagtctcttcttttaaaatcttaggattgattggtctcagattggattcacatgtgtgcctccttgtgcagaccttgacattattgtctagagtaggaaggggaatgcattggaacgaaggtttgggatgtagagacttaggattagttgatgactcttctagaggcattttaagcgaggaaaaattataaggaggaaattttccacatgaaatagtttagaagtaatgtatactagagtaggtgtctcagcacgccagcccctatatatcaccagcacttggttgaatacagccctagctagttagttgtcatgacctcaaccacggatgaacatcatagcgaagtgtgaccaatgaagataattgtgaccattgagtttgtgactggtcactgggataatagtactttcagatggggctggagtgactggagttgaaggattttgaggattaatgatcaacaaagagttgcctctgcttgttctacgacagccattgaagcaaagagcaagaaacacttgaggaggaacagcttgacagagtggcaggatttctgaatagcagttctattttgttttaatgaaaaatagaggcaaacagagtagtcaaggattgctacgatattacaaagctaattgtggtaaaagattttatatttatgcaaggaggatcctgaataaggtccagtaacggaaaaatgcagcagtaaattttaaatatatacagactatgttcatttaaatttaaatccttaagacttggaaatcgatttgtattatcatttcattgttggtacaagtcaatagtttgttttcgttcattgtgtaatttaactcaggcaagaaattctaactagtaacaatatctttccagggaagatatgatgttgtctgtcctattatgtcagcttgggatgtccacaaagtatggccagaggcagattttaaggtaatttgaactaagaccatcccttctttaagcagaaatgtgctgttataaaaagattggacaaacaaactactgaattttttaccatttttaacagattgtgaaagatgctggtcactctgctaatgaaccgggaatagcggcagaacttgtagctgccaatgaaaggctgaaaaataaaatcaagggtggaagatgagagaatcaatgcaagaatgcaagtgcaccatgccatgttcgtcaaatcaagctttggcatccccatggttggaggtttcttgtgaataataagttgaagctagctgttaatgagtacatatgataatcatgtcatgtcaatggttagttttctaagttaattagatctggttatctaatcagctcagctactgtgtcagtttctttctgttaattgaagcaatgcactaaaagttttttcaatgaaattgttgcttcccctaaatcttgtttataaataaaataaaaaattgacacaatgaaatatattttgaaaaggtgataaaaaccgccattaagacattacaaaatacaaataggtagagggtctttccattcaaagtgctatgagctgctttattatcaacacagccaatatgggattaagtttcctttgagtaaacaataaagttataatatcaaagaagaaagcacccaggtcagtaaagtacatagtgctgttattgatggccataactgaataaagagaatcagaaagagcagcatgaatcgacttccaatacatgtgcggaaaaaagagcatgaaatggcttcaaatacatgtatcgctgaattttaatagtacaattcgaatagaaagaatcaatggtattattaaaagtaataatgataataaataatcattcaatgatatcatatgattgaacaagaaaagcattataatatgtatgtatcaatcatcatacagtgaatgaagaataatttaaggcacctcccttgtgcagctctttggtacattaagactgaaaatttggctcattgggtatggcgaccttcttcctcttgacactgatcttcttggggcaacatgaccagatatctcaattgcggaagaagcaccattttttgcagcttccttgcgtccaaggatagttgaagacttttcctttgttacgccaagtcaacaagatgttcaaacttcaaaatgtctcttcttgcttgtcaggtcgtttaaagtaacctctcattttttttaccataactaaagtattaacattcatgacctcctagttctactcactgttgagtcctcaatatggttctttttctaaacttttctctggggttataagctataactgcttcatgcttcctagatatattagtccttgaagtcctaacagtaagttttcatttaagtttctatgctgtagagaaccttgtagagtaatgaaacagaaccaatttaaatgtactttgtataatgaggggacttacaggtgttgatgagcccacgtgttttatttattcactttcacttcgttcttggcatattccggttttatagtcagaaacaatggctgagtttagaattgaaagtaagataaaaaaaagaattagaaagtcaacctggcttagtttagggtttgatgttttctcaacaaaacttttactcctaatggttttactgatgtgagttcattcagaggtgtggctttcttctctagattttgcttcctcaagattactcctttcctaaaatgagtatagtatagcacttaaatatgtaacttacaagaaaaaattctcaggtgtggggaggtgttgggtttggtcagtattcaagaaaaaattctcaggtgtggggaggtgttgggaaagtggggtagagagattactggtaactttcagagagaattgatcaatgtaagagacagattagcaattcaaagta

SEQ ID NO: 224913 - DNA, 4032 bp, Cannabis indica
acaacttttgaatgtaaaaagaaaaagaaaaaagtaatataagagagagagaggactcacataaaaagatctcttcatatgagtgagatctgttatttccagttgcgcaaaaacaccccaagaaggaagaagagtgttgggttttctttattatttgatatttgatatgaacaaaatatgagcatcagcagcagtaagctccaagctccaagctccaaactacacacacccacataaaaataatggatgatggtgaccaaccgaccgttgctgcccgccaaaatatgagcagtagtagtaggagtaggaccctatttccacctttgcttttgctttgcctttgtatgtaataatttgtagtatgtatattctatgtatatgtatcaaatctatcttctcatatttcaatttccttttccagaactcacacactctgcagccttcttcctattcctatatagagaacaaatagtagcttcacccagattaatcattatatatatacatatatgggatctctctgtctcatcatggcatgtcacattcaaacatttcataagtttctcaaaaaaaagtttctttttttccttgttatattcctatgctgtaaaaagaaaaattacagaggctaggccaataattctcagagactaaaaccaaaaccaaaaatatccaatcttttttcttttacttcttcttcttagtttaataattatgttttttcttgttgttgctgttgtgagtaataataataaataatgataggatattaggatcaagtgttaaccaaacattttggagtggagatggggctaaactaaactatatatgtttgtaaagagaaaacggtaaagcattagatttggacattcaaatgggatggtggggactccccattcacatgatccaactctacttcctcatttgtccctctcctctagtactactttttattaattttccattattacttgtactactaccactacttttttctattagggttccctattccttaactttaaaactcatctaattaactctctaaacaacaacaacaacgtccctctttgagctgtttattccttctatcttttcacaattctgtgtactaaatattattctacattagactacttgtttattttaataaagaagtagttttagttttagctgtgaagcataatatatgcatggtttaaagagttgtttgaatgaagaagacaaaattagaagaatgggagagagagatgggagtggggggacaagggacaaggtccgaggtcgatcggacaagagaagagaggtaagagagaaagtgcggtcataatctttatgcatagcataattgaaaaacactagttataccagtcatctctctacatgtagtattattgatattctaaacctctccaaactcaccaactactatacatataagggtatccaatgttaatccctcacttttcacataaatatattattttattcagcattgttattagatactagtggtgcctaacacgtgtcgccttgcaattggttagcgatactccctaaaagctattatattaaactatagaggacccgatactaaattagactaataatgatattgacacgtaagaagatgtttaacaccactaatactttttagtatttctttattttattttattttttttttttgaataaaaagtttcattaaaatcaggcctcagcctgaacaatgtcacacaagaaagaaggagcattcagctcattaaacattcgatttgacgataaataagaggccctagcaacacaatgggcagccttatttgcagaacgattaacaaaagagacaaggacattatttaaagaagataaaatagtacgacagtcctcaactaacaacccaaattgagatggcatatgaactgaactattaattaaattggaattacattccttaattaagacactatgtaatatgttataaatgaagctgctgcatacaatatatgacaagcaagcaaaacaagcaatcgttcattatgaagttaagcactattattattattatatgttttaaggttaggtgacataataaacactaatagtacacaccaaaaaagattatggcatgggagacatgaaagctacaaaactaacaacttaagagagaggatgattattaagtagaagtagttgtactggtagaattttttattttttcagaatattgtgctggtagatctaaaactaaaaaagtgtgagagcaatccaaacatcacatacaccatataagtgtataataggagaatcatcaaacttgaacaatatcttacacttttgttcaaaaacttatttcccctaccacaagaacttaggtggcgtttggctggaggtaatgaaatgaaatggaatggaaaggaaataattttcattccattcctttgtttggttgcattttaaagtattggaatgacattccctttccaccattttggtggaatgactattcaatttcgaaatggaaggaaagactattccaatgtaacatgaaaaaaaaatttaatgattttttttttatcaatttcttttatgcattttaaattttattccattccattcctattcctatttctattctcattctcattcctatgtttttattcatcccaaccaaatggcacataaaaaaaacagaatggaaataactttctgaatttatcaagcctaaaatgtttctagcaatattctctcttgatagaaacttatttatttattttatgtttttgtaattttattatttatttttatttttttaatttattttaaaataatatgtggaccacttaaattctaccacatgtacatttgggtacgcatcaacaatacacgttagcattttgtaacgtccacgcttcaagcttccattagccattcccagtaggtcacctatactgaaattaccacaggtcaagcacgtgatgggctactagaaaagaagatgcatcttgtcgatatagctagtaccaatcaattcatttaagtcatcttcaactgtgtagtgctatacctacacagtctcagaatcatcacacttaacatttcccaagcaatgtgatattgcacagctcccagtctttcaccatgcaagtcacaagactctgactgtcacacatttaacaacataattttaacagaagtgtaaattgcataatagaagtgcggttcagagggttttaccaccaaaaaatcagtttgtggagttaagtatcactaatcatggagcttagataatttttccgtcaatatcccaaaataaaaataaataattatagtaaagaggaagataagttatgttctaaaaaatttgtcaatatgctaagctccatgataaagaaactcagctacataactagggatttacagtgggtacaaaattagtggggagtgctcctccagtccctatcccctcttattccttatcggggatggagcaaaaaatagcctaataaaaataaagtttataataaaattttaaatatataaaaatattaaaatacataaaaattaaaatattacacattaattattatccaaaacacaacttaaaattcataaaaataatactaatatactaaaaaatacaaacataaattataaaatgtaaaatattattccaaatataaaataaaatattaaacgggtccctcactactacaaaaagggctttttgcttcggtttttaagtgacatataaagtatttgcttcggttggtgtaaccgacgctataaccgtagatgcaaatactgatttttttacattgattatgaaccgacactaattagttttttgcttcggttatgaaccgaagcaaaaaaaaggttattgcttcagttcatagtcgaagcaaaaaatccgtgcaccgatgctaattgttttttgcttcggttatgaaatgaaacaaaattgttttaaaaaaattaaaaaaaaaactgaaaccaaacaatcctgacaaaaaataaatacaatatcagata

SEQ ID NO: 224914 - DNA, 7076 bp, Cannabis indica
aaaatgcaactgatgcctgcattattatgtttcttggatgattggatcacactttttgaggctctccttgtgtatagcaagtccagaatgggaaagaaaatataatagtactataaatggtaatcaaagttcagtgccagccaagaggttctatgatactcatagctggtataataggtcagattttttcgagagcttataagccctcttctttcttttacactatgtttggtagaagggagaagtaggtggatggagagttgagtagggatagagatgggaggagatgacaaatcccttcgttcgacaagagagcttgaaggagagaaaggagatatgagaggatagcaaatccactcaaacctcacatttagaatccttaggggaggattggcactctcgcacttcaattattgtaaattactaatatacccacctaaaatattattaaaaaataatcataaggatactaatgtaatttcataaataaataatcatccatccttctactactctatccctcataccaaacaagttagaaggttattacttttctttctttcccttatattcttcgtcctacatcaagtatccatcctccctattcttccatcctaccaaacatagccttaatattttctcagccagcacatatgaacatgtataagattaaacaacctgcagcttgtttgagaggttattattgtttgttctaagctgcatcgagagataatcatttcaatgagaaaataattcactatcaagaacaggccctacggaaaacatttttattcttttaacaatggtccagccactcggtaaaaaagaccgcacctgtgtactgagcgtactttcacgagctataaggactaatgctcccagcaacaagcatattccatgaccccaatccccaaacatcaccgcaaaaagaaatggaaatgtgataacagtgtatacagcaggatttgcttcttgatatttagcaacactgcacggaaaatgttttgtcagcctctgatcagcttaaaagattgatagaaccacaggctttacatctactcttttttctttcttaatgtaaaagttaaatgaaaggaaaagaagaaaagaacacttgacgataaagaattttttaatagctcaacataacttcgaacaattattgcttgagaaggagcacaatgcaggaaaaagaattatgagacggcaacaaaaggaacagatacataagggaaaatttgactgaggaagcaggaaaaaaaataacgagacttcatcatccacaatatttaccttctcattcaaaaaatttacttacaaactgccactaaaaataattgtgtataccggtagccaatttatttcttgcaaagactattatcttctctaccgtacttgcaggacgtggttagtttgcttttcttactcacaaaaaatagtagaagcaataacaattacatctgcataagcattctagaatattatcaagattttgtaattgtaaatgatatgtcagaactaaactcacccataagcatcaacaatttcctgaaaagcatttgtgaacttgttggttctaaaatatgtaggaggtgattctatagcatccatcacgtgaaaaattgtgccgacttgcgacttgctatcaaatgttgcacgttgcagttcttcgctaatctacataagattacttaatttaatataatcttgccatcgtcatcaaaggttattatacacacacatatgtactgaagtaccaaataaagactggtataaaattaccttatcttgtgcgaagataggacaccatccctctccaacaagacatttttttgttacatcaaaatttagcatatttaatgtatcatagacagctttctctctccgtacctatggaaacaatgggatcaaaaaatgaatgtccttgtcttcatagtgcaaaatcacacccatgcagttcaaataggtcataccattttcatccattttgttatatggacacttaaggatgacagagcctcatttcgatgtcggatccctgcttctaatgttgcttccagttccacaaggcgggatgatacctacaggggattaaaaataaaaacttaattttaaactaggtattatgtggtcctgacacaatcataaatttaaaaagacaatgagagggatgtggtgaatagttggaggcttggaacatcaggttcaattaaaccacgtgaattatcaaaattctgcaatcctttaattaaaattgaagtgaattaaaagaaaaaacttcaaagtcaataaagtttcagaaaagaaaatgcaaactcacttctctagttatttgtgtctgcttagtaatatcttcaggcacaggataacaacttgctccaaatgcgtcacaaattttcaaaatctttgttcttgcctgctctcctgagaaaaacacaacgaataccattttctcgacctgcaaatattataagatacaagtaaagtgtctgtcagatggcaaaatactagtgccaataataataataatgcccagtgtacaaagttggacagcaatctgaaaagagacagctaaataaaagagggggaaattacattctgaagattaaataaaaaatgactaaatagatttggtcataaataccatgtcattggataaaggatccatgatatcttcatcagctggagcctggttgaaaagcatatttccccttgtagcacgaaacaacatcctctcaaaactaagccctttagacttgcaaacaatcccacagataaatctcaaaccagattggcctgaccgtccaggcctcacctcctataaaggaagcagagaaaattgaaatcatggcattcagttcaatcttcatccgaaacagaagcaaagaaaaatagggataatgtcttagtaaatgattacctgttcgagcaatgatgctgtttcaacatagctatcatttgaatagatgttctcatctagttctctttcctctggaactgtatgtgttttatttgatacaagaaagccacttgcctgatattaccacaaaaaggtccaaaataatagttactacactaaaaaataaaaaaggtgaaattcaaatctctcatacaaagaaaagacacaaaaaaaaatgtataagagagctacagattggataaagaaaaaatcaagacatgaaaataaattttaaatacttgactactgaacaattctaatatagttgggaagcaaaagattatctgatttgtaagactgaaactaagaacttaccaaagatatccttgacataccacattaccccttggaaccagggctaaggtgggacctaaatggcttaacgcccctgaatttcgtaaacataagagctgaccaatgtgacagaaggtaagcaacctaatgctattgctacaatcatctacaggtgaagttgagcaatcaggcatttgttttacaaaacaaaaaaaaggggttggaagcaaaataaaaatcaagcatagcatgtctctacagaaagtcactcattgttggagtgcagtgtttctggtcaaatttgaacaagggctctgatttcggatttccttaaatttttcattaaaaaaaaatcatcgttatcccatcatgttctcagaatatgatctccaaaatttgtcttctattgttctactgccctccttaaagcataagttcaaataaagattgagtactacttaatgcaaacataaagacaagttcaagtaccttttgcaataccatcttgaactccaagagctcattatatgattgttgaagtttatcactatttgagttaatttccatcagctcatgttcatgttcagcaagttgtacctgggattaagagaaaaaaaaaaaagaatgtaacaaaatatgtataacatgatctattcagatattctttattttaatacaaatgtgagcgtatgaggggatagcagaatgtaacaaaatatgtataacatgatctattcagatattctttattttaatacaaatgtgagcgtatgaggggatagcagaataggcactcatcaaaaaaggaaagcagtgacatagtactgtacctctaattgctccaacccaatatctggtggtgtcacaggacgtgtggaaaatagaccggctttactgatttgctctttgaaaaagcgtagcttccttgacatttctgcacatcgctttacctgtgtaggagaaactcatagaaattcatcaatgtgctcactgctaacgaataatgaaatccccagtcaacgtataaagataaaagcaaccatagaagggtgagagcagtataatcataattggagagagccacgagagacgattgacatgaacaattagggaatacaaatggcacagcagggttaaaagtaaaagttatgtgttcatcttggccaataatttaacgtacaaagagaatgtagaattatgtcggaatgtcaggtaataatacgttagtctgttacaactgaaacaccaagctatattatgacataacacaagggcataactggataaaacgttacaattctccaacatatatactatagtatactatggaacttaaatttaacatttggactgcaataacccgttagcagtcattttagacaagacatgcattgcagtctactcttttcatcatcaaactcaaatagataccctcctcttccctccccactctcccatcccctctcctacataaacacaaaaaaattttagtagatacctgattaacaaacgtcctttgaaaagggcttttatcactgtttaactgcaaaggaaaagaaaaattaactgtgaatacaaatgtgaagttcattaaataaatttatcgggaaaaaattatcacaagctaagtcgcatgctcattttagatatatatatatatgtgtatgtgtatatatgactatcaagcagtactgtctaaaatatgtaagagttatgttggtgtgggcgtgactcattaacgatcttgttttatgaacaatgaagtatatgatcccaagcttcataaaaatatgtgaaaattagttccccgagtcaatgttcagatacaccttacgtactagtctagttatgagatgtagtaatgtagcttggataagatattgataaccttgaaacatggatatcaaacatccagatttggaaagaatcgtcaaccacttacagaaacttaaccataacagcaatacttaaattaaggtatcggaatattaccggcaaaacaaggaccaattcaacagcaaacagatatattatcctaatcttatcattatattaattatatatgtaaatgtgtacgtatataattccaaataaaatatgtcttaactaacaatttatcaaacagttacgagaactaaaacaaaaatctccaaattacaaataaattcaaattccaacataattacaaacacaacagctgacattgtttaaccgattcaaaacaaactacaaatcttgtatgaataagatcacgccaagaatgcggagtcctcatttctcaatttttaaaatcaaatgccgaatctaacagtattccaagaaaaaaagaaacagagtcggatctgatagagaaacttacgtctcggaattgtaaaaggccgagttcgccgagataagagatgacgcgatgagcagattcaaccggaataatgagttgaacgaaggtcatcttctcagagcgcatcagatccatgggcggaagattctcaatgaaatcttccattttggagagaaccatagagaaaatgtttgattcgtttcggatcgaaaatctttgctcagatctgaaacccacacacacatatacatacacacactctctctctatatagctttctctctctaaatttctcaatgcgtagaagaaggtatcacttgtcggtttattttatttttgaatttatttttatttatttttccaaattttctgtttgacaactaccattagagaattcttattattctcatagttcgatgggaagatggaattgaataaaatatttaaaataattaaattttatataaaaaaaaatataataataataaattaaaggggaagaaggctttaattttaaggttggtggagatttagcattaaattatagtatgttttaagaaagggaattgttttttttttcctttgtggggagtaaaacattaaagaaaattgtattagctaatagccatagtaaaatatgatgtaattatccttatctaaacaaagaaatataagattgaaaaaaacaaattggacaaatatacttaggtttcatattttgggtgtgaatgaaaagttagaaatataagagataaagagaatattgtggcataagtattaaaaaaatttattttgatgcacataagttttcgattttaaaaattacggtaatagttttcaagcttgagatttttatgtctttattttaatagatttattagttactttccaaaatactagattttaatttaaattgcagcataagtctttcaatttcaaaaaattacggtaataaattttaaggattataatttgttttacttttagtcacaataaaaattgtgactaaaagtataaaagattgtgactaattataaatcattattcatatgttgtaactaaaaattatggggctaaaagtattaatcacaaaaattacaatttgttgtgaataaatatatttttagtcatgatatattttgtgactaaaactaaattagtgataatttgtatctaaataatatgttttagtcacaagtaactttttattgtgatacttgtgactaaaagtcacatttagtcacaaaaaaattatgttgtgactaaaagttgtcaataaatatagtttatttttttttttgtagtgaagtttgagattatcattagtctgaggtacccaatttaacaactctctttgtagttcttaaaattgtcacatgtaaacaatttattggtctacatcattgcaattgtttaaataataaacaaatatttaaaaatcatttagataattaaataatttttaagaactttaataattttttt

SEQ ID NO: 224915 - DNA, 3796 bp, Cannabis indica
aggtgtatttataattttcacggcataaatacataagtttaactcgcaaataaatatctaagtttaattttttgcggtaataatacttaagttataattctagaacttttgtaggtaactagctgttaagtattaaataaattgccacgtgtcaatttgaaattggtgcaagtcatcaaatttttattttttattttttttaaaaaatcatttaaatataccaaataagaaaatgacatggataatgatttaaaatttaacgatcaggtacctacaaagttctaaaatataacttaggtatttatttacaattaagagttaaacttaagtatttatgccacaaattactaaagtgtaaataaaactctcttttatttttaggaaagatgtaaaattacttattactttatttttaaaacatgaatttaaaattctatgaatattaaaaaaaaaaaaaaaactactgacacataaagagggaaaaaaaaagatagtgtgagcaagtgacaccattaatggtgtttttagcaactcacctccattaactcaagtagacccttctcttcaaaccctctttttttctccactaccctcatctatttcagatcttctttacaaacctcaataaataaaaacgtcttaccatattttccctttctttttcttcgaaacaacgcctatcctaccaactttttcttctcattctttatggagaaaacacaagaggcctttcaactttgatgaatcaatcaaaatctagtatggaaatcataaccatcacctgggaagtttttcttctctcactctttttcgtctcagcttcatctcaattcaccgacctgttctaccctggattcaaagaggttgcccgcactaccactactgcgactactaacaatctaaccttaacaggagttgcacagattcagaaaaatggtatcttgaaactgacaaacgatagcagaagactcattggtcatgccgttacaagctctatgattcgattaaagaactccacaaacggtaaagctttctccttttcgacttcttttgcattcaccatcgttccagagtaccccaagctcggtggccatggcttcgctttcaccatcgcaccatccattgacacaaagggtcttccgagtcagtatcttggtatcttcaacgctagtgacaattctggaaactcctccaaccatatcttcgctgttgagttcgatacagttcaggattttgagttcggtgatatcaatgataaccatgtcggaattgatatcaacagcttaaactcaacttttgctggtgccgcttcgtattttgatgataaggatccctccaagacaactaatttcagtctcaatgggaaagcgattcaggcttggattgattacgactctgctgacaatcttctcagtgtgacggtggctccattttcgaagaaacccaaaaaaccgcttctttcggttaagatggacttgacaccgatttttcaagagtttatgtacgtgggtttctcggcttcgacgggtttactcgcaagctctcattacctcttgggttggagctttaaagtcaacggtcaagctcgagctcttgacatggctgatcttccttcccttcccggtccaaagaaaagccacacagctatagcaatcggcactggagtttcagccacggtattattaattttcttaatccttgtcgccgtatacctctttttacaagatcaagaacgcggatccaatcgagaaatgggaattagagctcggtccacatcgttattcctacgaagaactcaagaaagcaacgaaaggtttcagagagaaggagcttctaggatatggcggattcgggcgagtttacaaaggaaccattccgaaatcaaaagtccaagtggcggtgaaacgagtttcgcacgaatctaaacagggtctccgtgaattcgtggcagagattgccagcatcggtaggctccgtcaccggaacctggttcaacttctggggtggtgccgtcgacgtggcgatctcttattggtctacgatttcatgtcgaatgggagcttagacaagtacatcttcgacaagcccaaaacgattctgaactgggaacagagaatgaaaatcataaaaggcgtggcttcagctctgttatacttacacgaaggcttcgaacaagtggtgcttcaccgagacgtaaaagccagcaatgtattactagacagcgagttaaacggccgactcggcgattttggactcgccaggctccatgaccacggctccaacatgagcacaacacgtgtggtgggtacattggggtatttagcaccggagctacccagaacgggaaaagccacgacgagctcagacgtttatgcatttggggctctattgctcgaagtggcttgcgggcgtaaacccattgagccaaatgctccaccggaggagttggtgttggttgattgggtatgggactattaccaagctgggagagtcctcgatgtaatagacaagagactgaatgaccagtacgacgtcgttgaggcagtgatggtggtgaagttgggtttgatgtgctcaaacaatggggtgatggctcggcctagtatgagacaggtggtgaggtatcttgaaggagaggttatggtgcccggagagttgagagccccagatgatgagttagaagggaagaaatatcaaatgggtattggtggtcatgatggttttgatgattttctgcactcttttccatcatcttcgtttgataatttaagtgggtcttattcgtttaaagggaataataataatagtcacagagatggtatggaccagagttttgcttctctttctacttctcctctctctcttctccaacatggtagaggtgatactactagattatcagaatagcttcattacatggaaaataattatataatacgcaatgtagatagagagaatcgttggagagctgaaatcaattgataactaaagtgttaatttgttttgtttgtttgtaacaccaatattgggtttttaagtttatttagagtaaaccagactatgattaatcatatacaatcatgctgtaagggtttaggggtttagaccttgtttgatgtagacctcgattaatgtcttttttgtattgttgtatttctccattttcctcatattatttgaacaagtcttcttacttttgtatatatttaaattagcttatcagtttttttttgaggaaaaagcgtttatatcataacataaatcaaatagttagacctcgcggtcattacacaatatattgtttggtaaatccgaaatagggataaccccaaaaacctgatgagcaaacgcccatctagccacattatgagcggcgaaattacaagacctgtttacataaacgaaattacaactaataaaaaagtgagaatgcttagtacaaaaagagatgtagttttcaagcgcccagcgagagatcttcccattgagagcattggtcaccacactcgagtcactctccaccatcacaaattgagatccgatctctttggcaacggagacggccaagcaacaagccgcagcttctccacagagagcatctgagaaatcttcccgagccgtctgaactctaatgactcttccaacatgatccctagcaacaacagcaatgcacatactattatatcccacctttacatcacaattcagcttgatccaatccagagggggaggggaccaagcttcctttagatccggagtgggactgggagcaagtaacatgtaaatctgcataaga

SEQ ID NO: 224916 - DNA, 12861 bp, Cannabis indica
gatttgggaaatagtggctctctgcccaaagtacacagtacattgtctctctcttaaacctgtcctatgcagctatgctttgctcttcttcactcaccacattccaaagctcaaactcaaaatccccaaacccaaactcaaacctaaatcttcaacttcaattttcggatcaaatcaatgtaagtacagatcttttttaaccataacaagaagatgaagaacatcaagttactccaacctctgtcattttcagtcaaataaataaacttattatatctttccttttcatacttctgttttattattaaccttaactttagtttaatatcacttcaaacccaaaacccaaagaaatctctttttctccacttaaaaactcagacccaacagaagaagaagaagaagaagaagaagagggttcttttctgccattaatgaaagcttaaaacttcaaaacccaaacaagaagagaaaaggttgagttttttatttcaagcttcaaacagaagaaacccctcctcttcagttctgccattaatgaaagcttgaagtagaagaagagggttctgttctgccattaacaactgtcattaaagattggatttttatttgttcttcatcaaatcaaatcaaataaaatcatgggttgttgttactcaagaatagagagagaagaaacagttagtcgatgtaaatctcgaaagagatacatgaaacacttagtcaaagctcgtcaagccatgtcagcatctcacacaatgtatcttcgttctctccgaacaacaggctcagctcttcttcacttcgccaatgccgaaacccatctccatctccaccaccaccaccgcccaccgccaccgccggtaaacccatcaccatctccaccaccgccacaaataccaatgagcccaagttctgacacgtggacatcagtaacagcttcccctgctcttcctcctcctccgccgccgcctccaccgccgccggctccgtcatcgacttgggatttctgggacccttttgtcccttcttcgtcgcggtcggtgactgaggaagaatgggatgacggaaccacggtggcggtgacggtcaccggagcggcgagtacggcggcaccgccttctgttgtgagtggattttcgaaggagagttcgagtgagttggctatggtggtttcgaggaatagtaaggatttagttgagattattaaagagcttgatgagtatttgcttaaagctgctgaggctggttctcagctttcggcattgttggaagttccgagctctggtttttctactcagagcaacaatggaggtaataaaaaaattaattaattaattatattttacataagaaaaatatggaaaatgttttttatttttttattttgatatttgacgcaaaagtgactagagttttatttttattgataatttgaatatatgtggtacaaaaaaaaaagtattttttcccataaatatgtggtaaatgatttatatattagatattattggggaaaaaataaattgtagctagctaaatgtccaaattatttaccattttttttgtatgtacttaaatttgtttatttagtgtcaaatttgcttagaattggatacttttattgtaaaaaaaaatgagtacttaaatgttacaaatttaataatttggtgtttttgctgctaaattaataattatttgagtacaaataatggaggtaattatttgctacaaatgcaaatatttttttctattgcgagtagtaatggaggtaatttttgtagcataaatttgcttataattggatattttcaatgaaaaaataaacaaaattgagtacctaatacaaatttgataatttaaatatatttgtgatacaaatttagtgtaattaatataatggtagtgtatttttttttcaggtaaggtttataactatggttggagcttgagtccatcttcatggtcatggggttcaaatcccaagctttatggaggaggagtagtccaaagtaatattttcaatcataatattggaaatttcaataataataataataatattaatggcagtcattgttctactatcgagagactttatgcttgggaaaagaaactatttgaagaagttaaggtaagaaactaagaagattttgttttgttttgtttgttcacattggtttctattgtagttgactatgttagtgtttttttgggttattagtgtcaaaatctttttatgttttgattttatacacttaactctttgtttttttttttgtcaaaaccttcttatgtttacattttttttgcaaatttgatgcatcagttagatatcatcaaactggattacctgtattagctttgaggttgtactatcacatcaaatttgtaaagaaaaataagcttaagaaggtttaaggggttaagtatatttaaatcaaaacgtaaaatgattttgccgctaatcaggcctgacacttggtctaggtttgctaggtctgtgcttaggacccactacgcctaattttttttccctaattaccctttttctttttttattatttaagggtgtggagaccataaaaaaagaacatgaaaagaaaatgtcaattttgaagaagctagaaatgaagagaggtgattatatgaagactgagaagacaaagaaagaagttgagaaattggagtcagaaatgatggtttcttctcaagctattgagtcaacttctactgaaataattaaactcagagagacagagttacatcctcagcttattgacctagtcaaagggttagtcaactctttctctatcactttgttttgtactatgttatatttatgtttgtatctgtacaattcttatccagtttgtgaagctatagtgtgaaaatgaagaattttggttggtttcatattagtgtcttttttttttacttccttcaagtttgttttgaagggtaaatgggtaattaatccattttaataccatatattgtctctttgaaaatcttaaaggctttatttggtgaatttcaccaatagtttttttcagagaaaataatttaggctatgttaggaggttggattttttcggtgaggaaagaaagatatagagaaaaaaaatgtgtggagaataaaaaaaatagtttaatttttcatgtttggtatggaaaattttgttgaatcaagtttttttagtacaattttgcattctacattcaaaaaaaaaaattacattctataccaaacatgggtttttattattattattattttcccatttttttttacatttttattttccaccaaaatccaacttccctatatattaagaaaattatacaatatttattttaaaaatgaaatcttttggaatttttttttgtttttttttccaattgatgtcacactcacactcttctttagtatttgacaaggtacccttataataagatgcccataaccctatttttcttttttatgtctaatttatatatatttttgttaggaactataaagttttatatctgaattaaatgacccaaaaaaattgtatttatgtggcttatgagagtaaaagttcacttttttattctgaatgaaggactcagctcagaaaatgatgctgaaatggtacagtaaagaactttactttattgactgcttttatcttttcttgtgtccttctctcttttctttctttgtaaagatagctcacagtcacagttaccacatctcttccttatctatttattttaaagaaagatataaataaaaaaaacttgtgctcaatgttttttaaattgattctaggatgtagtattcaacataagaaaatcgagcatcgctatatggctcgattgggatgaatgcacaatcttattgtctaattccttgttgttgttgttgctaacttactcaatttactaggttttcggtttaaagaataatgttgttcaagtgtttggtcattaaggctcgagaattgttaggcgagtaggtcaaattgtaaggctcaagttgttggtttttcaaagtttctaaagtttttaccgtctattttaactctttctcatgttagtcgtaattttatattgtgatttttgaattgacataaaaaaaaatcgagcattgctatatagctcgattgggatgtaagtaaaatcttgtccaattccttgttgttgccaacttactcaatttacaaggttttcggtttaaagtatagatttttcttcaagtttttcgtaattaaggctcgagaagttagtttttcgaagtctctcatgttggtcgtaattttattctcatggattgacttaatgtgcgttttgagtagttcaaacggttaaacatgtgatttgctcccacgagatctgaggttcgagtaaaaaaaattgtaggattagacggagaacctaattttaaaaattaaaaattataagagctattgttgttaagaagcacactcactttacaaattactttacttgattttgcagattaatgtgcatgtggaggagcatgtatgagtgccaccaagttcaaaaacatattgtccaacaactcaaatacctcaatgccatcccgtccaccgaaccaacttccgagcttcaccgccaatcaacactcgagctcgagcttcaagtacaacaatggcatatgtcattttgcaacatggttaaatctcaacaagattacatccaatctctcacgggatggctccggcttagcctcttccaatttaacaaaaatccactctcgagaaccggtcaagaatcgaaaatctattctctttgtgaagaatggcatctcgcaattgatcgcattcctgacaaagtagcttccgagggaatcaagagcttcttaacggtgatccacgccattgttgttcaacaagcggaggaacataaacaaaagaagaaatcagaagctgtgtttaaagaactcgagaaaaaggtagcgaaccttagatcattggaatccaagtacggcccttactcggtgcctgaatcctcgggtggtgtttctagaagaaacccggtagctgagaagcgattaaaggtggaaatgttgcgagctaaggcagaggaagagaaaacgaaacatgaaaaggcagtgagcgtgacaagggccatgacactaaataacttgcagatgggattgcctcatgttttcgagggaatggtggggttttcgagcgtgtgtatgcatgcgttcgaatcagtatacaaccacaccaagagttccggtcaagaggtggatgttaaaaggcttctacagtaagaatcgcctttttttaaatcttttaggacgaacggtcgaattcttgtatatagattgttcgtcgtttttggtaggcaggggagagctagactcgtagcagcggtgttagcgcagttggtttggtacatagcggttaaatctgttgaagatttgtgtatgaaatgcaccagagctacgagtttcgaattactttattagtacttttgtcacaaaatatttgatattgtagttctttgttatctaattatcttttaagttttaagtgatggtttcttatcataattatttgtttgcaaattaagaattttcttatcaacaagcttcaaataacaaactgctgcctctgtatcttagtttgtagaaactatactaacaattttaatttccatagccaaaaactattttttttttcttttttcaccaattgggattcattaaaacaagtaaacaagctgctaccacattgggctgcacctccccgaaaataaaaatgacctccggccttgcaacgtcgggacggttttagcgattctattggctagagaaacataagctctaggactaaaaccgaaacaacaacaaacattaaaatgtctagaggcacggccctccattttcgaggcagaggaagtctcaacaaactccgtcgagtagttacaacgaaattaactccttccgcttgtagaagcagccaaatcagttcctttggatttgccaccagcacacaatgacacaatccatccgaagagcccaacgagaaacaaaccagatgcatatttacatccaaatacatctgtctcagcacatactagaaactagaaatcaaagaaaatttgtagtaaaattatccaactacatatttacaaaggtaaataatcaagttattaattagtctcttctcttaacaaacatgtctagttgtttctttgttgaactaataaggtaagtgggcttcgccaagaactttgcgatgtagccaagtcaagcgcttatcgcctcttagagacaaaaatatttcccttgctaaaggcttgttgaacatttcgagtgcagccaagtagagtttctcatcaacaccttgcatctcatccaatagtttgatacattttgttacactgtatttagcagcattcgattgttgtatggctgttgtcctcatctttgatgcagttgccatctccaatatagcttcagcaatcgcatcatcaattcctttccgccctctttttcgagtagtaccagtcataggagtggaaggctgctgacctttatcttgattttcggtaacatcatcagcttcttctgattcagatgaggactgctgctgcagggacaagggtgttgtttgattgatctttgatggagtcttttccccgacttcagcagactgatcatgcttcccgttggttactgattctgagaatatagtgcatagctttttgtaaatcgggcagccactagttttcaaagactcagcatcaggaagttcctgtttaagaaaaagactccttcacctaagacacatttcgaatttttatctttgcacacaaaacatcatatagcgaaacaaaacaacaaccttgatgatttcggtccatgctttctcactcgcagtaatagttcctgtagtttcatcccaagtgaaaccacctcgaccgagaagggactttaaagtagcatactgcttcctcagcacagcataccgactcttaagttggtccttgtcccatttaagacctgtttttctatagaaaccgtcacacatgtgctcccaagatttcttgacaaaataattgttttgcctattccctttgtaaacttgttcaaccatcaaatctgcaagaattttggtaagaaatgatgtccatttcgctctattttgttgttcctgcggctgatgctgttgggattgttcgctctttgatctagtcactcggcttgccatctatacaactactctacaacataaactatgttagagaatacattgaaaaaatatgacatgtccatctcaaagagttcttagcaattacccattactatacatgcattgataatgaaatatcatagggatagaaatagaagggaattaaatttaaaacgcatacaacattaatataaaagttgttaatttttttctcaatcttgcattagaattatctttcctttctattttaaaatggaatagttactctactgaaataacttccaatacttgtaaccgaaaaaataaaaattgtctcctttatattttattttatttcactattcccagccaaataacaggtggtggtggcatttggttggagggaatgaaaacataatgagaatgagaatataaatagaatcgaatggataagaaaataattaaaattttctcataatactttcaactttcatttcaaagatttacattccatttcattaccccagccaaacaccaccttagttcattggagaaaatcagaatgatatacatgagaatatccaaatgagtttcttttccatccaaaaaaatcattaacaaccaatctatatagttctcacatgtattaagatttaactcaaaaaatctcaaataactaactcaataaaattcagatatcataaacccaaaatctacctctcaattattagccttctgttcacttagaaaatcaatcattagtaaattattatatgaaactactatgaaaatgattgggttcatatctgcatagaatcacagtaataaaaaaagaccaaatttatgaaaatgaatggaaatgaaatagccacaagaacaatctgaattagaaaatttcaaagcatttattagtaaaaatggcacagttgaaatcaattcgtaaaccctaatttattacctggctgaagtagaagaaggtctgcgttgaggagaggagtgaagctttgacaaaaactacattttggaatgattctccgattggattggagattatgaagttcattcaaaccaaaattgattttcttttataagaaaaaactaaagaatggaattgaagaagaaaaaaagagctaaacaatatgtctaacttaaaacgacatgtcgtattactatacatttcacaaactttttttttttgaaaaaaaataaagttagaaagatgaaattacatttcaaaatcattacaaaagaagtttttaggtatggaagaaacattttaacaactatattgattgtaagtaaatgtccaattaatcacattatgagataaaattacaagttcttaaagtatagaaaataaacaacaaatgatgaaataatttttttacaaaagctagtatagttcataatttctcatctagagtcctctccattggttgagagttttgatcactatccttgagtcgctctccacagttacaaacttacaattattctttagtcgttttccatactgagtaacaactcttatcttctgactaaattctcaatcaaatgataattgtgtcttaatatattatatatatatatatttgaaattttgaataacttatatttataatactgaaattagaattaatattatacattacactatcttattatgaacatggtttgaagaaagaatagtaatttggaatccatgatccatccactagaaatacccatgtcaaaatatcattcaattttgattctcataactctttcacaaatgtccttggatttgggcatgaacctcttaatgatgagtacaaattagttaccattacttatgattctaaacatggaaagtgcttttgaagacattatatttgttagaaaatcgttgcattggaatgtgatcccaaaacacaaggagaagaaaaccatttattattattatagctttgaactctgcgtttgtttccaaccaactcctttgagtggtgcatttaacttaatagtgcacatttgtgttacgaatactcttgtcacaatgaataatgaagatatggattcgttttgtaagtcgtactttattaaataacaaataacattataaataaaacattgtattatattaatcattacgaccttatattttaatacaatgtgaatcgtattatttaatacataacaaataatctgtattaacttgtaccataatatttacaaacttaaaccctcgaactcgaaccgagacttggattcagtcccgatcccgacttgggacccaagcccaaactaagacccatacccaaaccctagcccagattgggtctcgggtttgatattagagtctgaggtccaaagctagttctgattcccaatccaagtttggatctgattccaaatccgggtttggggcaagattgaggtcaggatctgaatctcaaatctgagctcggggtctgggaataagattcgagtccaagtccatatcgaggtcgagtccaatttattgtaatgatatattataattttatacaacttattaatacaaatcaataccaaacataagattgtataaaataatacttcaattcaaaatataactacgaaaaaaaatataacttaaatctaattataattaccaaggtggacttaatctaaaattttacaaataaattaaatttcaaaatggcttgtattattcagaattatctatgtaatagcaatttataatatgtcccgtataactcttgcaaattcaaagttgaagctacactctttagattgtccactaaatttctttaacaacaaaaatatattaacaaaaagtatacataagtatacttaaagcatatgtagagacatcatatatatacacatacaaacatgcatctcacattaaactatttgatttccatgatgaattgtggtgagtgagttatttcagacctaaagaatatttgaaacagttacctacattttttaccaatcttctatttcatcctcagaaactacactttcttgatcatccaaactcatcatatcgattctcgagtctagactttcatgtcgttcccctcccaagccatttgaacacaggtgtgtattctgtggctataaccgaaaaattccgatgaactcattccgctacaagtatcgtatcttcgttttatcatctctttctgcggtgataaagaaagaaagaatcaacataaagagaagccattagatatagctgactctaacccaatacaggcaaataatatataccttgttggacaatgataattgttcaacctgccagagctttggccgacgaataacatgccacctgcagactcgcgaattagtgttgtgtgtaatgcagtgctcgatgaatagttaaaaaaaatagtacctcgaaggcattggatgatgatttccaaataggaccccacgaacagcgactgaagctgcagctgattgtagaacattctctgcctcgttgcgtctggcaagcattccacgaaaagtacctagaagcaaatcaacatctcccaaatatgaagccactgtccatgcatcatcgattgcctcctcgctcaagaagtctagaactttatatacagaaattgtatgcatgaaccgaaattagcatagtttggcatgacaagagactaaaagtaccaatatgattgagctcgtatgcgtgtaagaaacaatgcaagtgttgaattaccattttcattaagaaagtcaacaataggcctagcttgcccatgagcttgacaaaggatcttttctggagcatccatcttaagtggtaatctagccaatcgttcttgtacagaaaattcatctccgactacaagacaagaagatgatttagatattgaatagaaaccgaggtgacatgaattgtttagccatatataccagattccacaacattttcagtttctctttgttatgcagaaactttcccagtgcatgaaatagagaaagtgtctcatctcggccgaagtctagaggaaatccctcgtccatgataggacgattgggtgaagatattggatgcgctagacttggtttcacacagaaaaactgtaaagaagtaattgcatgtctgatgtcacctccacttgcttttgctatgagatcaatctggtccacagacactttacactgctctagtctgcatattctagatagaatcttcttggttgaattatgcgtaataggattgaaagcgaccttcagatttccaaaatagttcatgtaagcacacagtaagagtcagtaacggtgctgtaagaaaaagaaaatgatattgttgaaggaagtaaaccttacaagccccagcattttcgagagacgattgaagttcttcaaggtattgtgttgtgtggtctcctgaatcagcttcaccataattggtgactaatatggcagtaggtatttgaactgaccgcacaagaagatagagactgtttctaagtctttcaaaagctaatttaccatttgtgacaggaagatcatctattaagagaatgattgattcttttgactccatattctcagttggtggtatcaatccatacttcctaactctctccacaaaatattcaaactcgtccaattttgacatgtaacgcaaccctggcaattgaccaaattaaagaatatccagaaattcatacgaacatcatcaacttccaacatatttcatgtgaagttttcccattaaagttttcggttaaataaactatctttaaatacctgcactggagttatgtagatgttcttgccaaattattggcgtaggcgtgttccattcacacaatctcgctccgaaatgacaagctatcgcatgaacagttgcctataagatgagaacaaacaggacatggataagcacccgtaggacatgtaatgggaccttcacaacaattctagcgtagccttttacaacaaaaaactccatacttcatagttttaaacacagtccaaagtactttaccaagagaaaagttatttgataagaaaagttcaaatgttatctgagtaactttgtcacatgaaaacgggagtagcaacaaatcaagatgtcaaaaccttcatttaatcaaaaaaaaacatgaatattttttaaaaattaaacatgtctacttgccgattttccaactccagcttgtccagtgatgacgataaccttgctagtgtattcatcctgtgagtaatgaagagaaattctcagcacacaggtagatttcatacaaaaagaagcagttagcaaaaggtccaaactggaactaatttacttctgaaaggatatattgtgataaaaatacctttgaagaacctaatctttcttcaaaccacaattttacttcttcaatctgcaattacaatgacaaaaattagctaatcaatatccaagtacaacacattgagaaataacccaattaaacccaccttctttttatgaacagctaactcttcaagagaatgaggtttatatttatctacccataactctttctggttgctttctccagaacctgagtcaaatttccattttcgttcaagaaaaataaaagatgaacaagacagaagctaaaacattaaaattcacaaaaaaaaaaaaaaaaacaagaaaaatttcaacaaaagcataccatcagataccttgaac

SEQ ID NO: 224917 - DNA, 14661 bp, Cannabis indica
ttcttaactttttatgtgttttaattatcgtttttagaagttcatatttaggttgttaaatcaacataattgtgagtagatctaagatcctggtaaaataaattctgacagttttgtagtagtgtttccacaccaacttcattttaacaagcttccaaacacaaagttttgaacaatgtcatggatgtggaaatagatgctctcgaaaagaaccacacatggattgtggcgtctttaccaccaaaccaacaagtcattgaaaacagatgggtatataggattaaatataatcctgatggatcagtggaaagatttaaagcacatttagttgccaaagagtatgctcaaaaactagaattgactatttcgaaacatatgctcctgtagaaaaattcaacaccttaaatctcctttttgctctagttgccttcaacaattggcacttacaccacatgaacatcaataatgcttttttgcatggtgatttaaatgaggatgtttacatgaaacttcctcaaggctatgtcctaaaggagaactaccagcaaatgcagtttgcaaactaacaaaagcttgcatggccttaaacaagcctcacgtcaatggaatgccaaactcagcactacctgttacaacacaatttcaaacaagctaaaaatgatcatttcatattcacaagacaccaatttggtgtcttcgttactctccttatatatcttgatgacataattatagccaccaatgacataaccactctaaagctgttcatatcaacacttgattccaagtttaaactcaaagatcttggcatccttcgcttcttccttggccttgaaatagctcgatgttcaaaaggaatctctgtttctcaaaggccattcacattacaacttctcaaagaagttggttgccttggttccaaaccggtctccactcctatggaacctaatactaaactaagtaacaattcaggggacctcctccaaaatccaactcaatgtaggagtctcattgacaaattactctatctcacaataacacggcctgacataatgaataaactaagccaatatctctaaaattctcgacaacctcacatgcttgctgcaactagagtacttcaatacttaaaaaattcaccaaaacaaggactctgtttttatgcttcccttccacctaaattccagctccaagcctttgctggtgcaaattggagagcctgtgtcgacacaagacaatcaatctcaagctattgtaggcaaatcactcatctcatggaaatcaaagaaacaaccaattgtctcaccgtcttcagctaaagcaaagtatcacgccattgccaaggctacatgtgaactcacatggctcacttccattttccaagaactcagcatcaacatcaatgtcccttcgatactattctgcgataacaatgccaccatacatacatcagaaaactcaatttttcataaaagaacaaatcacgtcgagatcgattatcacatagttagagagaaaattacaaatggtactctaaagttgagtcacgtttcattcaaagccaaacttacagacatcctaatgaaacctctttttcttgctcctttcaatgaaattctgtccaaaataagtgtaaagaatctctacgctccatcacaattagttaattcagaattagttaggtatttgttatacttcagctgactttatatatatacatctattaatctaattaataaaacattttctctttttctttctaagttttctaatacaaacaaagctgggtcgataacatcacaaaactcatcaacaaaatcctcctcaatctctaaggtatcatataatgcagagaaatcatccataataagaccaaaggaaccatcggggaataaagaaagtcgtcgaaaaaaaacaccctgactctagagaatattaatggaaagtttataattttttataactgtattcgtaattaaaaagtaacttagtaataatttgttcgttgggaaagtgattaaacaaactactgtactgcagtggatgtgcattaaatattaatggagctccgaaaagcacacacacctaaataataattacaattaacgtttcaaaattcaacagtaagcatgaatttttgagttaaaaaagaataaacataaattttgatttataacagtagacttatggaacacgtggcaaaaaagtaggattagttctagttctccatttccttcgttttcttttactcgtcagaagagagacaacgaacgaagactaatgctctaaccccaaaccctagagagagagagagagaatttgatcagcggataggtcttagattccggtcatttctcggcgctgaccggaattttctccgacatggttgctaaaaaatcctcggagaggcttcccgccgggtggaaagtacagtataaagtccagaaggctggtcgaaaagtcaaggtatgtttcttcttatagattctagggtttctcacttgggtgttgagagcttcacagttttgacttactaagctaaaattatcctgttgttttttgaactgatcctggtcccggtgttgggatcaggacctcaatttgagctcattgagttttgatgttactaaatttaggatttgttgaatttcttgattagaagtaaatttctttaggttttttcatgcttagttcgatgttttcggctgtatggaaaatggaacgggcttcttgtttgttgtggttgtatgaagggttcttaccgtgcgttggagaagaattagctcttcaatgctgtgtagctcttaaatgaattgcatttaggcgatctgattgtgcatctttggctcgtatggaaaaattatcgatacagtatttcttctgatttacaaaagaatagttatgttgtttgttaaatgctgaattagcttgaaatgtatgatgtagtgtgatgattttactttcctctcttgttctttgtgaagcttatctgttaattctggaaatgtcaaatcgagaaatgtaattattactattggaacaatgggcaatgatgttacataagaagtgtgaggccgtgcaaatgatataaatatatatatggaacacgtcttaatgcgtattacccatgaatggttactaaataaatttaactataaatattaattttatacatagttatttttcaaataagaatgtagaacacttaaatggaaatcttgaaaatggaagtgttgtaccagagctaatggtgtcataatttacttgccttgatagatctatgcaaatgtggaaactgggaaagagttcttttccaaggaagatcttttaaactatattaaagcggaaggtaatcattctagtgactctcaatctactaatagtcacataacaaagcatgcagaaacaactcctttgcaggtgagacataatcatcttcttcacttttttgttactcttcatttgctttatcttttcaatcagttggtcactatatcttgttaacagcttgcaaatgacaaagatgagcttcccaaatggttacccaaggattggaaagttgaggtgaaaactcgacagagtggttctcttgctggaaaagagtataaggtaaactatatttgttcgacattctttgaatgtatgtatcatggttcctaccctttcatacttactaccatttctttggacattgcaaagttgccattgttgtgtccttgtttcaaatgcagatttacatcaacaatgtaccttaaagtcgttaaaccgaattaaatctttcaaatttaatttttcaagaaacactataattagtgttcacagtgtttcctagcagtcatattaaacagaagtgttgtgtaattgtaaattcgatgataaacctgatcaacattttttttcaaagcaacctgaacaacatttggttattcataagttagagagaagttatagaatgattgttttttaaacattgtattagaaattgttatgtggcttctactaggtagatatctttgtctttatatttatattgctgtttgtcaaatctgttaactagctctatatttctaaacgtgtttcatttaaagttctatatatctatggctgtctatactctgtaccaaattttgttgttggggctcaaaattccttatgtactattaagaaagaatttgattgtggtcatagacatacctagtggtttcacacttctcctcacaaataggaggtcccaagttcgaattaagaaagaatttgatccaattatgatgaactgttgagctgataagagtttatgatcttttgtgttaaatgtgagttttgcttcctgtgataacacatcctttgatttcatagttgacttattttattgcagtgttatattgacccattaagcaattgcaaatattattccaagcctgaagttcttcgatatctcaaaacggtagggggcaagaccaataaacaaggagaagctaaaacagttaagggtaatagatgcgtatccaaagaggtcacctgttcagtaaagaataatagttgtgtaaaggatgatagttgtgtaacaaaagatgccaaaacagtaaaggaaaatacatttgtatccaaaaatacgaaaccagtaaaggatgatacatgcgtatccaaaaataccaaagcagtaaaggataatatatgtttatccgaaaacaccaaagcagtaaaggacaatagctgtgcatccaaagatgtcaaaccagtaaaaggcaatagctgcatatcagaaaagaagactggaaccagcatgcactctgcagacaaagtttgtatctcatactattttgatgctacttttccctccctctttatttctttttaggaaatattctttaatagtttgtcctggtgaaaaaaaaaagattttcgttgaactcaaaataattcataatatgcttataaataaatgtcaaattattagtctaagatggataatgaataataatttgaacataatatagtgacacttgcatgtattaagttcaaagtatggtactactaaattaatacatttggaggccaaatataacttaagctgagatgtcttcatatattgtaattcaaactgacatagaaattcgcatccatatgtgaagtggcttgtcttgaaataatgttgtagcattctgcaagtatcatttttgtgttgctaagacacagccctgatgatataagtacaatttaggttgtggagaattgtgaagccgatggtttaccaccaggatggacaaaagagctaagaccacgaaagaattcaaaatcaataaaaaatgatccggtaggttttcatcttttatttttatttggtagaattgatctagagctcagccccttccctcacctcgtctcttcctctatatgcacacacaaataccgtatagatttttttttgaaattatgttgaaatcagttagctttgtttaatgagtgctgtactgatagactaaattttcagtattatatggatccggttaaaggatatatatttcgctccaagaaggcggcctggcactacataaaaactggagagattagtagacatgtaattaaaccaaaggattctgaagagtcaatgaaggatgaaatcgcagtaagtgttgacacattcctgcttcatgattgcgttgtttattttgttaaattttttctcaatgttaataaaatgaacttgcgtatggtttttttaatggtctcaacaatatggttttttaaatggtctcaagaatatgatacaagtttcggtatatgttaagagcattataacctagggaggtaagagagtttgatatgtgactcaggtatgtaatcaacaatatgtgagtttcatacctatactatataggtcaaaacattagtcattatttttgtgagtttgctaaaaggtgagagtattgaaaacattgaagattctacgagtttctgaagtgtttatgtgcgtaaaaaggaacgctataattataaataatttcatatttccttaactacgtgtaagtaatcactgaatacgttgtatggttaatgtctttaattagcagtatcgaagcatgtattttgtttgtcagctactggtatcaattaattttcactgtttttatctttcaaaaaaggaacttctttgtgttaatataaagaagagtacaaaaacagaagatcagaaatgatctttgaaatagcctgaaacacagatattgatattaactttaactcattgatagagcaaacccatttattaagggaatattgtcttactaatacttttattgctttgtttgtttggggatttatatttactcacacgcacacggcccttgcaagaatgaggagttggtgtctaaacttcccttattgatgaaaattattaacctaccaaatcgccgtaaatgtgtatatttttatgtggcaatctcttaaatactaacattttctttttattataattatacaaatagatcccttttgacatgtatcatcatatagaacaaaaaattaatattgtttgaccttgaaaatacatctttctgtccatttagccatcatctgcagctaaaaggcaaaaaatggatcatccagcaagcaggcaacaactcttttcaggtgagatcacagccattataattgcttctcaaaacttatgagcaatatcaagaggctactccaatctcaggttgccaatggcaagcagttattctgaactcatctgttccttttggggaaatcactgctgcaggtaagatggattctgagacgagcaatttagaaatgccaaaaacaagagggtcaaagatatcaagtgccaagcgggtgtcccctgaaactgaggccaacgtcacaatttctgccagggatgagactatccaggaaaagcctcagttagataatacaactcaagagcttgttgataccgaggaaaaaggtgatccaaaaaagccttcaacaataaaagctgaaaggtccaagagacgtggagaccaaaattcaccactttctgatgctggagcatctaagagaattcgaggagcaaaagacactgccaaagatactcttttctcaacaaattcacctgatatcctgaaagaaaaggcttttcttgggacagtggaattgagcagtgtcaaggaagctaatgttacttctagaaattctaaaagcaagaaagtgcataacttgcctgctcggtcttcaaaaaggcttgcgggagctgaacctgagaaggtgttgaacttggaatcgggtgaacgagctcttaaaattgaaattatgaaaagcagaaagactgaagtcattcaagatgcaggtttgactactgatgttttggcagatggatcatcagcgaagcttgagacaagtccaggaacaaagttcataggccatgctttttctaacacaaatgattcattactcagagattcttcaaagaagagctcaaaaccccttaaagatcaggtgactccagagaagttgcctgtaaatctggaaactgatcatctgaatgacagttcagaaccacagcttagtcttctgtttggctcagacccctgtctggacttcgcgttcaagactctcttaggtgaattaccactggatgattctcctctagaggaacctattttgagtcccgaagatgattcaatacaacatgtctcgcgtgagagtgttaataaaaaaagcagtactgaaatagttcgcacaagcagaataaacccaagaacaagaaagagcgtccgttgcctcatagatcatcaaagcgacttgctggggctgaacctgagtttgtggttaagtctgtgtccgttgaacaagctccccaaaattctagtagaaagcgtaaagataaaagcactagttcatccgcaaatgtgctgcatgaagcaaatcagctgcttggggctgagccagaaacaaatcagctgcttgggtctgggccagaaacatatcagcttgttggtgctgagccagacacaaataagcttggtgctgagccaagagctaagtcagaaacaaagcttcttggggctgtgccagaaacaaatcagctgcttggggctgagccagaaacaaatcagcatggggctgtgccagaaacaaatgttcatactcagttacctagtaaagacacttcattgcaggcagagccattgaataaaacatttaactctttcaaggattctgaggcacctcaggagcaacaacagatgcacgagactcaaaaggcagaacccgagaggccagaatcagatgtttcattttcattcgcagattattggtccgacccttgcctagattttgcatttaagactctgaccggtgtaataccaatagaagaaagttttgcacagggtgattttcgggcgcaagttgatatttctcagaaccaaaggagtagtggttccacactgccagattttggttcacctagcttgtttcaaactgacatatcatcccagtttgctacaccagaaaagtctatgttaggtctgccgtctgcagtgacttctacagtaatgtccaatggaaatgtgaactttcctagttgcaacggtattcattcccaacaacagtgcttggaaggcaataataacaaggatttgcaccaaaaggtaaagtcttaaaaaactggctgctactttttgaaatgtagtaacacgtgtctaggtacgacactttgttgtaaaagttgttccctgttactcttgtgttgttgtagtggtcccaacaaaacataacaaactcaaaaatagccctcactgctgtaaacttgtcatgtttcgttccactttattgggatatgatttggtcatatggattattgtttcacctaaaattccaaggtcttaaacatattgattttgactcttactgtataatggttaatgcagttcaaattaccataatatgattattattatttattttccaatttagatattatttcagtattgtaaactggtatatgatttaactaaaattgtgatgcaactaatcggcatatatatgaaatgttgggcttaattcatttggttgtctccatccaaaccaaacctcaaatcaaaagaaagaatgcagaaaacatccaaaaccaaaccaagccaatgtttatacaactacatattccaaaacactttttatttccatcacaagaactcaactctggtatcttaaaatccacagcagatcatggatactcagtagcaagactcagatcattgacactcagattcattcagtaggagtaggaagactctttccatccccccacactctcttcttcagcaccggagttacgttcacggcgttcctaaagatgacaaacaaacagttagttccctctgcttttctaatttcagatacaacatttaagtaacaaatgatactagattcaaatgtacctcaggaatgaaattgaggccaactctgatctctccacgatattcttggtcctttactacgttatatacagttggtggaatgcttccttccgtaaacagagcgtctagtgagatactgcaacaactaaacatatgtaagtgaaaagggtttgcgggaatccaaatgaagcaatacaggtaattgaaaagccctcatttctactacaagtgtttgatatattagatgacagtacttacgttgcttctccaacgaaatcatcctgggaaatgttgtcactgtccattattttcaaggtgagttctgaaacgccctcagagttcacactgaacacaaaattttcattccattctggctcagtccctttccctgcaccaaaatatttgtacaaaaccaagttttatttatcagctctataatacattatcgttcatatctaatatctatggattataatgactatgcatatgtacacctatactttattaaatacatatgtacaataataaagctcatatttttctctttatcaagaaaaaagttgaaacgttttactcaccagatgcaacactgcttttctgctcttgagttcggcaagtaaggatgacataaggatccatgtcagctgccccccaaaaagaacaaatatttatattatataataaaccatatgggtaagaaaacaatccaaaaatttcttatgaattaaaggtggccatagctttttctttttaccaaattatcatatttataaaccgatttgaatataatagcatatcctaattccacaagagaaatccatatatcgaaatgcaaatgtagtataacttttctatgaatccggattgtgattttaacaaatgtcaaatttccattgatgcatttcataataatgcttttgcacagatcatataagaaattatcgatcaccatgaacaaattgttattgtgataaattccgatcacacataataccctgaattgacccgtttcttaggccatattttcttgtggtttctcagccaccaaacagagcagatctcaaacaatatacgacaaaaaaaacccaaatcgaaaaatgatcaaaacaataaatgaaaaatgtgaaagtgacagggaagaacttacaaagaaaatctgtatcctcaagacctttagcaccaacaagaagaacttcaagggttccttgagccatttgcttgtttggattctccgaagaaaataatgaataattagagattaaggtagagaaagaattatagatctaaaagaaactaggaaagaattgacactttttcttgggtagtaagaaaaaaacggagatgtccgagaatataataatgtaattaattataatcatggttgaggggcccataactaaaccggttcggaccaaaccgggttttccgttactttctccatattttcttattaaaaattacaaagtcaaattttatcaaaaaacgaaagaagaaaaaacgtagtcaaaataaaatggactcggcagttgtactagatcacaccgcacgtgttattattgcttttttttgctagtctattattattgtttttttggtggatgatcttttagaatattattaaattaaaatatataaaaattaaaaatttttttttaaaaaaataattctaagactcaacaaaaaataattctaagactcaacatttaattggtttcatgaggcaaagtttgatgtgagctagcattgaagaaagcttatgagactaaaagatagtttttccaaagtaaagataatttaagccaacaacaatggaaaatttcaaataaacaaagcatatcattttttagttgacaatggtaattgggtctcctttgagaatacttgttgctccaaaacatcgtttcatcattttacaggtagttcattcaaacttttttactgataataatcttatcacgaagaatgtgtatgttaaatttgctaggtgtccaatgtgttagatgaatttggaagaccatgaatatttattctttaattgtcctttctcttggaaagtgatgcaaaatagtagtaggtggccacgttgccacctttggcctaacaagtttgaagacttagtccattagatgaaaattaataagccaagtcacaaatcatgttctttttttttttttttttgaaaggaaattcaactttatttatccttcaaattcagctaccacacatggaagcaaatcagttgggacatcccccatactgaaaatacgatcaggatgtaatatagatgctctagcaaattcatgagcgactacattagctgaccgtttaacaaaattaaatgaaacatttctaacttgagtaagtaaactcttacaatcacttattatttcaccaaacaaagaatttgtatgaatgttacttctcaaagcttgcacaaccaataggcaatcggtttcaatgatggccctttgtctttggtgcgttttgagccaactaagagcctctcggaagctcatagcttcagccaccattggatgaacaacaccacgaaccagttttgtaatagcagtcaaaagaaaaccattatgatctcgaattgcacatcccaaaccgaaatggttttgttcttcaaagatagccgcatcaacatttatcttgatactattttcctcaggtttgacccattgctccgccccatccatagcctgtaaaccagaccaagatgtctcaatttgagacttttgagcaatatgccattgatcaagaaaaccctttgctgaagccactatagtcgaagcaccaactatctttttctgccatatacgatcattccttgctccccatatcgcccaacacagtgttgctatcaatttcctggtttcagccgactggttttgaaaggcagcagcacaccagtcgacaaatgaactcccagccacaaccacagtgccgattcccactctgtcccacacctgctgcacaaaattgcaggtaactaagcagtgcaatattgtttctggctcttcattacagagaggacaaagagtactaacagccactcttttcaccaccagatgagtcaaagtagggagacaagcaacaccagccctccacaccaaatttttgacttttggtggtatctttaacgcccagagatgcttccaaaacgctgtaccagccccctcaacgcctctcccttttttttcctgcaacagttcgtacgcactgctcactgagtactcacccgaaccttccttggaccagcaaagatgatcactagtaataccaactttaatgggcactttgagtatgaggtctttatctctttccacaaagagatcgtttagcacatccatatcccaatcttgaccatccatactaatgatgttgttcactttggcaaattggagagcggggtggtctgtaatgatataagggttattaggatcgggaaggatcgggaagccacggttcatgcagaatattgatacttgaaccatcacccacacaccatctaaccccctctcgaactaaatcacgagcctcccacacactacgccacacaaagcttggattattacccaattccgcattgaaaaaacttcctctagggtaataccttgctttaaagatgcgagaagcaagagaattaggcctagttaagaacctccaaccatgctttccaagaagagctaagttgaaatctctaaagttgcggaatcccatgctaccttggctgggcaatatatgaaatttggatgaaaagaaattttatgcatttttgagaagagatgtttagatccacaatgtataggtaatttgtaggtttttgtaatccaagcaagtaaacaagttgacctttgacaagttccaagtttgttggaaagttagttttttctgttatgttctcagtcctcactgttgggtagttagtttagttagttgttctgtttttcatcttgtaagcctatatataaaggcatgtgaactcattaagagataatgagagaaaatcagagagagagagagatctgattggagagtgaaaaacagagtgcaaagttgatgtaaggcactgtccaagtcgagtttcttggagtgcttgagtgagagaatcgggttgtctcttgtacaaactttgaggctgtgtatctaacttgatgttcattgtaactttgaaccaaatgaatggaatgaataccaaagggggtagcaggaagtaggcattgtttttgggccgaacctggataaaaatctgtctttgatttcttgctttaagtttcattcttttatgatgtttattgaattgaattggtgttgttcatgttgaattaatgtgttgttgatttacaacataatattgtcaaaggatgtagcgcactgtctcataacaacgccactgggcttttataaattaatttataattaatccatcagttcaacaaaattgtagcttaattaaatttttttggattaaactaaaaatataacttttatacaaaatacagttgagtacagggacccactatttataaacttttacaactagtttcaaaaccgatattacaaaatagtcacattccaaaacataatcaaaaggtggatcctatccatcgaaagtgagacatcgcggttaatatgtacattgctgagagagctctgactcatggctgatatactgttgggaaacaatcgatttctaatgattttgcataccatgcatgattgcacacttgaactgaaaccagttcttcaaaccagaaaaaaaaataagagagagagagttgggaaagaatagttgtatttcactatatcaatgaatgaatacaagttacatactgaaatgtgtttgtacagtatatatagcttgcctaggaaataggaaagctaactaacaataactaactaacttccctaactgctaactgaataaaccgaccattacattaacaatttccaccttggttgatttattcagtgtaaacaacaatcaaaaaatacagaaatgtagaaaacaacagtaaactaaaaattacagatcacaagtgttagtgatcttgagtaaattcagacaatgtctgaatttggcagtggcgagtggcttggtgaggatgtctgaggcattgtcctctgttgaaaccttcttgaacttcacttttccttctgctatgacatctataatgaagtggagccgcacatcaatatgcttggttctctcgtgatacatctgaattttagagaagtgcagagccatttggct

SEQ ID NO: 224918 - DNA, 3259 bp, Cannabis indica
ttcatatttgggatgttaattcagcatacttgttagtaaatctagatcctggtaaaatattcccaacaatcccctcctcttttgttttggtctccataagaaagatacacttcggtttgtatctccttgcccaagcatgaattgctttggacgtcggggctctcagcgtgccccgacaattccaagataagagcctcattggggaggagggggcttgataaggaccgcctcctcgcccacttgaaaattttgaatctcttggacagcagcatcaactaaatttagttcaaaatcctctgaacacgagtcactaacctgctggcaatctgtgtcaaatcagttttgagccgcacccgtattgttggcctttctccggttagttcctcttgtactcgacgcacctttctgtctcttctccggccatcttttggaggaagaatccccaatatcgctgtcgactttcactgctacaaaagtattgacttcaagagtagggaggaaagactgttttccttgaggcccctcctccgtgttctctccttctgcctcaagatagactacaggaataatacacatacttgcctttctcttcttggggcccgccaacttttgtccactcagtgaaagttttatttcatcactagaaatactcacttgggccccttgagcttcaacttgggctttgtccaaaacattctccaccgcctccatcaaattcactttatcgggccagttaacataattgggctcggggtgttgatgtggagttcgagacttgcacacttcctcatgaggaatttccactaattggtctctggtaggcccaatatcagccatacaactcaaaataatcccatcgtctcttctcctattatcgatacatgttattgaatgggaattcttgttattacccgctagtttcacacactttgtaccatgattttccaaaaggttggaaccataaggtctaggaaagcgtggctttccctagacagtatgacccttccccaattgtgggatcctagccgagctactaccttcaacaccaacgtctttctgagactgtatcttctttttcgacatgtctctatcctcttctgtaattaccttcttgcctctattttctccattgctcgccgacaccgctccccaaaattttctagtctattcaagaattttcaggcgaataattacggataggcacacccaccttcatccacgcaccgtagagaggaacagcaccacaaatcagaggataggcaaactatgttggtctatcacaagactcataagtatgagcaatatatacccacagttaaaacacaatgccgaaagtttatgatacttgaattagatccattcctttctatctctagaaatattatatataattcagtaattaaaatccccttataaaaataggtctacctgttgaagtccggcatgggtccgataccaactaaacaatttgttcttatgatcgtgtgcttggtattgtgacctcttaaatatgggcttggtccagcattatttataaaaacagattaatttgtaaatacgatccagacgggtgatcagtttatccatcatatatcaaaagtagtaaaaaagacatcataaatagaattacttcaagtttaattaattagtattggagctgaaaatatgatcatatatttatatattcgtgatacataattaattaacagtcatattggttaattattttgcttggtcaaacttttcttttttgtagacactattaatctaactttgcatttagagttagacacccacgatccacaatcacccagcgtagggtagcctgcaaaaatatgaatgtaaacataataataaggctcagtgcataattaataatatatattataattaattaattaacaaattaaatatgaactcaccccaacttgagagaggtatcggaagtactatcgtaatcttgaggaggaccattggagctacatacattggtgacagactccgatgactgaccctcctcagtagtgattacatactccgaatcagtattagtagtggttccaccttctctagttcgtccattacaaatctccaccaccttaattaattaatcaatatattatatatgtgtctataataagcaaatcgagtaagatcggccatataaatatatatatatatatacatatacatacttgctgtcttaatctttcattctcttccatcaattgctttccctgcgaaaattaatattaatgccataatgctagaagtatatatataagagttcatatcacatatacgtacaagggcttgattaattggtaaaataatggtgttattaattatgtccatcatgcaccatatattgtttaatataatatttttccatttttttaaatttaaaaataagatagtatgcaaaactttgtaacatagattaatgttacattcaaatactatctttaagtatacttttctttcgattactttcgctacaattgtaatttaaatttcctaatacttgtctctttttttccatatgaacaaaagaactttttagttcttacaaaaaaaaaaaaaaagaattaacttgttagttactatgtatatatattaattgagccattattaattctttagcgattcataatagtaacttaattcactaaccttcatttgaagctcattgatttccttcataatcttctcaccctgaaggagaaaaattaataaatactaataagttgcaacaaacaaaaattagctaagttataaggtttttcttttccaatcaattattgaacctgactatttgagacagtagaattagaactttcaatcatatcttacattaagatgttgaacagttctctttgcttgcaattcagaagaattgatggctgctcattttttgaatggaaaatataattcaaatagtataaagagattgccaaaaaattaggatgcaattcagatgaatcaataattcaggcaacattttctttcaaaaaataaaataaataatttagattatatataatatcctaatatgtacatatatagatatttatttattgaattggttgatcatcttaccttcttttcaatgactcgacttagtccaacttcaagggacttctctaaccgctgcagctcctctatgtttaatccatggagttcttctcctctcaattgcctatataaaatttggaggtgtttatatgtgtctgatcaatcaatatatatatacatatat

SEQ ID NO: 224919 - DNA, 5368 bp, Cannabis indica
atccatgttagaatttttttactaaaattagataaaagtccttaaatctaacaatcttaatagttcagggaaatttttaacggccaaaaaagttcagggagcatgatttagtacatgtcgaaattcgggaagaaaaattgctaattagccttgttaaaactaatagcatagccattcacctctggttttgataaattattccttgtttagaagaactaatcagcaaaacgaatttcgtcttgggtctcagaaactcaactgataaatctttagaacaagctagttgggaagttcaacaatagtcagtgctaaaacatacaactattcccctaaattgctcaacaatgttactccaattgtaaaagaaaatcaaaacccctgtttagataaattattcattgatatattcaaagcattaatctgataagaacaaaaaaaaatattatgttgtctcagaaacccaattgagaagccattaaaacaaaggtatcttccatacgaagtgtactaagaaatgttacctcccagctaaaacatatctatcagcataatcagttggaaatgggaggtcctcggcatcaccttcaattatcttgcattctttcaagggttccttctgcttagccttggcaagttggtgaggagactgatcaagaattgtaacatttttagcatcaacatgcttaactatcccaagtgtcgtaaacccagttcctccaccaacatctacgacagtcaaattcctattgtttagctcaactagctcaagtgcatcgtctctcatatccttagtccagtggccaggatttatgatatgatcatacactatggataagaacctgtagaaccagaaagcttctttcttgtgttgaatgaacctaggctgagaagctggtcttgacgatgataaactgcatttgggcattaatcttctggtctggtaaattctgccatgagacgaaaaacccttctcaaggaagcatctatggtggaagttattccattatagcctagctctataatggggttgagcttttcagctctgttaagcactggaagagccattagaggagaaactcaaaaccaaagacgggtatatagttttattgtaaagactggaaatacactctcagatgaagaaacttaagaagtgataataagcatgagagacatggatgatggatgaatacatgtaatgaaaaaagaagatccaaagaacagaacaaacaagttacagcagcgtcactaggagcttcatgattctggataaaatggggtcacgtgttaggcaggtaatggcgtcagactcagaagaccacaacccaacatctgttagaaagtgtaattgacaacgttttgacaattttatgagtaaagaaaaatttagctcactaatttcaccatcagcctttgttgtccactcctctggttttttgtccggatagttgatgtcattaggctacaattaataactacattattttttatatatgtaaatggcaaccatgagaatgccgtgaacttctttaaaaattaatttctttcatattttagaccttacagttacagatcaaggagaattggagggaaaaaatattgctactttatttataaagaaactcagctactccctctagtcaactagtggaaacaacatttcgactagagggatcatctaaatatgacttaaaggcaatgtactgcatctatatacgaaatttcgatacaataaactagtagtgcatcagaagatcagaccatgtcggatggcttaggaacctctcggagctggaccgaattgtcatagcaatggtagaagccgaagtgagggaatctctcataccatgtgtcttgttggatgtgcgtgtcccaatgttcaccacaactgctcttcccgtacttgtgaatccatccagaaccgttgtggccctcaccccaggttctgttccaccgttctccatacttgccagcccaccaagtttccccttgcttcacaccatggccgttagggtcaaactgctcatcccatttgtctccccattttgtccaaccatcaccctctgagcgttctgcccatttgtctgtgtactttgtgctgccaccatgtccatcatacttctcaccccatctgcaaggaaataatgagcttaatgtttgaagaaaaagaaagcatgtattgacaacatcaattctattaacagttcgatcaatgcttatgatgaccaagaaaagaagaatgaagtctgatcaaatatttttcacgatgacaaccaaaaaacgaagaatgaggtcaaattaaagattttttatattaaaatcagtaaggaacatttataagaaagagagagtatttcaatttaagtatgagattcaatacctttcatgccagatatgagcatggccagcttcaagtggtgtgtttggatcaatactacaccatttatgagcccatttttcagcttccccagaagcattataacgttcccaccaattctcttgccactcatctccctggccattctttccccacttatctgcagtcttctcaatattcataagcccattctcctgcaaacaaatttaaacttttagtgtcaactaagtgtgcatgacaaaagtatatatccatacttttgatattaatattgaaagaagccaacagaaaaaagacacagaaaacaagtttagaattgctttgaagatgtagatggcccaaaaccagtctagtctgcagggagcacaaatgaatgcatcatatgcaacaagctcattagaggaagagaaggcaaccattcccaaacacgtagtgaccaagcatttccgtatacagattaagacagataaaaacagatattgaaaagaaaagattaaagacaacccataaccaatatatgaatatgcaatacattgaaattttcagtttccactaacctgtcccatggattctctccagtattcacgccaaacattgccagttgcatcacgtcctgatttttctgaaccaagttccttgtatccaaaatcatctgaagcctcccagaacttctcttgccactgaacagtttggtcagcactaatgcctctgatcattgtccacctacaaagtacaccatcaggtcttctctcgagtcctgtctctttccaccacctcgaaccatctgtcctcactccgtagggtgatacctcatcgacattattaagagcatcggctacttctgcagcattcactgaagattggaaatcaatttctcgatcatcctgtgtagggctctcaagtattgattctgagtcttgcactttctgaacctccatcagtgactggagagggggtaaaggggcctgtcgaatgtttttgttgagtttactttctagtggaatggatagaatgtctatagagcgttctttctccatgactgggttgcctaaatttggattttctgaaggctttgttgctttttgtaattcaccactgacatccatactggcatcaccacccttagagggattccaggaccaaaaatctggacctgggattccattttttgaagcttctgattggggtacaattttggtccaactttgctttcctaaaatgttcaaattacaaaaatggcatgatgtattagtatccactatccactacccaaacccataaacagaaaatgtaaattaaagaaaggcgtcacaaagccaaaacagttcacagaaatatagtaaaataaaagtggtcctgataatttacaagtatcgataaaaactgatgcaaaagtcatcaattcaagaagtgtcttattagtgggagttaatattcacgtgcttcttttgttatgcaaaattcatcaaggccaatgccacacttgtaaagaacctattgtaataacggggggtagcttgggagaatcacaatggcttaacatgccttcttccattcatgactctctagtgttaatgtcatgttcataagaaaatgatgatgcatcagagtccgtataccaaacttcacagagccacgagttcaaatagcacccataaattcaaatcattgaggcaaagatcaaaatcctaaatagagagaaccataacaacatccatcagaagtaacccagtaaaataactcttccttgactctataaaaaaaccctattcgattcaatcacctgattcacctccactcttctggtccaaaaaggcatacaattaactgaaaattgatttccgttatttgaaaagtctattacgtttctaaatatggttcttcaaaacatgatagacttttcaaataacggctttcgtcaaactatactttgtttaacattatattttgttatgttttgaaattcgaaactaaacattatactttgtttaccttttttagagctcttctttactcccccgccactaccaccgcggccgctcgaatccccagcacccgagcctggctcggccgacaatccactctcctttagaacagagcgagcagccgcaatcgctgccgcagcccgatcgatcacctgcattcgctgaatgtggtccctttcctcgctcgaaacttcaagaatcttcttgaactcctcgctcttttccaccaactcctcgggatgcacactggtcgaatccgagtccgagttctcgatgatcttctgaaactccacggcttttctctcaccatcaaccgctttcttccacatatcgagataagaatattcctcaccgccattggaggagactccaactctgaagctcaaccccaatacttgtctcctcctagcgtcacctatcccaatagctggagccacctgctccggcggaagagcaaacctgtgtttgtgctttctgaagtgaagaaaggtggcgcgtggagtagcgcctagctgagacgccatttttactagtcactttacagagagagagagagagagagagtgtgtgtgcacttgtaatggaatgagtgttttggggtaatcgaagttaaaatcgatcaataattaatgggagtgattgttatttgttagaacatagaggggtattttagggatttcatatgctttatgggttcactttttgttgaagatgggtgaaatttccgtgagtttgaaggaaagtttcagatgcgtttttgtgaacctattttaacggatttaactgtttctcctttcttctaaatcgttccttatgtaatagatcgagataagtacccacgtggcgtttgattgacggtgaaggcatttgtacggaccaaattgcattcgcggttattcaaaggggaaaacgacgacgacaagtctatgggacgtacgactaaaaaagacttgtcgtttaatcattgaagagttcaggccctcgttttttaacttttatgtgtaatggt

SEQ ID NO: 224920 - DNA, 19572 bp, Cannabis indica
ccaaatcatttaaggttagaaacacagtcagtcgttaccccctatctccctcaacatttcagtctgcacgatcagagagaatatctaatcatcatgctgtttttgatgaaatttgttctaaaatagtaggaatctgagatactagttctagaaacaaaagttatatttatttcagtttgtgttttattagatatttgatgctatgtttgagttttataagacattttatagtatgagattcacaagacattatttatccttgatatttgtaggtactccaaaaatatatttttaattaaatatttgaggggtaagcattcgcctcaccttacctcacaaaagaaataaaaaatcttaaggcttaaattcctaattttaaacatagatacaacacactgagatgaaagaaacatacattatacaaaatgcatgtatagacagtcgttcaactaagagaggtagttttgttttatcatgtttgaagaaaaatgtcttgaaattaacaatcccatctatattatacatatacaaaacgcttctcagggaccaatagtggctgctcaaatgtgtgcttgtatggaaagggaaagactcgaatcagaaggtgggtcgtgtgtggtttttctttgtattaacttttaagaaataaaaacattaaatttaaatttgaaaacatgaaattgaataaatttaatggagagaaattttgttcctataaaagcagtcaaataagaccttgtaagaatttatacaatgcaggacaaataatgcacatcgacatggtaaaatgaatgttagctaccacatgttacgagaacaccaagaaatcagtcaaatgcacaccctagtgtgtatatatatatatacattccataacaactaatagaatgttgcaaggcggtagtggtactggtactggattcgataaaacagcaaaaagacattaaaaggagaaatgttcgcaaaccttggggatgagagtatcatcctcatcaagaatgtatgccaaaccaccagtcattccagcagctacatttctccccactctgaggcatgtcattatataaaagtcagtcacatttctttaactcatttcttcatatacctttataaaagcataaatgtggcaggtgcaagacaactcacttcccaagtataactacacaacctccagtcatgtactcacaacagtggtcccccgtgccttcaaccacagcttctgctagtgagtttctgacagcaaatcgctctccagctttacctcttacaaaaacttgaccgccagtagcaccatacaagcacgtattccctacaatagttgcttcttcaggaataaaaccagttttctccactggtgttatgaccagctcacctcccgccataccctaggcatttatttgccacgagcagatttagacttggcacaactgatttaagtatttcaaagacttcgcaacagattactgctaagaatgctaagtgaacaaaacttaaatgtgatttacttaaacttatttttgatataaccaatttataaaattgatcaataatataatttctctttgtgaaattttaccaacccttaagatgtttccaaattttggtaattcaactgccaaaagatacctaattacaacttaaaaaatttaaatcagtgctacttccagataatcagcttataaatgtagtccactaaaatgattaagatcatcctggtgtttagtacgcaatgagcttaaataagcatacctttcctacgtaatcattggcctctccaacaaggcgaatgttcattcctggcgtcaagaagcatccaaatgactgccctgcgctccctaaaaatctgaacacaatgaaaagtccgagttagcttgcatctaaataaatcaacacacccttgatgaaaatgcacttgcagcaaattagctaatctcacgtaatgtttagctgcccagcaaagccagtatcaccatatttcttcgcaatcacccccgctacccgtccacaaactgcacgatcaacattgtatatatttatggtcttttggaccaccttttcattctcaattgcatctactatctgcccaaatacaaacaatgttctatcaaatggctagaggtagcaacgactagcactaataaatagcagaatattgacagaaacaagttttcttaatatgaaaacacaataagaatattaatggtcatccatttcatcaagtgatagattgggatagaagttggaaccacataataattgaaagagcatgcattagttctcaaaaatcacctgctggtctgctaataaaacatcatctagaacaggaccattagaatgaacgtcctgcttcctaatttcggtactgctcaattttggcaaccccacattctgtaatcaagattagaagtcaaataatgtatactactaaagaaatagacattcagagaaaaatgaaaattaggcctaccgagagaagataaccgagatcaagatgttgtgttttcaccagagatatatcacgtggtcttaataaatctgaccttccaattatatcatccaacttttcatatcctaattgtgccaagatgcctcttacctggcaatataatttaagagtcaacagcaacaagataaccttcgagtggctaagccatgaaaattggagataaataatgactagaaaaacacatttaaggaactgaggataaaagcaaaaataacaaaccacactactgatcacacacacacagcacagagagagagagaatgaaagaacataaggcacaagattacctcctcagcaacatataagaagaagttaacaagatcgcctggcactccaggaaaccgagcacgcaattcttctctctgaaaataaaaatacaaagggaataacataatgcttactctaaacagcaagaaataataaataaaactgaagtacctggctggcaacaccaactggacaattattcgtgtggcaaatacgggccataacacatccggtagctatcatcgccacagaaccaaagccatactcatcagcacccatagctgcagccatcataacatcgactccactttttaagccaccatcaactctgaggataactctttctctaaggccatttgcaataagtgtctacagatatttcgaattttagatgtactcagagagggtatccaaaaaaaaatacataatcaaatgaatcaattgaacttaattttttaatgtaaattcaataacctggtgtgtttctgtaactccaagctcccaggggccaccagcatgcttaatggaactaataggacttgcccctgttccaccatcatgtcctgatatctgtaagagtagattaaggatttttgtcaaaggccaaataagaaattgagggaaaattagagataaattttagctattgttctctaatgatctcccataccaaaaattttgtgaagaaagaatagaaatataaaataaaatatgatatgcttgaaaacttaataaaattacatagctatttcaaacatgaagaagtacaggcataatattcagagtcattagctatgttgatatcatgtaatagcataaatccgctggcctgaacaacacaagagagagaagaaacaatattctgcaccgtaaacatgtacctgtatgatatcagcattacccttagcaaccccagaagcaactgtgccaattccagcttctgccacaagttttacggacaccttagctttcgggttcacctatttattcagtacacattagtatatctttaatcagcatctaaaaaatctgtcgataattaaggggatttagcttgcagatacctggtgtaggtcaaagatcaactgtgcaagatcttcaatggaataaatgtcatgatgtggtggtggagatataagtggaactcctggcttagaattccttaaccttgctatatatgcactaactttttttccaggcaactggccaccttcaccaggctttgcaccttgagcaattttgatttctaactgatcagcattagccagaaatgttggtgtgacgccgaaacgtcctgaagcaacctgaagatgtaataaattttgatgagatgattataatagaaattgcaaaagtaaccaaaaccacttttgggggaaacatctcaacaatctttgtatcttgtaaatttcaaaataatatacagacagtaacattagattaagagcaatctagaagatagaattcagggtgatgacctgcttgatagcacttgtagctgtgtctccattttgaagacctttgagatgtggaagtgtggaagagtacccatcaacaacatcactgagtggcttccagcgaataggatcctaaacattggcattccattaaatttcacattttacaatatttattcatggttggaaacaaaagcagaaagaatctttacatctaaaaggacttcaattaaagtcaataataaaggtgaaacaacctacctcgccaccttctcctgaattagactttcctcctatcctgttcattgcaatggcaattgcctcatgtgtttctctcgaaatagctccaagtgacatcccacctgtgcaaaaccgctgaacaatggatgtagcaggttcaacctttcctactggaattggatcacgatcgcttttgaactcaacaagatctcggagaacctattgttaaattaacaaaatacagattaatctcaaaattaaagatttttctaaaaaaataaaattacagaacaatgacacaaaacaaatgtctggtttgataaataggttatgatatagaattagatttaaaactatgaggggaattgagtgagttgattatttgcaaataataaactatgagaaaacaaattaaataaacttcttttccccgtgatatatacgaggattagagaattgatagaataaaattatcccaagtgatacaaatggatatcccatggaaggttgattaattgagttgttagattaattttaccaatatactttctaagtacataatcaaatcacacgacaaaaattactcaattcaatccagttcaactctactttctaaacatgattgtaaatgattaaggaactcacgttcacaggtcgattagccaaatgttgttgatagactgaaaatgcactttcactcttttggcgaacagctttgtggagcaacttcgacatctcaggattatttccatgatactcccctaataacattaagtacacatgccaaaagtattattaacaattatgtcttgcattccaaaagtggaaaattgaattgtcattaatttcaaatgttgatttctcataatttaataaatttttttgataaactactaaatttcatttattggtcacttccattggataaagatctaacagttaacacctatggaaccatagaaacatagacatgacgagtactatatacaaaaatatataaatgtatctatgaaaggataatactattaacaatactagaacttaaacaagcaaaaggaaaaaaaaaagttccctcaaactataacacaagtttactcatcaaaaaaaaaaaactaaatcttatataaaggtgagggtaagtttggttgggaataataaaaacaaacgaataggaatgggaaaaaaaaattaatatgaataaaaaacattataattttttcattgtgcaatagaatggtctttcctcccacttttgacaaggaatggctaatccaccagaatggtgaaagccattccattaaaatagcatttcaatgcattaaattttgaccaaacaaaggaatggtctttattagtactgaataaaaaaagacagatctaaaaaagatgatacctcctggtctgaactgtataaatccaaaattttctagtcttttagccgtatcctccgaaaaagcctttacccagaaggacaaagtctctcttgccagctgcagaatatggtaaaaataaattaccaagcagtgaatcacaacaattaatttaacaaatagagttgatgacatgtccaatctcatactggaagtcaagtcattgcatgttcatctacaatacccctagttctgaacattttcagttgtagcaaaacacactaaaaaaattatgagaatctttgtcatagactgttacaatatgttcaaaataagatgtaaaattgctgttttctgcctcacctcatcaaatgtgagtccaccaatacttgacatgctaccacgaaatgaaaaatcaaccacccctttccctaatccataaatctcaaagatctgtgcaccacaataactgtacacaagaaactggttagttaattagctgatgctgtaagaaacatcacagaaaggaagacacatgcagctctaataaattcaactaaaaaatagataacgataagccctaaaattgttggatgaaaaccaaaggaaaataaaataccttgaaagtaatgagatgcccattttggaaagaattttcagaagaccagctttgacagcctgagatgcaagaggttgtcaattagaaatacttgacgtgtcactagttaaacattttccagaaaatatttggcgtacaaaagagtttaatctcaaaagttcaatacacacaaaagcaagcacttgaaacatatgtgatatgtgtcaaggaggtcaataacttttaaaaaagtagaaagaacgaaattaattcttaattatatatttgtttttttgaactgacttcctcagataagcctacaatattagatgaacaacaaaactaaagcagtttgctcatgtttggacactcattttctgcttactgtacgtgtgcatgtcaacatgatatttaattgatgactttataaatttagaaataatagaagtatgcataagtatataattaacttaatattcagcaaactttccacaggaaggcatcatactcagtgacattctcagtaataggtaaacctggatacatgtctacgggtggcaattccggtcatgacacgacatgaactcgatacaaattattgcaggttaaggccatgaaaaacagatgcaatgcaggttgaaattgggtcgaacccaaatgacacgattattatttgtgcaggttagggttaacgcatgtgacacgagaaatcgacacgaattgactcatttatatctaatatattattaaaaatattaatttaaagttaaaagtattattacttttcataggaaaatatataaattaaaaaaaaaaattgcttacaattgataatttgtgataaattatttttataaaaattaaatatacaataccaatcatgttgatcaacatgtattgtaacataagtatagtcgacacacgaacacgacaggtcgaattagggttaaaatttcttgacactaaatatacacgggtcgggtttgggttgaccaattaaatatgtcaacttatataacacgaacacgaatatgatacggcaacacgaattaccacccctacacatgccgccttcactccttccagttctcaaacatcaatcaaattaatttcatttgctctaaatttttagtctcattacattcgcatcatgaaagaccagaattctaaaaataattggtggaagacctcaatgttaagaaagccaaagtagaaatgtacaatgtaactggaaaccaaaatattgtcaaacctaaataacttgcataatttcataacaaaaaaaaaaaaaaaaaggaaaacattatttgcttgcttttgtaaagcaaataaactaaccttgcagtagttcttttgagcctgttcaatagtaacagtaggcatctttccattgcgcatcaaatttactgttttggtactcaaacgccactgccggcttgtctctaatgccaaatatgggcatatggcactgatagtgaaattataatgtcatgctattgtattttcttatgaaaacaactaacttgataaatgaaaaatcaatagctaaaatgccagcatcacaaagtaactggagattgatgcagattttcaatatgaacgatgccctatgaatacaaaatttccatggacatggtttaaaaggtaaaaatcggggaacattaatacaactgtaacaatttctagaattatgccaagcctgcgactacatgttctctcaaggtagactagaaaataggtattaaatctagggaggaccctcccaagcattagtaactcacagtgatatcacaatattctaatatgattataagctaaggaaaataaatgtaattagctatgaatacataaacctttatgatagtagaaaagaacaatttgcatgaaaattatgatcaccaactccattttagataaaagaccaaaagtggtagaagatataaatgtatatattaaaagggcagcatatcaatgaaacaaagatagcagagactgaggacaaccttgcaccgtatccaatcaagcaggcaaagtgatgagtgctgaagcactgagcagtgtctgccacaatagatgctgatatccgcaaaccattttgaataagatgctggtgtacagctccaacagctagaagaattggaattgcaggacgagttggttcctgaaaatgaaataaaagcacaagtcaatgtaagaatttttagcttacagtacacaacagaaacaagaaggaataatacatatatgtaacaatatatgcataaaaaataataacattaccaaccaaatgaatgaaaatagtaatgctaagaatttaaataatgaatgagcaaaaaaggacaaccaatttggataaagaaaatctatcagttttaatgatgtgcataaaagcagaaagaatgtataacatgtttctttgtaatatggtactatagtatccacacattttagatttggttgtttaacatttaaagcaacatccacaagaagcaatttatacacatttatcttcaatttaatgtatactctttgtcccttgcagaaacagaataataaatggatatgttacggaacctaagtgatataaatttgagatggtttcaaaatgaagataaatttgttcttatttagttttcggcaaaaaatttgggtttaaggtttgtttctcatatagaagtataaaaaagaaaaagaagaggaaaagacagagacagacagaaacagaaacagagagaaataaatgaaagtagactgaagttaaaatggttcttaccggctcatcagttcggtcagagagaacaagcaattgggagccatttcgcactgcttcatcagctgcttcacaaagcttattcaatgtcctttctaacgaaccttctatgcctttacgaatatcaaaaatattggtaagacttggggttttaagagagggtccttcagcagtaactcaagctctccttcatttagaacagggctagacaggataacctgcaaaataaataaaccatgctcaatctcatgtaatatacttcattgctttcttttcattgggaacatagaagaacagccaccatgcagcatggattaagaagaaaagaaatactaaacaaacctgtgaagcattttcaggtccaacctccaatatattccctctcttcccaacattgacttcaagtgacataactagcccttctctaagaggatcaatagctggatttgtaacctgcaaagatttcagcaaatgataggtggatcttcaaacttattgaagcaaaataaataaataaatacacttacaattcaagagttctaaaaaaatcaactacataagctttaggatataaaagaaatacctgatcataattcatagtgtgaagcattttttagttaaacgtgtaagatagattgaaaaatcatcaacaatatataaaaagcaaacctgtgcaaaacgctgcttgaaataatcaaaaagcatgtggggtttctgggatatcactgccagtggaatatcatctcccatacaaaatgttggctccttcccttgtgaagccatagactcaataaccatttggacgtcctcactagagtaaccaaatgccctgctcccaccatgaggcaaagttaaaaccactcaagaagtataacataaggcaaaagatatcaagtaaatcatacacccaaaatatcaaaatgaagcgtcacgttcacctcgttaaaaatttagctttacgccacttatatatgaaaaatgatggcacatatatcacaggtgtgcacctcaaggaccataaatgaccgaagtaaatgaggtatcagctgtgcacatatatgaagtgtcatcattttttgactttttctgaactgtaatttaaatgaggtatcaaccataaatgacctcatgacagtatcagttaaaagttaagcattttttttccttgacaattatcagtatgtagtaaatccaattagccttttcattaaccaacagaacagtatgaacctcaaggatataaatatatatatataatttatatatatatatataaaaaagaaaaagcacacgatctctttcacaaaataacacacattgggaacattttaaatcagccaatggcatagagcttactgttggcgtctcaatatggtgtcattgtccatttctgcagctgagagaaagtttgcaggcttcaatgatcgaaggttttccttgacccactttccatatggatttgacaaggcaactcgctttttaacttcagtattttcatacacctaccatttaaaaaggctaatgatttagaacaaaccactctagtcctccaatatacaatgaaaagtgtagtatgcaagtaaaaggctcaatatatggacaaatatcatgaaaacatgaaaacaactttgtgaaatggagaaaattgggaaactattcacaagccaatctctcaactcaatcagcactcgtcgcttaaaagttatttcgcttggtcgtagaatatcaattatcctattcactgaacaaattctaccctttggaatatccaaaaagccagaacgtccaacctaagggaaccaaccaaatgcaaatggatactagtctataaatatatattgtatgtacaattacctatataacatataacaataatctatcagtagaagggaagagagttaaaaatcatacacagaaggaagccaacaaaatgcaattatataaatacgtataatatatattgtatcagtaaaagaaaagagagttaaatatcatacacagacatatatattatatttataaattaaccctctttagaaaagttttcaaatactttttagaagaaatatttcttttagaagaacagtacaaaaaaaccaagcaatataacttcaacacaaacctgtccgtttatcaaatccaccgttatcatcattcctggacccagacgacctttcattgttactttggactcatccataggcaccacaccaacctaagcaacacaaatgaagtctgaaatcataaccatattgaagaagaccagaagaaacagctttagactccaaaacaacgccaaagcttattttgtgagttttgtaaataaataatgcagcagcaagcaaatcatcctaccaaaatcgaataatttgaaaggactccaaggaaatacattatttgatgtaaataatgcacaaagcaaatgaagaaaaactggttaatcggtttctaacagaagaagttagaatttctcatgttatagaaaaattaacttccttgccccatgttattaaccccatcaatttgggacccataattaatggcttcatagtcatatggtaggagaacttgaaagatgaggtaaataccataacaatcaaatacagaatactctattaacaaacaaagccaatacagttgccatcgtatttgacacaccattcaaaagcatttttaagaggaaataactgatgcacctgaagcttctaaatatttgttatatttgaatatttatagacagaaaatagggtgtgcactcatttggtactatgtattttatcaaaatacagatttggtaccccatgctttcaataatgtttacttggtaccctacattttgaaatcttacatattttagtaccctgaactcaaatttgattggtttatcgtaggaaacctcttaagtcagtatatgaaagacacttgtgcactagccaattatacaggatgacatttgataaaagaaatttaagaaataaagtagaactaaacacacctcagatgcaacataaacaacattgtctgatgtccgccaatacctagctgggcgcaatccatttcgatcaaggcaggcaccaactgtttttccatcactgttccatataaatggtatacaattatcataagtaaaactatgcacacacacagagtacttttagtaacatgtgtaacattcacttgatcactaggaccatgattgggaatgtttgattgcctctctttaatatttaatctgacactatgaatgatatggtcaactggcatgtctccagtactctacaatactcatcatggccattatcagtccagacaatattagataactattatcagctgcttatctagattttcttatgaagaatttaaggatccgattaacagtaatattgtaataagagccataataaataaagactaccactgagacaaggctattgttctattttctgaacaatataattgaactctgtcaactacttttaactctagagaattaaagaaaaccactagctaactgctgatcaatttagatcgcatgtacactggggaaaaaattacctgaataatagtaaggcaggtccatcccaagcttccatctgacccttgtaataatcgtaaaagtcaaccgcctgcatcagaaagaaacatataaatatcctctgcctgtaatatttctttacataacatgaatatttttaatcaaaaaaaaaatgaatattactagtcaaaaagtaaagcactctaaatcatgaagcctaaatttccctagaactaataatgtaataagttatttatcctggacaatatcactaaacaagactacaagggagagtataaataaggctatggcttgggaactttggagagaatcatgaaattaacagactcctgaaaagttcaagatagacaatgaaatcaaagtttaggaggttaagtgcttaaagaatgaaaccattttttgtaagttatatatgcaaactttacatagcaatccaaaacaataatgtaccattggtttttcattgcagtgcctgatacaaaatattaacctaaaatacctcaggtactcaatcatcatacttaaataacaaatctcaaattaaaatacctcagggtacttgattgtcaatgttgggtgatttttatatgcctctggtacaagaatcattaaagcctcctcaggagtacgaccacttttaatcagcaactgaaaagaaaagagaaaatagtgaaaagcaacacataaagataccaaaataatgatataaagaagtcatcttggatgaagttaaaggaaattcaagcaagttgatattcactcccccacccccacatcccccagaagaaagaatgatgttataatatgttcatttgtataacatatcctattacatacacaaacgaacatatgattaacagcatagccaacagcagagcatggctccatattaaagtcatggctatgatgttaaaatagcaccttcacgtgaaaggtgttctttctgaacatgatatatatgggggaagaataaattttgaaaaactgaaatacccactacattaatgatgaaggactatcatttagttacacatttcctgtgggagcataatattgctaatcactcaaaaatattctctacatcttgaacaaaaaagctttcaataatatccttagtttctacatgacctataattttctcaatatctacatccaatggatctttattaatcagagcactcagcaagtaattaatgaaacagcagtataaaaatgggtgatgcatacttccgctgtactgtcaagatttgcggagtctgatcccttgggattgccaaatggacgaatctcattttctcgacctcgccatacaggagactgcaatgaggattctctggattgcatccagttcaagttcccctgtatataacttttgtgtcaatgtaaagtttctagttgaaatttaacaagcaatataggccatgttatttcaggctaccaaaagtgaaaacaaaaataacctgtatggtattgatctctccattatgaccaagtaacctcattggttgagcaagaggccatctcggactagtatttgtgctgtacctccgatgataaattgcaaaaggtgatttataaagatcactttgaaggtcagtataaaataacccaagaacttctgagcgaagcattcccttgtaaactattgtttgattggacaaagaacagaaataaagttcatttccccaactttctgattgtgctgctttttcaatcaatttcctgcatatgtacaactctcgttcaatgtcatcaacattctcctctttaacaacttttacaaatacctgctgtatgttgggcatggtttctttagcatagtaaccaacaacagacatattcacaggaacaggcctccatcctaggacttcaagaccctcttgtctaaaaatattgacaataactacaaaggaaatcagaaattaatggtcaaataatacacagtatgcagcacaaaatataaagaattgctacagtaagaaccaataaaacgttggtctatggatggtgtgtgtaggtagaaagaaagtacaaatgagaaaaggacaattaagtacagatagaagttgcactaaaaaaatatggagagagagagaaagaaagagagtgacaataaattagataaaaataaacctttctacaagattaaaagctgcatataactgcaactaataaatgaaattatgatttcttacagactaaaataaggatcctttcttttctcacccatctcctgcttccaggtttcttaactaactacccatgactagtggaacaaaggaaaaactgttagaaggtatatatataccagaggactggcaagcattaagactagtagttcctttcttttctcacccatctcctgctttcagatttcttaactaactaccaggactagtggaacaaggggaaaaaaagttagaagtatatacaccagcggactgtcaggcttttataattcccaccttgtatgtaggtaattttaaaatactcaacaaaacaagacccttgtataaatgaaaacacaaagcactttatgtaatccttttttgagcaactaccttttttgacttcttttacaatttcatcatcttttgggaagaaaaccattccaacaccagtgtgcaacttatcaaacgtaggaatcccttgactgttagcccaattgttgaatagatcccatggaatcgaagtcatcacacctgaaccatcaccagattcattatctgctccacagcctccacgatgttccatgcagccaagagctgtaagagcatctgcaacaatttggtgagatcctatattatccaaattggcaatgaatccaacaccacaagctcctctttctgatagtatatctttcaagtctgcaacctgctaagcataaattcagttcatgcagtacaatggaagaacttgagcttataatgttttcattgaaaagcttaataaatgacaatagcttaaaaccatgataaaacacacaacacttggggagaaaaggaactttttcaatggaagttctgatcatttttaggttctcataaaacagcggggacagtaaaagtatactttgtggcacttgccctgttacccagcactaacaaactcttaactaacttgacacacacacacaaagaaaagaataggggaaaaggaactttataatggaagtgcagatcatttataggttctcataaaatagtagagacagcaaaagtatagtttgtggcacttgtcctgttactcaacactaacaaactcttcactaaattgaggagcacgagcaacatatgcaaatagcttccaatcataatttctcaaaggaacaactaaacaaaatagatggattggaaggtttttaattcttctctaacacttaaagtgctcattatgatgaggtgtggatcatccagcatgcatcaaaactaactgggaaaaatggatagtatgaaaaagcaaagtctaaaaagaccaagggcttttagttttcctattataagaaacaaaatttattcagtaagaaggaagactgcaaaataaataaatacaagtgtgttatctcaaaattctatagcactattactcactaatgtattatctataacagcagtgttggatttctaagttaacttctttctttttttaagctctccaatccaatactaacctaatacttccttagatttagttggaagtgaaagtaccattttttggcacatcaaattactatgctttacagctctctcaacaatgctgtgcatagagaaaagccatcaggtccaccacatagaactgagcttaaaaatgtcggaacaggtgagagaaatttcaagataacaacttattcaggtttgaattctacaacaaatttaatataatgttttgcaagcaatccagtttgtagcttactttgatcaatccgaatgttattgatacaaagcctaaaccacctgagctcatgtatctctataacatcacaaaagcctacccgagtttgaaagctttgtttaagtatctcagaagatgattaagacttcaccaattcaatccctcccctaaacgacattcattaccacatgaagctcaacactgaagctctggtaacaagttaaaagatagtaaaaggagttttcctaattctttattttatttgttcgaacgcgtttgatcctacctcctactgtgaaaacaacatccatctaatttcaccacacgattgccgcaagaacaaaaaaaaatctaaagaaacggagtataaaatcatttaaagcaaacggcctctgccataaccaagtcacttccagaacaaatacagcgaaactcagaagtcagaaccaaataaacgtctcaaatcaatttttttttcaaatgaaaaataaaaaatctaacctctcaaccaataatcaaaacaaacacaatacacaccttcggttccaaatccgaaccaccacgcgactgatccaaggcaacctggctacgttcaagatcaagaaccgctttcaccgatgatgctctcctcctgcctacagattgatgatgatgaacactagtcggacgattcaccgaagctcccaatttcctccgagtcccgttcgatttgcagtacaagccaacgaaatcgacgagaaacattccatttttgagcgaaggatgattaggctgagtggcatagcatccactagagtgaagcaactgagaaatagaagacaccgattgcgccgccatggcaggcggcagatagctagagagagaaagtgaaagtcagagagatagagatagagaaaatagaaatgcggaggtgagtgagataaaatgacgatgatgatatgagtagaagaagaagataataaaagaaagagagcctctcactggtctgctctctctggcctcttgctaagttactaacattactattattaatatttctccatttcagtcagactcttccactaacccatgggtttcactcctctgcttcgcggctccattattattaacttttaccgttgatataaattgacggtcttgattttccagtaatctcggagggtccattgaagtacacgtggactaaaatgtgtgacaagcacaaactttaaatttccgacacaaatatacgctcataattttaatttccttcttgatttggctacgtacgtgagtcactttgcctattaataataaaaaaatattttggggttgaaaatgatggtcggtggtggtcccaataatcgtatataatcgggtgtgacaatctctattgtacgtaccgtgtgcttttgattgtagaggtaagtggtatacactatagtacaaatctctttgtgttttggtagacttttttttccttttcttttttgaaaattggtagatttttttttatggctaattaaaatttttaccctctaaactttaacatgtactaaataatgttctttgaacttttctggtcgttaaacattccctgaactattgagagtgtgagatttaggacttttctttaatttcatttaattttactatttcagcgattgtttaagctacccaaactttgatatctaccaaatcatgtccctcaaacttcaacatatactaaatcatgctccctgaactttcatccatgttagatttttttttactaaaattaaacaaaagtctttaaatctaacaatcttaataactcagagagcatttttaacgacctcaaaagtacagggagcatgatttggtacatgtcaaagttcgggaagtaaaaattctaattagcttttttttatttgttttgcattcaaataactctaataatttatatttttttggttatgattgtaaaagttgtaattatttaaagtcgtgtgattttttaaaaaaaatctaaatagtttacaatgataaaaataaagttcaaatattttgatatacgggtgattgttttttttatgtatcaattgagtctgatgtttagtaagagtgctaaacacaagagggtttagcctgaagacttgatcactcgggtcatcactctcaatgacggctttgagaagctcagttgccatcaccttactaccacgcgtcttgtccaagttcttagacttagacacagagttagcttagctctaatgaactgagccacatgtgggtcatactcatcagacaaccttttactcgtcttcatccgagtcatgacagatcaacaacgtaagttgcttacaacccaaaaaaagtataattgagttgacaaagttcaagcaatttttgaaggaattttttcaaggcactagaaaagtattttggaatttttgagatcttaaaaaaaatatttcaaaggtgtttgggagactaaaaattctttgagtaagatcaacaaaggagaaggagaagaaaattctaaaaaaaaaaaaaaaagagtggcgccaattcaaagaaaaaaaaaattctatcttggaatgaagaacacttgaaggcatgatgaatatgagattccaaagtgctctctaaaggcttaggcgtgtgggctttgaatggagaagtgtggaaattttgattgtcaactcttttatttataggtgagttcaatctcctatcctaaagctaatgagagtcttttaaatttaaagcttttaaggaagaggtaaatgtaatgctctaacaattaggcacgctacccaaggtgattaagaaaccttaatcccctaaacagaattactaagcagaaaagcgcgaaaactttaaacttaaaacgaaaatataatgaaaataaaacttgtaataattttaactttacaatcaaaggttacatatt

SEQ ID NO: 224921 - DNA, 6871 bp, Cannabis indica
ttattttttactttttgaaatttagcagtagcaaccttatgtacactataaaaatgtatttactgtaaggaactgaaattgtacatcttctgcagatcaaactcttatgttcctaagtcagcaatgcaacataagaaaactactgaaggaggcactaggagaaggtaacactcctgaacttgccgtccgccttgtcttttgtataccaaatttctttcctttatggatgaatttagttctggaactttttcactaattggagattgcatttgcagggataacgatcttcaccgcttactctttatgccaaatggacttcctgatggtgccgagttggcatactatgtgaagggacaggtgtgtatgtgtatactttttataaataaaacaatttttagttttttgcttaagtataacgaaacagttagttggtatacatattatttattttatccttggctggtacttgaaaaatatagagttcctacaacagacccatctgcacattgagttagacttaaatggccggggacatgtatatacttcaattgcattcgtttaaaacgttatttctgggggtttggggcaaaaaaaaaagttgatttatgggatttatgaacaggttactaattaatgtataattggcctgaattatcatgttccagaggatgcttggtggctacaagcagggaaatggtatattctgcaattgctgcaatagagaggtgaaattcttgattcagacagaagttatttagtatgatatctgaattttgatccttctgaattcgttgctgacatcattcgcaccatatttaacaggttagcccttcccaatttgaagctcatgccggaatggctgctaggcgtcaaccgtgagtacccttcattatgtatttatgtttgtaataagcagtttaatgtgttatgttgagttgtttggtccttttgcagttaccgtcacatttatacgtccaacggattgacactgcatgatatagcaatttcattggctagtgggcaaagccttacaactggtgatagcgatgacatgtgtgcggtttgtggagatggcggtgatctaatactttgtcacggatgccctcgggctttccatgaaggtatttgcgttttcaatagatttattgattttatgccacttgggggctagctcaagtagttggggtgtgtgtatgggagggggagcggttcaaaacccattatgtcaaaataaagatatgaataaatagatttcatgatctttctggttcatttttagatctataaatgcttaatagatagtcagttgtattagagttcttacattgtgctggaccactggtgatgcctttatcctgtaatcatattagtgttcatacaagtgattatattgtttccattatgatgtccttttgcaaaagtggttgtagctgtgacattttgaatgtcaatgcatatgaatatatgctgttgtgctgtttcattaattttttagctttatacatttttcagcttgtttggactcaacactggttccacaaggtgattggtattgtctaagttgtaaagacaagtgtgatcctggtagaaagacggctgctggagaaccgtccagcatttcaagacccattgtaattaggttgacacgagttgttaaggctcctgaaattcaaattggtggctgtgttgtttgcaggttagttgctatacttttgtttgtttaaccttgaattctgtaatgattttaggtggaataaggacaagttctttatattcaaaaaaacagaggatctgaatttgcttgtatattgtgaatgtttctccccatttatgctgtgctgtgtgactgtgttattcttatattgcttgctcttgttaagtaattaatggttttcttttgacttgttagggcccacgatttcagttcagctaaatttgatgagcgaacagttatgttgtgcgaccaagtatggattgcgtttgtctcctttattgtatttcttacaaattcttgtcatttttgtttgcaagatggtaatgttcgcttatgtttcagtgcgagaaggaatttcacgttggctgcttgcgtagcagtggactttgcgatttaaaagtaagtagaagatgttagaaaatttagactttgtgttgcttgcttatgcaaatttatacaaaaaatttgagtacttttttactacgtttttttgtgtatcttactgcaggaactcccaaaggacaagtggttttgttgtgatgactgcagtaggattcatatagctctacaaaatttggtatcactcggaccgaagactgttccagcttcattatcacatgtgatatttaagaagcatgcagataaaggattgtttattgatggagcagaggatgatattcaatggcgaattctaagtggaaaaagccgatatccagaacatctgccatttctctcaaggtctgctgctattttccgggtaagtatttattgtaccaggtgttatactcatttccatacttatcgtgcagtaggcttatatattttatgttgcatttgttagttacttctgcttgcaaactctttacttttttgcttgaatggttttttttatttactttgatcatttaagtgaagctttttccttttaaatgtgtagtgggatacctttttctcttaatattagactgaagtatatttcatgtgacaaaatggagtctacaatattacagctcataaacaatacttaagaaatttgttcatgtcgcttttttgaagcactttacatttattgattgcaaatagtttatttaaaaataagatgctgtgtattattgaactcagcagcaatcttttttgttttgttttcctttctacatgtttgttggagttataaatcttagtatcattttagatagttatttttgttttgtttagattcccttttttacatatttatgacattacatatatgtgtgatgagtttctgtaatttccataggttcatactactcacatctgattatctgatttgtaatgcacaggagtgttttgatcctattgtagcaagatctggtcgtgatttgattcctgttatggtgtatgggtaagtaaagttacgtgttttgtttggagtttatgcaataatatatctgcaagtaaataatcttaatttgtgatttatcttgctttgtaaatttgcagaagaaacatttctggtcaagagtttggaggaatgtactgtgtggttttaaccgtgaggtattcccttttgttattgttgttatgatattgggcaataatatgttatgtttaatgccgtttctttaattggttactgattttgagtaaaataataccatccatccacacaggtctgttgttgtatcagctggtcttcttaggatttttggtcgcgaggtagccgagcttcccattgtggcgacaagtagagaacaccaagggaaagtaagaacaactgaacctttgattctttcctgttattattttagttttggattcgtaagtagtaattgaattgaactctggttatttaacgaacactacaggggtatttccaagtattattttcgtgtatagagaagttgttgaattccctgaatgtcaaaaacattgtgcttcctgcggctgaggaagccaagtcaatatggacaaacaagtttggattcactaagatgactgatgatcgagtaagtgctgcttttgttacttttttttaactattgaagtcgatgataacaaataaaagagtaatgtggtttgggtgtaaatatattttcaggtgtcaaagtatatgagagaggtgcaatttactattttcaaggggacatccatgttggaaaaggcattgcaacagcaccagcaccagcaccagaatagcttatagctttatagcttagcttattattattattgttattttatttttttaaagttattctattttgttttgtgaaactatttcatttcctgtaatatgggttttctttctttagaggatagagtgagtgagtgcatctgagttgggttggtgggaaagagaggaagagagatgtattgtataaaaaaaaatgaagaggagatgagagcagtgcatgctgactttttataatgcatgcattacccgtactgtttttttaacgtaggtttctttaataatgtatgataataacacattgttgttttaaggttaaaaaaaaaagaaaaagaaaaaaaaaaacaatgaatacaacgtttttgagtgctgtgactgagttaaaaagtaaagaaagaaagcaacattatagtgctaattgtattgtatttaatgtatttaaaagaggacgataatggtctcattttaatttgtaaagctgttatttttagacttgagcttcttcttgtaattgagaccatgcaagagaattaaaaattgcaatgtgataagttcaatctcattctcttgtggtaaaacacagtcaaaatagtatgtatgtaccttctattaacgttaaaattcaatatgaataacgttagtatattttttttaaaaaacatagtaatttttaatttttataggtttgtaacatttaatatggaaaatttgaccttataaattatatgcataatgcaagtgaaaattaataattaaaatttaagctacttaatattaggggaataggttaacttttatgtatatctcaaaaaaaaaaaaaataatttattatctcaaaattttctaacatctctctgttttcttgttgctcgttctctatcttcttctcttatcttttcctctcattagttttcactaaaatacccactgaaaaatccactaaaggatccaagatcgcgatcactgcgaccattgccaccatccgatcgagaccacaccaattcgattgattgagagggtttcatttcaattcgacttagacttcgccaatcctttcctcaattgcgaacgaagaggccaccgccactaatggggactgcaaacgcagatcacgaacgaagagaacacgaacgaagacgttctttgtaatttttggttttttctgtctttacgtgccagttcgatatattttcgataagaggttctaaaatttaaatttttgaggttaatggtgaaggtccgatagtagctcgatgcatagtagctgattggtggatatatttcgtgtttgataggggtctgatactgtctgaatggtgtccgatgggatccaaacgtattagactccatcagacctccattggacaggaaatacgttcactgatcatttacgatgtatcagaccaccatcgaacctatattggaccactatcggaccttctccatcaacctcaaaaacttaaattttagaacctcctatcaaacctatatcggacactatcgaaccgactcaaaaaaataaataaaaaaactaaaaaattacagagaacgtcttcattcgtgctctctctgtttgtggtctccattcgtggcggtagtttctctgttcacggttgaggatggatattgaggtgggctcgaaaggattgaaatggagttgagagggttggtttaattggtttttaagttgattgagtgttcttggatggtggaggtggtgttggatggtggcagtagtcttgaatggcgacgatagtcttggatagtggcactggttacggcgattcgatctgttaaagagagtgagcaagaatggagagagagagaaatgagtgatataatctaataatattgatacactaatgattaaggtataaattttagccatataaagttaaatttatctttaacctttaaaaaatagttatataaaactgaaaatataggttttgctatttcttccttaaaatgggcttatctataataaaatgtagaaaaggcagctgttactactgtcttcttcccttccctggccatttcgttgttgatacagatattctcaagtgaagagtgaactgaagacacagttctcttgttggccttgcttatgattttctcatctgagctgagctgagcggagctgaggtgaaggttcatccatcatccatggcttctttctctggtctctctctcaagtgctgtccttggtctcttcctcactctctcaatctcaaccaccgctcctccttcaacttcactcccaattctctctctcagtctcaacaacatcaacccctccctcctgatttcacctccaagcagcttctcgcacccttcgtcgccagaatgacgagtcctccgcccttcgaattttcgactgggcctccaagcagcctaatttctcacccactacctccatctaccacgagcttcttcgcaagcttgcaaaggttggttctttcgactccatgaccaatctccttctcgatatgaagaacaaccaccgcacctcttgcccactcgataaagccaccttcttgattttcatcgagagctatgcccacttcgagttttacgatgaaatcttgggtcttatctcgctcatggaggatgagtttggggtcaaaccagatacccatttttataattctctgttgaatcttcttgtggaggcaaacaagctcaaacttgttgaaactgctcattctggtatggttagtagaaagattaagccagatgtttccacttttaatgtcttgattaaggctctttgtaaggctcatcagattaggcctgccattctgatgatggaggagatgcccagttatggtctttctcctgatgagatcacattcactaccattatgcaggggttacattgaagaaggtgatatgagagctgctttaagaatcaaggccaaaatgcttgagtctggctgtcttgtactaatgtcactgtcaatgtcttgatcaatggttttttg

SEQ ID NO: 224922 - DNA, 8517 bp, Cannabis indica
cgcctaagatagttagggtgttacagacatagatctaagttctccagctccgtgaccttctcattaaaaggcatttccaaatcactaccataaaccggctttgaactctcatacagttgactgaaattctccaccagatacgcaccaattccatcccgatccctaatccacacatcgtcatgagtattgatggcccgaatcctatttctcctcctccgaaccattgtagaagtgtgaaaaaatttggaattacagtccccctgagcaacccacaattcccgagattttcgcttccatatacgttccattttgatttccaactccgcaatatcagcctgaatttcgaattcctccctttgtcccccagtataggaagtctgcagaagagatagctcattgtgcagtcttttcagcttggcatcacaaaacccgaagtggtttttattccactcattcaacgcccatttagtctttgttagcttctgcataactcgaaagctccagaatctgttgcaaggccaattccaggactgctcaataacctgaccgcaattaggatccgaagtccacacttcaaaaaaagcgaaaaggatatcttagcccctgttcattaagatcaatgtcaagagttaaaggagcatgatcggacgccacaattgggtgattcttgacacacgcacggggatattgcgtacaccagcaaggagaagcaatagccctatccaaccgttttctcaccccgtgaggatggtctcgcgcattcttccaggtgaggcaagggcccgtaaaacccaagtccactcctcccgagtccatcaagaagttttgaagaattccaccttcaaaagaacggaaagcacgacctccaactttctcctcagccttcaaaatcacatttaaatctccaataatcacccacggagttgtacatccaagaatcacactccttaaccactgccagaaactgtctttctccctcgcatacggtgtgccatagacacaaaaaagattccaaggtcgcaatccatcacaaggtgtatacaaacattcaaacaccgaactataaacatttatgatctgtagattaataccttgtcgccatttttaacacaaaatctccctccaattccaacagcaggtatacaacagacattagagaatcccagacgagcatttatctatgtcatagcttcttcatcaactttagtttcagcaagaaataaaacatccaccttctcagatcgagagaggcccttaatagacctctctgccgcgggtctacgaagtccgcggcaattccaagctaagcacctcatggcgaaggtgggggcatgcttctggccgcctcctcgccatttcaaaaattttgaacgtacgaaatagggacttcaacacattgggcaagtatttgattaatgtcaccttatagttgctcgtcttcatcttgcaatagttttttgctcctcctagtcttgactccagagttcctccgcggccattgtcgagacctgttaatccttgaccttctcttattcttagtcgtgccttttgtgtccccatcactacccagtttcaaagtttcactccccaagccgcaagcagatgaatccttcgaaggagagatttgggtggacgaacttgcctcttcattgttatcaaatagagattctttgtaagcatctggtattgggttataccatgtatgaaatttcctctttcttgagcccaataaatgaatgatcatttgagacaaatcaggagggttagatataagtgagggctgggctttatataggtctgtgtagtccggtccaataaggtcacaatagagcttttggagctcaggattattagtaggccatttgaagtttataggctcaggaaattggtgtggattttgggatttacaagtccaaatgtggggtatctccaggctttgcataagtgaaggcccaatatctgggatgaggtccacttcagcatcaattggtccaatgggttgggcaaagtctggtaatggtctttctgttaaaatggcacatgcaggtatattcaaaccttgggtatcacatgggatattgttgttaacgtccacctcacctacttcgggcccacctctgacattcgtactcccactaccacgcacactcctttgcatggtgttgtccgcgccatgcatcgtactaggacgagaaataccttcaccattcaaatttgccacctgtaccacctctttgtctttccccggcggtggatttgcctccttcttccgatgatcgtccgagaatcggcgtcagtgccctttgtttctcaagctcccacccttcaagttaacaccatccgagcttggtatgagttcacgacggaaggaagccatcgtaaaacaattcccaactggtccttcaaccttgagccaaggcccatacatctttacagccggcccttttgccgaagtcacccaagccgtaggagataaacactctctactcgagtgagctagatgaccgcagttaaaacacaaatacggaagcttttcgtatttgtattgaacccaggagtccggggtagcatccgccttcagaaaaaaaccagctggaaacgggtggctgatccagatatcaatccagcacctgagaaaaacctgtcggaccacctcctctctgctcttgcaatctgatttcaccaattgaccaactttttttgctaggatagggatgttattttccgaaagacatctcgtgggtaatccatggaactccagccaaaaccgagcaacttcgaactccgacgtacggacctccccttccacaggccatggtcgcaggttgagcaaaaccccattaactaaccatggtcgacgattcataacctttgtgcagtcatcctctgagtcaaagaaaaaacccaacaccccttcttcaaacgttttcatcttccagttcatttctaaattccaaacacccaaaagaatctttctcaccaccgaggctggcatagatttacaccccatcactttacccacgcacaccctattaaccacaatatcttccagggtaagatcttcaaaaagctccatcatctctatctcaagatcacagtccctttccaacagtttggaggccccagaatcgagttcggccacctccaccgtaactacagcacactcctccactatcgccatagcaaggaaatgataaatccaaagaaaaacgaagcctgagaggctgaaaacccaaataccaagtctacaaagagactgagaaataaataacgcgaagagaaaataccaactctaaactcaaatcaccaagtctactgagagactagacccatcacaaggccaaagaagagattattaagagaagctttagttctttcatttattaattaatgaacttgtaggactttttttcggttgtggtgtgcctcctaaactttaaaagtcattaaaaatgccccctgaactatcaaaattgttagatttaagaacttttttccaattttagtaaaaaagtctaacatggatgaaagttcgggggctataatttagtacatgtcgaagttcgaggggcatgatttggtaaatatcaaagtccgggaagcatggtttagtacataaacaatcaatgaaatagtaaaattaaatgaaattagaccaaagtccttaaatctaacaatctcaaaagttcatgaagtatttttaacgaccttaaaagttcagagagtatgatttggtacatgtcaaaatttaaagagtaaaaatcttaattagcctttataatatatagtaaaaaaacgaattaaaaaaattaataaaatatggcaagtcccactatcttaaattaatatatgtatttcaaaaaaaaaaaaatatattgaaagaagataattgttaaaataattaacagcattacgtagcttctaacttgtcgttagcactttttataactttccgtttattattttaacaattatcttttttcaataatatataacttataaatagtatccattaactttacataatcaacaccattaacttggggtacgagtatataaatatatatacttgattatttataattgttagatagttacattaattagagagatgttattaattattataaatgaaaatatgaaaatcaaatccagaatttatcaatatgcaccaacataatgaaatacattctaattttttttttttttaaaaaaaaaagaagtaaatgcactctttgtgatctcatttgttataacaagtctcatccaaattcgtactctactaaagtcctacacctcttttttttttgttcacttgatctatattggtaattgcattgttgaccttacatgtgtgccatttaagttgtttatgagaatttcataaacggttggctaatcaaatgattcctcaaaagaattttgttactagtggggtcttagtgtttgcttcctaccaaaatattggtggttcatgctacttacttaccatttctctatttgtgtttttcaaattaaattaaatagttgaaagtgattgtgattgtgattgacaaaaaaaataaattaaggttttatttatctattgattttatatttaagtggtgactcaccgaccttgtcgtttgtatgagaaaaggaagaagaatttaagtatgattaattagtaagtcaaattagtgatttagtgacataattaaagttgacccacatctattaccttttttttttttatatatatatttatttttggattttgttatatttacaaagatgaatacaatctccaatctaatacgccctatgactacaggtacgtacacccatggaggaggacaattacctctactactgtggaccaatgatagattccacctcaaactcaggttacaaaaagcatgagctcccaccactaaactactaatgtggtgttccatacctgtttaatttttcacacatcgtttttcagttaatgttgtaaactaggttgtttatcatttcaattttctagaggtgtgttgggaacagatttaagtagaacaacatttaaaatgtcatttacagtatcaagtgaggtgtcttagaaagagaattagattgaacaacatttaatacgttggaagagttgagtaactaatcattgacctcactatttttatcaaagttcaatgtcatcactttagaacactcttttgttgtggagttccagaagagattaattgggatacaattccaagttcatttaaatgatctttaagctatatatctaactatttttttgtgaatgagattgtatattcattactccattaataatttttgtacatcctataagcacctttaaatagaaggccttaattttatctatacaattgatatttacaaaagatgaaaccaatttatatcctcatgacttactttttttggcattacaagaattactctatttttgacaatccatttcagctactacatcagctcagaagaatgcatcctttttgaattccacatcaggtcatttctaacagcccaaattaggtatactaaggctgctattccagtcgattttacacatttcctaaacctggactacttggctctccttatccacttcagtagaccctgtagagtaccagctgtggtattccacttgaaccatgctttgacttgcaataagcgatcctgagagaaaggacaagtaaagaagagatgctctcctgtctcctctgcattattgtaaaaaatgcaggaagatgaatctgtaaccttgaatctgaacatcctatctcgagtttttaatctgtttagcatagcaatccatatcatgaaactatgctttggtgtgttaagccaggaccagacttcatcacacaaattaactctttcttgaacctgatcaaacaagcaataacctgctgcaattttatattcattaaccgtaaatacatctgtttgcaccagttgcctaactttatccttaatctctaccatttttctccaatactagctactttgggaaggagcattgtactcccaccagttgtgttgttttatgtacacaatatgtacccatttaacccataagttgtcttttttatttgtaattgcccaaacatgtttaaccatggttgcaacattccaaatagaagtgtttatcaagcctaggcccttaacttttttaggcttgcacaggctctcccaagctatgcatcctgcccctgccatcatatttctccatttctagagaaaacttctacaaacagcttctatctcattgatgtttttcttaggtagaatcatgatttaactccaatagatgtgtagtgttaataacaaagaattaatcagcactaatctaccaacaaatgatagatttctattgcttcatattctgatctttgctgtcattttttgcactagaataccacaatcagcagctgatattcttctagcacaaataggcacaccaaggtacttgaaaggttcattttgtcttgtgaatctagatatgtcaagcactcttctaactttcctctcatcttttccactacaaaacacaatggattttgctctatttggctgcaaaccaagtgcgtttgagaagagctttagaccctgcaacaacgaatatatactcttaaaacccccctgcagaatagcaaaacatcatctgcaaaactaagatgatttagcttcaattattcacatctttcatgatatccaaactctttcttctttcctactctaagcatgattctacttagatagacaaagagcaatggggacataggatctccttgccttgcctcaatcctctttgttcttcaaagaaaccatgcatagttccattgaacatgagagaaaatcttagagtttttacacagctcataatcagtttaatgaacttatctgggaactcaaaggctttcaacatctcttcttaaaaactcccattctattgtatcataagccttttacaagccaagcttgatcatgcaattggctttggatgtttttcttccataattcctgatcaaatcttggcatatcatgatattatgtgcaatgaatcgacctttaataaatcctccttgatttagtgatactagatcatgaaggatatttttaagtctagaataaataagtttggttgctattttgtaaagcacattaaaacacgatattggtctatagtcacttactttgttagggcatttgatctcaggattgagtgtaattactgttgaattgatttctttcagcaagttccataaatgaaggaaagagaaaatggcttcatagacatcattctcaagcaattcccagttgtcttggaagaagaaacttccaaacccatctggctcaagactcttgattccaggtatgctgaatactgcttgcttgacttcatctctagaaaaatccgccatcaacatctcagcttgaacctttattaacacatgcccctcttctataaccatagcctttacatgttgcctaccctgcacatttgttcccagcaatgccttgtagtaatctaaaaaagcttatgttacctcttttggatcattgattctctcccccctagcatcaataatagagaaaattctattctaaattctcctttctctaatgcttgaatgaaataatattgtatttgagtcacaatctttgatccaattcaccttggatttctgttgcataaatgaaacataagctttgtgattccctgcataatttcccctgggttcaggttcactagtttatgagatgtcaaggtgcaactaccagattacaagttgatcctgaaatagagaagacttgcagacagaacagaagaaggaaaagattagaaaaggctgcatagagattgagcacagcgtagtaatggctaacaacgccaacaatggcaacgatggaggagctgtagaagaccaggctaatggtcgcaacaacaatgacagtagcttgagggactatttgctgccaaacttgacaggggccagatcctgtataaggccacctgccgttgatgccaataattttgagatcaagccggccatactgcagatggtctaatcttcggtctagtttggggggcttccattagaagacccaacagaacttccaaaaacagtttcctaatcggcaacaacaaggatttatccacagaaaaatcaatctcagtaaagctaacagtatcaacaacatcaagactttagtggagggtctaattctcaattagacacttattgtaatttatgacagagattaagtcttccattatggtcttagaaactcaggtgggggcagttggcttctcaaaacactaacaaggctcaaggtaacttgcctagcactactgaagtcaatccaaaagagaactgtaaggcaattaccttgagaagtggtaagaactatgctgggccaaaccaagacaagccaaaggatgaagaaccagtaccaacacaaaaggagaagaagattactgacggtctttaacaaaaagaaactcca

SEQ ID NO: 224923 - DNA, 6745 bp, Cannabis indica
ccaatcaggcggtctcccttctgaggcaagggccttcaccgcactgtaagaatccgagagaatatgcacttgattccaacccctctcaactgcccaggaaacaacaagaagaatggctttgagctctgcttcaagagctgattgagccttatctttgcaagccttaacaaaccaggtaccttgtcttgtgtcaacaccaacagcagcaatcccactctcaccatttgaccaagacgcgtccgtgaacatgacatggtgagccattctccctcgggcctccccttccaaaaccaggtttccagatgggaccagatttgtagaagttgaaccccctccatcaacaaagttcttctccatgctgcacatatccactattgattttccaattcttgctatagcctggataggatctgcgaccatgtttctgatacagaaagaatttctttgctgccaaatttccgagaataaacagccacagaaatttaacagcttaaatctgttgaattctgaaaaggaaagaagcagattctccacaaaactaatcatagaattaccaggaatactgtctatccttaatggatatttcccacctaaccaaatagccttcgaaaaggcacaatctctaaacaggtgcaaggaattttcctccaacataccacataaacaacaagacttatctctgagaaaaggcaaccggtttctggttggaatcgcttcacttaaagatctccaaagcatcacagaatttcttgggtgaatttgaccattccaaatccacttccaaataatttttcatggggcgaatctccaagattggtccactaaataagctgctttgacagagaattggcccttttgattgtttttccagaaaacctgatccggaaaaggatgaggaattctaggaatattaagaacacaatgtcccatatcagggccaaaaatctgcataacaatctcctcattccaatcatttccaattgacacatctgctagattggtaatagtaaatcttctacctcttaactgatgcataaattctacaaattcttgatattctagattggtaatagtaaatcatttccaagggatccatggttgagtcaagaaattgatcgattcacccgaggctgcaatcgacatggatccctttcgaatagtttccctagcctccaggatgtttctccattgtgtcgaatcactactcttggccttaacactccagaagtcctcaaacttgcaatacttcttcagaagacacgaaacccacggaagctttaggagaacaaatgttatcctaggccttgagagctaagaatctatctttgttaacatttcctatccaacaatatttcctcatcaaagcatctagttgacgacaagtagaaatagggattttgctagtggacatggcatagatcgacattgaagaaacaacagacttcaagagaactaacctcccggcatacgatagcaatttcattttccaaccatccagcttactcatcaagctgtctttgagtctcttataatccgcaactcttcttcttttgaaaatgaaagggtttcccaaatgtttttcatctccattaacttgagtgatcttgagaaccctaagaactgtgtcttttcttccaacattcaggttctttgaaaaaagcaccccaaacttagctttgctgcacgtttgcccagacaaagactcgtacgaagaaaggcaattgatgatcacttcagcctcctttacattagctcttgcaaagagaatagtatcatcagcgaacatgaggtgagagattggaggagctgagtgagaaatcttaattccatgaatcagaccttcattctctgccttaagaagaattctcgagagcacatcttgacaaagaatgaataaaaagggagatagaggatccccttgtctcaaccctctcttaggcatcaatttttcagaggtaccccattcaacaggacagaataagagacagaactcacacgggacatcagaagttgagtacatttatcattgaaaccattagctcttaagaccttttcaagaaaaccccactccattctatcgtaagccttgtgcatgtctaatttaattgccatcagacttccaatgccctttttgcgctgaattttatgaatcaattcttgcgtgaggatggaagattcagctatccatcttcctcttatgaaggccgactggaacggggcaactaattcctccatgagaggactcaaacgattggacaatatctttgcaataatcttatgggagaaattgcaaaggcttatcggacggaattgatccacactcattggaaaatccaccttaggaataagacatatgaaggtattattgattctaggatcaatagtaccaagatgaaaagcttctttaactgtagcacaaaggcaagcgcccactatatccctatactttctgaaaaaacaccccgagaatccatcaggcccaggagctttcaaaggatgaagatcgaacaccacactcttgatttcttcatcagttgggattttggctatgtcttcattagcttggcagggaactcgcttcatgactaattcatcaagactaaactcttcggggggcatggaagaagagaaaagatccaaaaattgagtatttatgacccttgcaatgttgcttctatctttccaaattcttccctccttatctcaaattgcccagatattatttttccttcttctcaccacggtagtagtatgaaagtatctggtatttcgatcgcctagagcaagccatgtttccctcgatctttgtttccacatgctctcttgtttagcccaagagaccgacaactgagaatgaagtctagcctcctcttttttaagagtatcggttattggttggttttgaatccattcaattcttttctccaattttttaaagtccgcttcattgaccccttgtaactgtttcttccaagtttgaagagcccttctggtgttactgacatttttgatcagtgaagaagtagcgtttgcaccagaattacaccaggccttcactatttctgccttacaggtagtctcccaagtccatgctttaaagaaacggaatggaatgtaaccttttgccgcaaaaaggtgtgtgtccaaaatgatgggagcatgatccgagaacacgattggcaaattaattactcccgctttatcatattcagttaaccaatccgcagaacatactgcacgatccagccgctccctgatcaaacctcccgtgaaccttttgttttgccacgaaaatttattgccaatgaatctaagatccacactacccgtgttgtcaagaaagttacccaaccactttgtatcagttgaagtgactttgcaaccacctaatttctcctcctgattgagaatacaattaagatccccaattagcacccaaggaatttcacaagataacacctctacctctaaactactccagaagggttctttgacattaccatatggagttccatatacagcatacaatttccaatattggtggattcggaaaccataacgtagccacaaagaaaccatccaaggcatgattaactatcaaattaatacttctattccacatcaaacacgacccacccgccaaaccatttgcaccaaaacacactatctcagtaaaacccaaagtttgagccaaatcttccattcttcttttattcactttcgtttccatcaagaaaatacaatccagcttatattttcttacccaagcccgtaaagcttgggatgtcgggtcccttgcgaggccccgaaaattccacgagaggcacttcatggggccgttgggggcttgataagggccgcctcctcgcccatagttaaatcgtgggaacattccacttgaacctccactagattcaaggaatcaataaggtttttctgagttagatcgtcttatgatgaagctagctgttgtatgttgttttgctttgctccagagagctttgatcgagagccttttttccttcttttatcgttcttcacagatgaagaagaagcactagatcccatcttaaatggggtgtccaaggaagacgagaaaggtggcagatgaggcacctcaaaggaaaattccatggtattttcttccaggtgttggacgaatgggactaaggtaagacttgcctttcgttttttctgttgtgggcaggggtgaatgagctttgtaacgtcttctgggtcatgaaagatagttgggattggttcaaatttgtcaacttggggagggcccatcaactcctcagttagaccaactttctcagcataaatgggccaagggaagtgggtgggctcagggtgtttatggggctgtctagaattacataattgggcatggggcttttcaatcatctgattataagtgggcccaatattggccataatggtagtaaggatgccattatcagcagggtttggagggggtctagaggtaaacttattaagaatatcagcctcagataaaaaacaagaattaccttttttatgaaaccgcaatcctctaggagagactgaacgagtcttcctctccctaatatagcttctcgaatgaggagaatcaacagccaaacccttgcctttctcccttgaataaacggcttgactctccacaactttcaaatttttccccaaaatagctcctggacccttttcatttactctgatcaccttcctaactggtttgtatttcagagttgcatcactgccgtctgtcgctttgaggttatcagtgatcagtccaattcctttgtcattggattgagagcccttttctgaccgttgcatcaccggagtagagctcctgaaaacattttccatctgttgcctcaccggagtagagtttctggtagcatcttccctgaagaaatccagttgattcctagtgttaaaatagctatacaccgccaattccactctcatccatggaccataagcagggactgctgccccttggggaggataagcaaaagccgtggatctgaaacaggtcttcttgtcatgcccaagatagccacatttataacagagttttgggagtttaaaatatctaaattggatccactcctttcttcccctttttatatcaaggaaaaaactagaaattaactggtgagatgtgtcaatctcaacctgaaactttaaaaatccccgcctaacaacggtcttagtctcggccaaatctccacggacaaacttaccagctttggaggctatcgtacgagtattaaccccattcagatacggggtaggaaggcccgaggccatcacccaaaagactgctaaacccatgtcaacattataccaatcaccatcttctggccattcacgaatgaccagaagttttccgttaattatccatggtctgtttcgaagtatttctctacaatcttcttgcttatcgaaaaaaataccccacaccccctgctttagagttttgaacttccaatgtcccttgagcttccatatttggttcaaaatgtccttaagtctggcttttgaaacccctttgccaccaaagaaactgactaacacgccagacctaaccacctctgcagtgagttcaaaatcaggttcaagttctagagtcatagactccaaaaagttgttgcgaagagtttccaatgcatcaacaggttcctggactggtacagacgatgaaatatctccaccccacccaaccccaaaaagcctgcatcagatggattattatgactgtcggggtggggggggggtgggttgagaatcttcaataatcgcatttactactgggaccccgtcgtcgagaggagaccccacttccataccttcatgtgaactctcaactctgtctcccatgctaagaccaacacacttaactaacaaaaggaataaactttaatacagtaaagacaactgaaagatgcaacctttaagagtagaaaagtgaaaaatggattaaggagaagacatattgtcaagttggacttccaaccctctcaaggatacgagagaaaaaccaaagaggctatagtttgaagcagtgaacctactaaggataaagatgaattaaagagctttccaccttaaggtcaagttggtcttcgtttggcaaagtcgaattcgattgatcacttgaaattcgttcacttgtcagagagccaccttagcattcttacatgtatctcatctctttagctttgacattagtgaatgtaaaaaaaaaaattaattaaatttattatgatctctatgaaagattaatgcgaagataattcattgagagtatttatcgaaaaatttacataaaatattatttttgacaaaattttaatatttttatagtcaaatatttttttcgcacatttttacaattttacggttttttaattttttaatttacaattttatgttgttttataaaaataagaaaaaatatgaaaataataaaaaaataacaataaacaacatacaaataataagaaaacataaaattactatggaaaaataacaagaatatccctaaactcacaagaacaaatactaatcgtaccaaagtgggactccaaactaaattttggaagcaaaaacttctaaacttcaaattctgttgtggtttctaaactttcttactatttttgttaggggtacgatgtgctaaatgtcaacttgtcttactaactgtgtacattaacgtatacatgagatattttta

SEQ ID NO: 224924 - DNA, 1266 bp, Cannabis indica
ttttatttagggcataaaattcaacactttcccccttccggggtcacgaggcctagaatcattagacttgtaagaagaatcccgtggaggagatcagtttcttctgttgtttggatttctccaagcagggttgcagttggtcttgtcagcggcaggtggtggccctgtaggcccacgttctcgagtctgagtcctctcaaatactcactcataaaccgcttccctaacacaccactccacatcaggtggagggccagtttgagtcctttcggacgctcactcgtagtttacattccttcggggatcctcagtacttgctgcatgttgagcagtacaactaccaagattggtagaagtaccacgtgcatgaagggttttcccttgtgtgcttgctcccacgtggcgagttggcacatgagggttctttccagccctagttgaagcaacacttgaaggagtcacttcgttatcggatctataggattcccaaattcgttgagcaagatttgctcttcactactcttgtttagtacattgattttcaacgtttatccaatgttccatgaactaggtttgaaactgttcatgttgcttgtcgagagtatctcgcagctattgttccaagctagccactatatggctaagttgttcaaccagaggatcagcctccttgtggtcttctaactccactcgtggctcttcaagtggaatttggtcactggttttaatgccaacatttgctggccttaggggacgagttgtggagctgattatgaggcctccacctggcatctgggatgcaggcgtcgtcatgttaccagctccagtgactggcgtgcccccagtgggttggccagctgttatgcttctttcaacacttgttaatcttgttacaaccatcttgattgggatctcgagttgtggctctcaaagaaagcaccaaaatattgacacaaaaatttggacatagaaatctggccacacctgctcactagattagaaagaatgtaatcagagttaagtataagtaagagagacacaaaaaatttatagtaattcactccccgtcatgtgacggttatagagctacatctactttgagttgttatttctcacgagaattataagaagctggctaagtgtggggcttgaatagagagataaattagagagagatgctctaaccttatggggacttagaggaatgtgtaaaatgaactcgaagatctctccttttataggaaaggaggtccatttaaataataa

SEQ ID NO: 224925 - DNA, 3246 bp, Cannabis indica
ctccgctcaagtacagagcattgattaggtaccagtaatgtttaaactttttagatatgtcgttttgcgattgactaacaatactctttaaaaattattacatttaaaatatatgaaattaatacttagtttgaccaataacaataccactagtgcctattataatattattaaactgatatgctgcattttatcaactaagcatacatctactttaaccgtagaaaacctaccattatttggccattgaatttacaatgaagggttcagaaagtttccccatcggtaggaaatttatgaggcaaacctataaatttatacatatataaatataaatataatctactgtcctcgtgccttttattctagcagctctatatcaagaatttactgtactacttgtaatatacaagtagattgaaagagggacttcatctaagctcttatggtataaatatatgcatttaacttgtattattataacaaattactaaattgtgtccttgaagcaaggtagtactgaggtaccttctctttaggatcatgctaaatgactagtaacaaaagaaaaagaaagatgaaatttgtttctagttgtgttgttttgggtatcaattaaatagtgtaactatatagatcaatattcttaacgacatacaaatattacattgcagacatatttggcggaggtgcttgttaacacatatttaaagtaatgaagagatttaacaaaagttaagagctaaaaatggcatctttatgctatttgaaagacttaccttttaatttctctctaattgcaacttggctgttatataacacttcaacaaaagcagaagtctgaggcaatttacacagacttggtagtataatctgagtgtcacacaagtcttccaaaagaacaagccccagtccttctctagcataaggattcttttcgaagaagaaacttcttggtttgccttcccttgcacaatgcaaatggccacttagccaaatcagaaattgcccgatacattatatatatattcctatattaccaagtaagctttacacatcttatgaaaaatttctcttgggatatacaagcagagtcatgttttcttcatgcctaatcgcaatccacggctccactacaaggtcaagttttgcataggctgctatgatcaacatgtcctcaggagctttggcgtccacatgcgagaaaaccagccattttctccacccttcgcatcagaaattgtccttttgttcttggtttcctcatctctaacagattccatcgacgccattttcaattgaagtggcggactccctggcctcgagggtgtttcagctattttattgaccatttccaacacttcactcatttttggccggttctttggcagtctgaccaaacagcggttggctataagtgcaagcttttgtaccgacttgagtgagcatttcttttgcagccttgggtctattatgagctggaatttttttatgtctgataggtgaggcttcacccattccagcagcttctgctcaccctttgggcggtttctatctataggccgcctacctgtgatgagttcgtaaagaaagacaccgtagctccatacatcgctcttgtatgtgagacgcccggtctggatatactcgggtgctgcatatcccatggttccaacaacctaatgaatatcagtaatttgagatggtaagtcatatgtgagagatggtagttttgtgcagcaaagcccaagtatggtttcaaatatccatttgctagagttgaagaataacttgcaaactataaattatagagaaaatagctccaactaataatgatgtacaaatctacaaagtatagtcaaggaagaaagtgtttcatttagccaattagcttgccatctagttctggcatgtattgtaggcctcagtttcatgtgaactttaatttcaataataaaattgggaaatccaattcttatatttatgtatttcaaaaatatgaaagatataaaaaaaaaaaattatagctttgtatccaacttgttttctcataatttattgttggacaaggatcaaactcattcctttttctatcttttttcacttaatacttttaattcaatcctatccagcccaaaacaaatttagagtaaaatgtctaaactataggcgaatagattagctcgatagtacgggagggatgggagcaaagaagtttgtcaagttcaaacttggaacctccatatttcaagtgagcagtaagtgttcccacactatatatataagtactcgcataaagtcatacgcattagcattagataaatgcataccgctgtggagacatgagtcaacccttcggttggccctagccttgccattccaaagtctgatagtttggcattccactgctcgtcgagaaggatatttgaagatttaaaatcgcggaagatgatctataataagcacgtattatcacatttgtgaatgtcatgaggaataacaatagtgataaaaatatctcttacatttgcttaggaaattaatgaacaagcttaaaatttaacatagcaaagtattggaatggaaacataagtaagctacctgaaagtccatttcttcatgtagatgtgccaagccacgagcagcgtcctgagctattttcaatctcatggcccatggaagcggtgtctctgaacgagcagataagtgtccttccacacttccattaggcatgaattcatatatcagaagacgttgaattcctctttcatcatcctcggcgcaatagccaactaatttgacaagattgggatgctccacaaccccaaggacatttacttctgtcacccactccttgtgcccctgccatagaaagaaaaatgaatctttataattccaacacagttgaagcaaagtcctactctttgcaaacaaaaacagagttccttattcagcaatataagccagaacaacaatctataactgagctattgtgaaatggatgcttaaatcaaacacaaacaaccaacaacaacaaaatctactagaaagatatcaggtgtaaagattacacccgacatctaaggcatacttcgttcggataaacaatcctacatgataggcaagaatggaatcctagtcaaatctactagaacaatattagaggttaactttttttctgcaattcactcgaaacgccttgtacaagatcactctcaaatcataaaaataaatcatacaaaactc

SEQ ID NO: 224926 - DNA, 2081 bp, Cannabis indica
tttttaataaaaaagaaataaaaacataccaaaaacaagttctatgccgtcaagagtttttagaaaggggttgtcgtttatttcctcgaaaggaaaagcgaatgtcgtttacagaaaaacgacaaatttgaaaggcagaggacaaagatatctgaaaatttcccctaggtattaaaataatgttcccttccaataaatatcagtcctaaactcaagcacacccatctgtactccatttctcttcatttcttcctctctttctctcaacctcgaacctccaaggcccaaaactcagtctcagactcaccgcctctccgatccctcctcgtcttggtttatgaggttatttcttcacccttcgatttccgctttcaatctggtttgatttaggcctttaatttttcgttcttcgtcgcagatctggttctgtagttttacgtaacttttctttcaaagtttttctctttttgattggagggtatttaggttttgaatttacatgatgggtttgtttggttttgagttttttgattgatcttgtacggtttagctttattgcggtgagtttttatggtattttataagttattaaagaaaaaccttcataattgctctgtagaaaattaaaaagggggaaattttgattgatgttttcttgttttcccctttgttgcgatccatctttctctcaagtgcatatttaatttaggtcggaagttgatgtttgaaactttattttgcttgggtgtctttcacttataactggacagtcattttttctttctcctgtgggtttcgtgtttcttgattattttatcatcaatttggtgcaatcttcattctttttaattaacttttgatttttttatttggttgacctaaataataactaaatctttgtctttttttaacgtgcagctcgaaggagagacccactctcgggtaagttttcaccgtgttttcatttctttacaacattattattgttttagctattgaagttgtaagctttattgcatgtttaatttattttcatgaatctgtctgtatacagtggtacgcggattaagacccgcaaacggaacatagcagcgcctctggaccctgcagcttttgcggatgcagtggtccagatttatttggataatgctggtgatctggtaagtatcttatgcacttattgaatttcagcaagtatctgtgagcttttatgctgtgacattttgttatcttggttaacaacatcagcaagttttttccatatgcaggaagctattgccaagagcatcgaatcttcagaccttaacttctctagatacggtgacaccttttttgaggcaagtatctttgtgattcactggtttcttattgtattatttgtctatcttggtctacagctccattaagaactatgatagggcattataatgtgatttgcgcatagtttgtttataaataggtaacataaattttgcaaaagtgaaatatcatatttgattgagttggaaatagggctcaagtttatttagaaatgctggcaagtttaatttttggcatatctttaaacacttgaagtttattggttgatgtactttattgaactggcagtattatgtgactcggttaattttttactttgtatacaatcaattcaggtgattttcactgggggtcggacacaacctggaacaacaaaacctgatgagggggagcgtcacccgtactctatattagattatgaggccacacgtgaagtcattttaccatctgttatctacatacagaaaattctgagacggaggccatttctcattaaaaaccttgaaaatgtcatgcgaaagttcctccagtccttggagctttttgaggaaaatgaaaggaagaagctggcaatttttactgcccttgcattctctcagaagctatctggtcttccaccggagactgtgtttcagccactactcaaggacaatcttgttggcaaagggctagtcctttcatttattactgactttttcaaggagtaccttgttgataatagcctcgatgatttgattgcaattttgaaacgaggtaaagtg

SEQ ID NO: 224927 - DNA, 5768 bp, Cannabis indica
aacctaaaccctattaaaaaaaaaaaataaaaaaaaaaaaaaaactgcagctacattaatccaaaaaaaaaacatgaattctgtttcaatcattggatcgtgaatactttatgttttctcttcaaataggtttgtgtgacagttagagtacaaaactcaaacttagtcaattttttattgttgttcatcaaaatcaccaccaatataatgtatctacttcaaggagaagatgactactcacaatcttccctattggaaagcttccaaatatactaaagcagatgattccatctttgtctccactgcaaagaatattaaagcgttgttgcgaagaacttgacaggtcttgaaatgaatcttcactatcatccatgaagccagcatctccagagaccaatccttgtatccgaggaactcttggagctggtgggaagaagcgagaagtacgatcttcatatgtcgacatgctaccaatatcatcctaaaatccaagtaagaaaaaaagtaggattgcaatgagagtattgttaggaaataaatataattattccagcaaagagtttttttttaaaaaaatatttctcaaaatagtgataaatatttgagttttagcagacacaatgagatagtgttaatcatgaaaattatagaagcatactctaatctgctgtccatcctcctcccagtttagacaaacaacagcaacattatgggattttaagcttctaagtagttttccattctgtttgacattgacaaaagaaacataccaataagaacatcacaaatacagagcaattaaagggaaatacgtagctgaaattcatgcatgtattatttgcatgaaaaataatttttagattttaacagaactatgacattgataaaatatgctaggacagggatctgaagcttggtcttgattagtcaaaatataccataagcatccaagaaacaacatcatcaagtgactaaaagcttctaccacataactataaacaatacatggctcagccttccaatatctaatgtaaagcctactgacagaacagagccacagataattttcctataccaaatgcatcactttcaaatacaaattttggcaaatgcaatttataaagcagtcatattaaaaattggtacgttgataagtaaccaagcaatacatatatatttattctactcacttcgacatcatgcaatgaaacagttccatcttcaagcccaacggcgatcgctttaccatcaggtcgccagcataaagatgttatacaccttcctataaaaattttagagggaaaaactttaggctaagaacaaaagcaaatgctcaaccagacacacaatatgaagctaagagacttctaataatgaataaatagatgagcaaccaatttctacaaaacctgctccaatgagaataagaaataaaattgagttaaaaaaaaatggtgacccccaagccaagaaggaaaagatagagacgaatattcaccaggtgagatggtccacaatctctgccaattgaaacgatgcagcaaaagcttggagtcctctgtgaccatcgccagtaagtctttctctggattccattccgctaatacagtctatcattccataattcaatgaagagtatagatacaatgtcacgcacaatatatacacacagaaatatatacttgactgtaaacctaagaaaaacccaaacctgagaggcgagcggtttatcaaactgcaactgaaagggaagccctcgctgagactcgtccatttccatttttaagcttgatcgatatatgaaactagagtgaaataacacaacaaaaaattgacaatcacatattaaaaactaaaagtttctaaccacaactataccctaaccctgaaatgaaacaaaaaccgcgaaagtatgactgtaaacgatgcaatttctgaatgacagaaagcggaaagtagaatttgtcagaataaaggcggaatttataagtagctcggtggaatggagcgcaaaattaaataatgttttctctttgattttagtacaaaatgtctaaagacttcatttacctgtttggttgtaggtttgttgagaataggggccgaggacgagtggccggtggaggaactctcggagcctgaggtaatgtgctcagaagaagaaaaacactgtagtttagagagggaggagagagaggttaatcttcagctgtgtctgtgtgtgtggactgtggactgtggagttggtgtgaagaacaaggcagtgcttgctgataggaaaaatatgactaaatcacttcctacaaagaaccggatatcttcaccctagctggcaatacaaatttactctacaattttcttgaaaagacgatacgccattgattattgattacagataagagaggaaaggatgaagatgaaccagaaaagaatggcaaagttgaaaattttagaatgcaaacggcgtggagctcaaactcaaactcagtaactcgttcgtcatgttttgcgggaaaacacttaaaaaaaaataataataataattgaaaaaaatgtacatcaaaaatatatacgccgttgccggggatcgaacccgggtcacccgcgtgacaggcgggaatacttaccactatactacaacgaccttgttgaaatgtttcagaaatttaagttaatatagattaaattttaatagacttaaatgaaaaatggattaaagggagcaaagcttccccaaaagaattgagaagaaagcaggcccaaagtcccgcctgaaaaaaacatcagcgaagggggcagttctcgcattttggcggtaacagctgtgacctttttctctatcttctccgtttgaactatggttgaagaagattgtgaatcagagcaaccaagtttgcccaatattacagatgaccccaccaaccaagaggaaccttaccagtggcctgtcattcgcttcgatattcctccctacagaacccaccacttcttccaccagttcagaactggtccaaaccctaataacttcctcaagagcgtcaaatggtatttgtttttccacacacactctcattctctttttcaaacttttggattttttatttttattagttattattcgtttatggtttctgtgcaggtccccagatggttcatgttttctaaccaactcagaggacaatactttccgtacctttatgttgtatgtatcatatttacttatttttatgtattcattattctacaacgactaatcttcaatgtttagtgatctcattttggttttgttttgttctttggtacaatttctaattacagaccagaaaatgggaatgattatctcgacgactcttctgtaaatgatggagggggtaaggttaaatcaatgggtattcataacttttcttcaaattttagtaatggaggataatagtttgcttggtctgtttagtaagtgaattttattcatctaagctcgatatattgtatattactgactttctttgtcatatagatactaagagttgtctcttaagttgcagattcgtatgctgcaaaccttgttgtgaatgaaggagaatctgtgtatgacttttgttggtacccctacatgtctgcttcaggtgcttatgaagctttttcactaccaaagttttgttattattgtcctattagtataaaaaatgctaagcttaaaacttaagtcaggaaaagtaaatttcacttttactgcattaacaagtgatctttttcaaagtctgattttaaagatttgttaatatttcagacccagtgaccaatgtttttgccagtacaagtcgtgatcatcctattcatctttgggatgcttcttccggagaggttcttactcattgtctagtcttctcttcaaatttctctgtttggtatttatgtgatgtttttagtaataaaattgtattacgactttctatttattacagcctagttaatgtatgatttagttgactggtctttgatgtaatgattagagcaattctaatgataagtagtctcaaaataattatgtgaattctgcataatggcagctacgttgtacatatcgtgcttatgatgctatggatgaaataacagctgccttttcaattgcattcaatccctttggaacaaagtaagattttcttccttgtgcaggtgttgttggtcttttggaaattctttacttactttaccaataatgtttgtaggatatttgcgggatacaacaaatctgttcgggtgtttgatttacatcgccctggtagagaatttaaacagttttcaacacttcaaggaaacaaagagggccaaacaggttaaccttttttattttttttaaaagataaggtctgctatgctaagaattgtgttgataaagagaacacttatttttatctgcattgatttacaggcatattatctgcaatggctttctgtccaactcattctggaatgttagctatcggttcttacagccagaccactggaatatatagagaagacaatatggaactcttatatgtattgcacggccaagaaggtgggattacacatgtaagttggcatcccttcattcattcgacgttaaaatagatagacatgaaggcaaccattatattgttttcctttcagattcaattttctaaggatggaaattatttatacactggaggacgtaaggtacctatattaattttttgtacgtgattcattatttttatgcaattaacattttaggcttttaaataccttgaaggatccttatattctgtgctgggatatgcgcaaagctgttgatgttgtgtacaagtaagtttttaggctttgaaaaatatatatgttttatttagttgggacagaccacgttttcattaatggtttctctttattaatagtattatattgcaaagttcattgaccttataagttgtaaatgctttcttgcacatgcataaatttctagtcttttgactacatctgtatactcttaaacacaagcaggattggaaatcttcaatcttatttcttggagttgcttttcatctttggatccgtaatttttcttctcagttataccagaaagggtgcatgggaaagtccgtgactattcctagttattagtgactttaccccttcaattttaagattattcttttcttgacaggacaaagattatacagtttgcgaaaccaagtatccacttttttgaagcggcttatggtgtcattgattgttacaacaccagaggaacttaattcatttataatatgtataattgaagttgcaagtactgaccattcattgtgtgaatgcatatcatgatttcttctaaacaaaatccatggcattctctcctaactgacatgcttactgatttttctccagcttttttattttacttaggggttaagccatttattagtatgaccctctacattactaacttactacacatcataaaaatcaatgtacggctctcattttgtttggacctacttataggctatatagatcatcagaatacaccaaccagcggatatcatttgatatcgaaccacaaggccagcatcttggtacaggtggtcaggcaagcatcataacttttatattgctaagtatttttggatttgggctatgattaattgatgaattacactttttagctgtaattttattccaccataccatcttactctcaagtttctttgggctatacccttgacacattttttagcatggctatttcccag

SEQ ID NO: 224928 - DNA, 2902 bp, Cannabis indica
aacagtaaaatatagctcactcatatttatatatataaatgattagtgacgtggcataggcggaacaagttcagctctgtaaaaggcgtgactgaatcgttaccctatatatatagaatatattggacatattaatatggtaattaaaattttaaaacttgttatttaagttattaaatattaaaatttgggttaaagcgtgcgaattcactccatgggaaggagaaagaaaaaactttagaagcttgagatttagaccatcggctttgtctcaactgattaggagctccctttgatccagaaaaatgtggaagaaccaagttagattgggggttttcatgatactcgaaattggggatagattgggggttttcatgatactcgaaattggggatagatttggggctaccaaatgagattgatctgaatcgatttgggatttgatcttgggagaggaggttgaggcaaaggacttcaaatcattagtaaaggaagtttggaccaaatttaaggctaattaggttaggacacctactaaacttaattttattgaaccaattaaacatggtgattagttaattgctaaaatagatgtggatgaggttgaagctgaggcttcattttgcaaaagcttggtcataagtgttgtttttagagctaatcccccgtttcgtgtgtttgagggcttcatcaaacagaagtggggaaatctgggagttgatcgcattgtgagaatgcacttcggtttcactctagttagctttagagatgaagctaccaaggatcttgtgctggaaattgtggttgtccactttgaataaaaaaaaaaccaatggtaattagatcgtgctcatttgatcttgattccctcaagcttgttaaatttgttcttgtccctggatttgcttgaatggtttgggattgcaatattggggtagagatactctcattgcccttgtgagtactattggcaatctgattatgactgacaaggtaacaagtgaacattcgatggtaaatttgctcgggtgcttgttgaagtgcctatcttagataagcctctacttaacattaatttcttcaatgagagaggacaaatttgaaggatcatgttatcgaatatgaatggcttcccacaacctgtgcaacctgtggtctcttggggcataatgtcagtttatgtgccaaagataaaggcttaatttgggtgaagaaaactaaaatagatcatggaaaggaaaaggttgatgttagtaagctggttaaggatgaggatacgtatagacttctaatattaagtaggaaatctaacccccatcgcttcaagtctcaattgggcatattgccatggactaatggctgtttcttggattgacgtctgaccctacaaacaaccatgagtgtttccagcgtgctttgtcctcacttgcacgctccttgggtgaatttcccaggaggtcacccatctcaagattactccaagtcaagaacacttaactttggagttcttaagggatgggtacctcctgagaagtttacttagggagtgtacgagttaggacaaagtacgctagaaacactcgtgattgtttgtagggtaagtcgttaatccagaaagcaatcagagtgacatacccgtgtataagagccattagctcacgagtactccgtgtgcagtaaaggcaaaaccaagcagtgaggatggagagctcgaggcataaacttcatgttaggaaattgtcactgtgttttggtttaaaaatatttcgttaaaaattatgactcaattagttttgtagaagttaatattttaaagtttataaatgaatcaagtgttttgttttaaaactatgagatctcatgctttgtttatttttaataaattagtttatcatctttttataaatgcttttaaatggacaatcgagtgtgacgtctcgggaaagggatgagtgacctcctgaaaagcttacccaaggagcgtgcgagtgaggacaaagcacgataaaaatactagtggttgtttgtagggttagtcattaatccaagaagcaaccaaagtgatgtacccgtgtataagagccattagttcgtgggagtatgccataatggaggcttaaagcaggggcgttaaaatggtattaaagccttgacccaaccaaaagtgtggtcaacgaggacgttaaaccccgtgagggggtgattgtgacagtcagtagtcatgtgatctgtaaggggaaatactgagtaagctatgcaatcccacattgcctgaggaaggtcaagtgtgataattcttagactatgtaggtataggaatacatagctgaagagggcttatatggattgacaggtactacctatatcaatgaggtgcatcttgttttgtaatagcctatccattaagaattctaatgtaaagaccacttaactttaatttagaaattagcagataaatagggtttattcatgaaacttgcatattagttatgaattattatttttcgaagatttatttgaattcaaaaagcattttatatgtcatacatagaatttcatgtttttgtatgttttatgcccgacaatattggaacgcggcgtttggttattagaatcaaattttagtatttttagtatagcgggacaatatagttagacatttagaatgtcgagaatagttgatatgttaaaattgaccagactacccctaagtgattttatgacttttggtgtaggcaagagcattatggtctttttgtcctttagtgagattttatttgattattaatatgattttttttggctgatattaagttgataaaaccaattttatttttatttttaaggattaaaagaaaaacacaaaaaaaatcacattttctctctcttcaactctctctct

SEQ ID NO: 224929 - DNA, 3091 bp, Cannabis indica
atccttgattataacttccagtactgtttttaatacgaaatttatagctggtagtaaaacaccgattctgctatgaagatggaattcgatctcaatagaatataataaattatcatggggtgaaatgtttaattgtcctctttattttttatataactgattagtttgataaaaaagttcatgcatttagcatggtcaaaatttataaaaaagttgtgtaatttaattttccgtaaatcttcttattatctttttctttcactcagggataattttgtagtttgttgacattttgttttgtataaaaactcatcaaattacaaattcgtattggtttgtaaattcaaaagagcatatttgttatttatgaaaacataaagggataaattgagcattttaccaaaacttccattcataccttctgtaaagcataagaggacattataatgaacaaagtcaaagtttgaagatagagatgtttaaattttaaaatagtgagttgtagaggttgataatttcaaactaggtttaggtttagagatattttaaggccatccgaaagtgagccctttgttgcacttgcatagcaatataattcctttaactattataatgataattatttcatgtcgttggctttaagcattgcaatattatagcctatgatcttgtaaaaattattttattttagaccatgttatgttttagtggccgagtcttcagagctttttgtgagtcttacactcatttcttggctgttggcctataattattaggtaaatttcctttttaaggtttaataaaaaaagtgcggttggaatctcttggcttaaaatattaaacactttcgtagtttaatgcataatcaaaagccaaaaataattaaaaaaacaaaatagagaaagaaacaatgctacttaaatcaatagaagcaaaggaatatcccatatgatttgtcatttaaatcaatttaaaatcccattgtctttcaaaaaaaaaaaaaaagaaattaaacaaacacaacaaaatattgcttactagggcagtagccaccatggtttgtttttctcttgttctttctaactcattgcttggccaaatttgatatgttttttcttcaagataaggaatcttaataacttatgtctttttcatatgattagtttatgaaaagcatggtagtggactagtagtttttaattcttttttatactttatggctcatttcaatggaagagtctagtagaataattggattgggtgagctaaaacgaaaacaaccaccactctattttcattccttttatgttcctattttgaaggaaaatagcacatggtaatatgtcaaaggctcccaaatatcaaaatattgtaaaaaaattgactcaaactatgactttcaaaatcttgaaggtaaaccatggcaatcttgtgaagctagaagggttcagcatagaccctttaaacgccacctgttatctgatctatgaatttgttgaaaatggctctgtgtattcatggctgcaagaaaatgagaatgaaaaattgaactggaaaacaaggttaagaatcgctgttgatgttgcgaacggcctgcagtacattcacgagcacactaggcctcgagtcgtgcacaaagacatcaagagcaccaacattcttttggatgccaacatgagagccaagatagccaattttgggctagcaaagtcaggctgcaatgccataacaatgcacatagttggaacacaaggctacattgcacctgagtatcttagtgatggaattgtgtccaccaaaatggatgtgtttgcctttggtgtcattttgcttgagctgatctcgggtaaggaggtcattgacgatgaaggcaatgtcttgtgggcgaaggccgctcaaattttggagggaaatgaggaacataaggcgaataaactgtgtggttggatggatgaagctcttcgcgaagaatcatactggatggagagcatgatgagtgttatgtctgttgctgttgcttgcttgcataaagatccatcaaagaggcctagcatggtggatattgtttatgccttatgcaagagtgatgatctattctatgatatctcagatgacactttatctggttcccaaattactgcaagataagtggaaattgtactgatattgtaaacaacaagaattaacataagaatggagaaaaaaaaatcactttttgggcccttttagaaatctttgtaaagcatagtgaaaatcagcagttaaaaatagtttgatatatcatatcaaacttttttcttgtatttgaaatcatgtaaaattatattagttttaaccttactttcaaattctattctttttttttttaattaaatgtccttaaatcattctgtttagtaaataagcttgcagggtcatgttcttttttccattattatcatcttaacttattcttttggctcttatcattttaactgaagatatttttcttaagttgggggtattgttcaattataaccttcattctttctctatatatcttccattcttgtggtggagattttctcaataaatattttctatatgtacatatggaacactcttgtatgagtaatattatatatcataattaattaaatatataaatgaagacaataaaattatatacatatataataaaatagaaattactaattaaatattatttaaaataaatagtatatcatacaattaaaatatataaaataatgattaaacatatgtagcatgtcaataaaattatatacatacattaaatttttttttattatgctaataaaattatatactattattatacgtaacaaataaaaataaatatcatataagaataattatatatcatacaataaaatagaaatatactgtacaataaaatttatataccaataacccacaacaactcataaaaaattaaaaaaatagacataactttcaaataaaaaatatttaacaactaatatagatatattataaactttaagtaatttacttcctaattctaaataaaattattaattttttatgttacaaaaaataatataaataataa

SEQ ID NO: 224930 - DNA, 9303 bp, Cannabis indica
tatttgtatatattcactatcctttttgtggttttagtactacagtggagagatcccacccacaagtagcatgatcagttaatagttattttattatttatttttttaaagacttggccaaagtcttttactgggcattccctgaatttttctttcaaaaaaagaaaagacattagtaaagtgaaacaaagtgagccttttattaatttgcaggaaaagaaaggtggtactatgaattcaaatacccatttatcaaaagagcaagcagtttctcatcccaatcatcgtcgtttgcatcgaaaggaaacgacaatcgttttgattacataatagtgggaggtgggacaacagggtgtccgttggctgcaactctatcacaaaacttcagtgtgttggtacttgaaagaggaggagttcctttctccaatgcaaatgtgtcatttttacgaaacttccacattgccttggctgacacctctccttcctctgcttcccaagcctttgtttccactgatggagtcattaatgccagagccagagtattgggcggtggtactagcatcaatgctggcttctacactagagcaagttcaaggtacctaactaattaaataatctccccttttccttcacataatcatagttagtgggttgttaaaattattcatcaatatatattatgtgtaaaatgaactcaatcaagattggaatctcctttatcaagattactacttcggagaaataggaaatattgaattttggggaaaactattttatgtgaaaactattttataggaaatatatttatagaatttgtgtagatgtgtacttttcagaaagtatgtttggatttggatagtgtggtaattgagtaataaattgcattattaatgtcccacagtgaagggtaaggttacatagtgttagactttgatttaagttttaagatacgtacgtccaccaaaaaaaaatatatgtatttaactgcttaataaagaatctatttaataaagtgatcagtttctttctattaattaaccaacactggcatcatcatcttcccaccaagaaaaatcattaataaaagttagtgttattctattacgtggctagctagaaaatacttgtaggatggcttttcaatttgtcttcatcaaaatataaatgttgctgttatcttccattttctctatgctgctttcaattatgtgataaaattaacaatgtgtaaacttattattttgattattgaattcaaacggggtacgtgaggcacacatacataatacccaccaccaattagtatcaaaacccgttacgagtctttatatcaaaattacttatataataataatgatatgacatgagatgagagtgttaaggtagtgatataaaaataaaattataaaaataaagaaaaagacatttatgtaagggaagttgacctgtggttgccgaacaagcagtggtcccacatgtaattaaggtctcaatactcactacctcattcatttattgactcctaactgacctaacctttcaacatggcaattgataaatcatgaccatccatcacatggccccacctctatccctaacatttttttcggtattatattgttattgatgtaattaagtattgagtctcatataatttaaattaataacttttaaaaaatattactaactaatcgtaggatactacctttagtagtgttacgcaccactgacacccagtaataatacaaaacacaatatcatcacttataattttgtacactaaaagatcattaaattaaatttattttcttatgatactaaaataaatcttaataatctcctaatataaaataacttgattttttgaacaatgaacacactacatttgatgtgagtcataagcttatgtgggtgttaattatgtgtaaagagattatgtttattatgcactctttaatccttttcccacattaatcttcagtttaaaataataactaattaagcttcaatactgtttgtttcaggttcataaagaaaatgggctgggatgagaagctagtaaacgaatcattcccatggattgagaagcaaatagttcacaagcctgttgttgcaccctggcaaaaagcattcagggacagtcttctatcagtgggtgtttcacctttcaatggtttcacctacgatcacatctatggaacaaaagttggtggaaccatttatgacaggttcggtcgccgccacactgctgctgagctcctagctactgggaaccctcagaagctcactgtcttgattcatgccactgtccaaaaagttgtttttgacaccactcaaggtatatatataatatcacttcattccatcttcttataataacattaacatttagtttaaatatagatattgaatgaactaaatattattaccctcttaggtaagagaccaaaagtagtgggagtgatcttcaaagatgaaaatgggaaccaacatgaagcagttctttcggaaaacccggatagtgaagtgatattgtcaagtggagccattgggacacctcaaatgctattgttgagtggtattggtccaagagatgagctcaaaaagatggatattccagtggttcttgataatgggtttgttggaaaaggcatggctgataaccccatgaactcaatctttattcctagtaaaagacctgttcgccagtcattgatacaaaccgttggcataactaagttcggtgtctacattgaagccagcagtggatttggtcaatcacaggacagtattcattgccatcatggaatcatgtcagctgaggtaaaaataaataaatatatactttaaagccaatttaaattgattgacttacataaagaaccacacaaacctcctcatcatgaacctgtttgatcatatatatacttgtacagattggacaactatcaaccattcctccaaagcagagaacaccagaagccattcaagcttacatcaagaacaaaaaagacttgcccctagaggcattcagaggaggattcatcttagaaaagattgctgatcccatgtcaacaggacaaatcactcttaagagcaccaacgtcgatgagaacccttctatcaccttcaactacttcagccatccacgcgaccttcaacgctgtgtccaaggcataagaatggctgtaaaagttgctcagtcagaacactttgctaactacactcaatatgacaagccaacaattgagaaggtgcttaacatgagtgccaaggccaatgtcaacttcgtacctcgacatacaaacgacgccaaatccttggagcagttctgcaaagacactgtgatcaccatttggcattaccatggtggtgctcatgtggacaaggttgttgatgccaaatacaaagtccttggtgttgacaggcttcgtgtcattgatggctccatctttactgaatctccagggactaatcctcaagctactgttatgatgatgggcaggtaatatataagaatcactacatttatgtaactattttggttttttgatgatggggtttttactctttgtgtaatgtgtgtattttcaggtacatgggagtgaagattttgagagagaggctgggaagaagagctggtatataataataatgaggttaatcaaaaagacttattaggtaggaaaggaggatgttgtgagtttgtgtgaggagtgttagatgattttgttggaaaaaaaagaagtctgtgtttaattgatggtattcattttgtttgttgatgtattttcttagcaagcaaaaatatgtaaaaatggagtgaaaacttgcttcgatctggtaattagtccctgagtctgactgagtccatatagtcagtgccagccttgtggccctgggctatgtgttgtttggtagatactattactttttttttctttctttctttctttttcaaggttcttgaatatgagaactgatatttgagagattaatgttcttaatttctagttaggaagtgaagttctacatgggattctataagtttccatgatcttgtttgtaatctttgatctattatttatatctactactttttatgctgcctaattacaaaaatatgaagttttgatttcatttgaaggattaacatagtactatgagtgtttaattagagttgaattttagtacaagggtacaacgtactaaatactaatgcttgatcttgattattattttgaacttgaaattattattttaaacttcagtacagaaattagagtcatattttcttttgtgttgcataaataaaaacaaaagtacttaggcagtgaaaaagggacaataagaaaaaaaaaaaatagaacaacaatgcaattgcaatctcagaaaagaaagacgagaacgcgaagtaagatgacgtcaacgctaagtttgtcaaacccttataaactacaaaacccagaaaatgacaaataggacaagaaaacgacaacattaagagatatgataacaatattgtattagaataaaaaaaatattgtattagaagaaaacgacaaaataaaataaattagaatttagttgcaaataaccacagaatattaaaccatcaacaaaatttggataatggacagcaaataaagacaaccgcaaagaacctatatgatacagcctacagaacaagttttctttttattattcatatcaagtttagtttttgtatatatatttggataagataataaattttaaaataataaaaaaaaaaatacggacaaaagtatacttcaagtgtagtataattttataaaaacttaccatagttataatctgtaacaaataaaattaagaaaagactttggaaatttggtttcatttcttctctctcttttccttcataattttttttcttattattttgtaaaaatccaatgtccaaaccaagctttatcttccaaacacaaagaaatagagaaaaagaatacaaagaaaaacttgcccatctaaaatctaaaaaggcattattattaggatggattaagggaaggaaaaaagaaacaaatatggatcttacaaggggaaaaaaagcctaaaactttcctctcttatccttaagacaaacactactccaagtacatagttttatttaaaacaagagaatcctattcatactcaatttagaagacattcaagttttctttgttcatataatatatatctcaaagtaaaaaaaaaaataggaagagagcagctctatcaactagaacctggccaaagttttaatgagaaaccatgctcactagaacttcctctagacaaacttttcaacctttgccagaactgctttcttctccctattctcaaaggccctgaattactagaatacttccttaaagacccgaattcctccccttgttctactcccactgaggcaccactaaacaactctgaagttgacaatggcactttgttatcaatgtcacgactcgaaacagaaatgaaaaacgaacggtgtgattgtgacactccagcaatctcatgagaaactcttctggccctgctatctgcatggtcagccaaaaaatcattttggctatggcaccttgagctcaacccttttgcttcctcacactcattacaaactagcttcaatgcctggacaacttcacccatgaaagggcggtgactcacttctggctgtacacacattgaagctattgcagccaccttagacacactatcaagtgatatcatttcactctgtatacccgggtctattattgtttctaaaccttctttgctggttagaagtggacgagcccaagctaccaggttttcctggccttgaggttgagacaagtccaccggctttcttccagttaggagctcaagaaggactacaccgtagctgtaaacatcacttttcaccagaagatggccagtcattgcatattccggagctaagtaactgaaacaggaagataggaatagagaaactcagttgagaataagctggtgatcaaagttatagaagagattgtacatatccttacccaaaagtgcccataacatgtgttgagatatgtctgttaccgtctaatgctgctctggccaatccaaagtctgagaccttaggtgtaaagtcatgctctaacaggatgttgctggacttgaaatctcgatgaatcacacgtggattggagtcttcatgtagataagctaagcctcgggctgcccctagagcaatcttcattcgggcatcccaatcaagtggatcactttccttatccacccctgaaaccacagcaaaaacaaaaagggtcatagaattctttttctctcttccaaccacctaaaccctttacaaaataaaacttgttgagtatgtctataccgtgtaaatgagattcaacacttccatttggcacaagttcataaaccaagcagcgagtttggtcctctgtgcatatgccaataagtttgaccaagtttctgtggtgcaggcggctaagcatctctacttctgctagaaactcttgaccgccgtgatgattatctcttttgagtaccttcacagccaccttccttccatcatctaaagtgccgttgtaaacaagtccaaatccaccttctccaagtattcttgaagcatcaaagctattagtggctctttccatctcattcaaactgaaaatcttagctgtcccggcataagtcattgtgccagaactaatagataatgactcagaacctctcatgcttcctaaccgtgtagaccctacagcagctcctgttgagttcccatagatacatacatatttaatgttacttttgacttcattatgaaagaaaggcaataatgttaagtgtcttaacatttagattgcctaataaagctctgtacctgtttgtttttcaagggatgaaatcaaagctggctgagcatcttgctgtttatgagtgtgagaaccaaatttcaacagcaaaaaccaaacaactgctaaacacacaacaaaggctgtgaaagatgaaacaatgattactgcaatcatgcttttgcttagaccattatgttttctccttgacacatcaactcctaaaggttttaatatttgctttccgtggttgtcatggccagtgtatggcccatcatctatggcagaaatgctcaaaggtgctgaaggaggagagggtggaagatctgttcagagataagaccattataagaagaaatccataaaggtcaggtctagtttatatggttggttcaatcatcctcaaacaaaagcatattattcttaagctcacttaaatctcagttgaaaactttataaagaagtaaaatttctaaacctgtgtaatgaacatataatacttcataggaaccaaaacgcgattcattaatcaaaacttgtttgcgccagaatttctcatagatagcaaatgcagtagtgtaaccaaatttgactcctttgggtaccaagttaacaaggactacagttttcacaagctgctgactagctgcatcagctcccattatgcgaacttggctatggttaaggttgacactggccgcaatttcctctgccagctctgaaactgaagagaagaatgtgtatatagcaattcctaggcggagtttaacttgaataggcaaaacacacccacaaggtgatccagttggcatatatgtcaatggctctgtgcatgtaacagatgaacaatctacaaataaaagtaaacacatgtcaaagtaaatatagaaaatcttaaaatgttcatttatatatatgaatgaagtagaactggataatgtgtgggatacctgtattaggaggtggaggaggtaatgctagaagaggtggtgatggtgggggagctttaatcttcttaagggatgaacccaatggagatattgtaggaggaaaaatgggcacttgcagaaacaacataatcattattcatatcattagttacaataaatgaagtaatccaaaaaattaaagcaaatcaaggtgaggttcccatactattatagtggctagaggagcttcttggtgactctgaaggtgctggtgcagttgaaggccagattcttgatgaaggaaagtgagatactgatggacctattattattcatttcataatagtattttcctttccataagaaagtaacataaagatgtttcttgaagttgaagaataaagactaatatatggttgaggccttgtggtcaggagattctgaccttgtttggtgtaagtgggatgagttggttttgtaactgaattgttgaattttcttcttttgtgatggtgattattgtatataactgaaggggaagatactggaccatgagcccatttctttgcaggggctctagaagatgacatagaaggtggaatcgcaatacttggagacctcgtagcatcatctggatcggcagctacaacaataaaattagaaatatgaacactggtaattgattattctcagcaacaatattcaaactttgacattttaactgattcattacctttagctggtaaccatttgtggtgaaatgctttctttgaaggcggtgctaccatctttgcatgtcgcttctggccaaagctcagtgaagatgtaggagaagaagcatgatctgttgcaacattaagcaaatatttaagtcttactactcagttcaccaaccaactttaagaataaataaacactgttgcataacttttttggtttttcttcattatggactctgaaaacttccctcattctgaaaggatttacttgtacatttgaaattttcaaacgtgattatggtattatcagagcataaactcagcttgattaaaaatttcagtcagctatagattagagtttactaactaacctggcaccttggaagattgcggacttggactgatatggtggatcagtgatggttctaacacccatcttctcatcgatggtgagtctattgccatataaaaaagaaaatcacaaatgactatcatgcaatcaaataaactgccctgaatttggactgaaatcatgaactgccaagtccagtctgtgttatagaatagttatcaaacacataatctacactattgtaaagaagaaaataaaaagcaacagtctttccatgtatatagatcataaaagcattaacccagatccttaaatttaatctgaatttaaagctcataattaacatgtgatcatcagttaagtcataaaatatcataaacccaatttaaattacactaattactcatttaaaacacagtaaa

SEQ ID NO: 224931 - DNA, 5848 bp, Cannabis indica
gtgtgcaaaatatcgcaacaaactctcatttttattttcattatttttgacatttgtaattggaaatggccgagtgacccttgatgttactctttgccaagtgacttttcttgttatggtaagcagattttcattcgagtgaatattactcttcgcgcggtctcatcctcttattatttatttatcctttttctcatataggagggggcttattgtacttgattgtgctaccctcttgatttatgagtgttttcttatgcccgagaggcgtccctctcgtttcagcattaggccatgagtgtctttcaagatcacttttggctaagtaacttttgtagggagaagtaagtgtatttctcttgtcgaccaagggtcgctactccttatcgatttaattttttttttacttttctcccttgtctcacaagtgtgtagcgtcattcatggtactatacacttgagttttgcacacagtttctttcttgtattctcttttttttttgaaggaagtgaggtattactttgactacatgtgatatggtatgattgaacgatttcaatgcaatattcatccttgattcttaccaactcaaataactaaaggatatttttgactcaccttttcaacaatagtacttcttcaaatgtgctgcattccatgcctttggtatgaatgtgtcatctatgcggtccaatttgtaggttcctagtgggatgacctttacaatctgataggagccttcctagttggctccttacactcctgcccccgaatccttagtgtttgggaggactttccttagcaccaagtctccagtcttgaaggtgtgcatgcgaactcttgaattatagtatcgcgctgccctttgttgatagactacaaacctcatttcagcaacttctcttctctcctccaagagaaccaaactttttgccattgatttttcatttgttacttcattgaaattcttcactcaaaataagttgagcttcttctcgatggggagtacaacctcacacccgtatgccaaggtaaaaggagtttcacctatggtggagcggggcatggtcatgtacgcctagagtacattcaacaactcatctaccccatctgcccttaagattttctagctttgtcttgaggttctttttgattatttggtttgctgcctcaacttgcccattagcctgggggtgtactattgctgacagtcccctctcaatgcctctctcaaagtaataggaacttagcaagtcccctccaaattgggttctgttatcagtgataattttgtaaggcaccccaaacctacatataaagaagttgttgatgaaagatacaacttgcttagcggtgatgtggactaaggcctccacttctacccatttggtgtaataatttattgccaccatagtatcttttgccacgaccctacctattggtaaagccccaattagatcgattccccacatggcaaacggccacaaactagtcatgcttgtaagtttgattggaaggcgcctactatagttggcgtgcctttgacatttatcacacttttttgcaaacatcattgcatttctccaaaataggcaagtcgtatccttgtttcaatactttcctcgacatcgaatagcctcctacatgactctcggattctcctttgtgtatagaatctcatccattaaaacatatctagcggctttatattggattctccaagcctccttcttgtccaagggaaacttccctggttggatgtactcaacgtatggtgtcatccaagagggttcctcacgtcctactagcaacatttgattactcgcaatggttggctgagctaagaactccattggcacagactctagaatgtcaatcttttgggttgacacaagcttagccagggcatcgacgttgacgttactttcccttgggattttctcaaccgtgaaatgttgtagctgttctaaatagcttttaactttagctatgtatgccaccatttttggcccttttacttggattcttctcgtacttaagaaactaccaattgcgagtcacttaaaatctgtagtcgagtaactttcaattccttagcgtatctcaatttagccaacattgcttcacattcaactttgttttttgaatcattaaagcccaaccgtaatgcacaatgcattttgattcccccatgagatgttatcaccaccccatcccctgctccattatagttcgaggccccttctacatccatctcccatgtggcctctctctttctcttccactttctcccaactctccactagtccaatgcccttagtcctccctatctagatgataggtgaactccaccatgaaattcgccatcacttgaccgttgattgatactcgtggggtgtaagtgatgtcgaattggcttagctctatcgaccatttaagtaagtgccttgaggttttgagcttgtggaagactagtcctaaaggatggttggtcaacaccacgattgcatgcatgtgaaagtacgacttcagcttttgtgatgccacaatgagtgcgtaggccaaattttttaatttcttggtagcaagtttcaatgtccacaaaatgcttactaatgtagtacacggtttgttgttgctttccttctcctcttactaaggcggtgctcagggcgtgtttggagactgccaagtacatgtacaacttctctttaggtggatttcccaagtcgtcctttgaacttgtgaaagctttctcacattcttcatccaaaataaacttcttttttcctttgaggggtgttgaagaatgagagacacttgttagtggactgcggaacgaacctgttcaatgcagccacccgcctagtcaaatattgcacctatttcctattcttaggcgattccatatttgtcaaagctttgttcttcttaggggtcacctctatgcctctctcattgaccatgaagcctaggaatattccggatgacacaccaaatgcacacttcaacaaattcaacttcattcgatacttgaggagagtagtgaacatctcgtctaagtctctgatcaaatcttctacctttttatttttaccaacatgtcatcgatgtagacctccatgttgcgaccaatttggttggtaaacatcttgttgacaagtctttagtacgttgcccccgcatttttgagaccaaaatccatgactcgatagtgatacaaacctcaataagttatgaatgaggtgtgatcctcatctgcaggattcatgggtattttgttgtacctcaagtatgcatccatgagcaaagcaattcatgccccgctgttgcgtccaccaactgatctatacgcggtagcgaaaagctatcttttgggcaagccttattcaaatgagtgaagtcaatgtacactctccatttcctgttgggtttgggaaccaacacggggtttgacacccaaatcgagtaaaatgcttcttgaataaacttgatcatgttaagtcagtccacttatcctttcaaggctgcgtacttctcagaatttagagccctttgcttttgttgtaccagagttgcattttgggtctctatggagatggtggcacataacggttcggtctatttcttccatgtcatcgtgcccccaagcaaacacatctacattcttctccaaaaatttcatcaatctcttttaagggctttgaggagcacttttccaatatggaggaccttgaaaaggttctttgaaatcataatttcctttaattcttccaccaactctaatcacacttcctcgcaaaattgtgggtctaattctgacgaggttgccccaatttggctgagtcccccattaatcatcatcgtcatcgattctgaaggcttggtggtgatcctaagtgacatgttgtagcattctctggcttcttttttttcttccttcaaggcggaaattcctctaggagttggaaatttcatggctagatgatatactaaagtgattgctttgtactggttgagtgacagtcttcctaatatggtattataggttgtcgggcaatctactaccaagaaggtggccatcactgtggaatgccgaggtcttccccaacagttaggactaactctatagtccccaatggttgaatcaagtcgctgtaaacctgtatatcggtgaggtgcagggttttagatctttcggtccttgtcccatcttcttgagggctatgaagtacatgatgtctattgaacttctaatttcaactagagttaggtgcaccctcgtgttttccatctgaacatgagtaccattggatcattgtgggggaaatgtaacccctcgcatattcttccataaaagtgactgagtcattttcccctttgaagttctttagaggtctctattccaagctcaagacttgggcctctcgccttacctctcaggtgtatttatctctccccttgcaggtgtcccctcctatgtcaggccttcctataatgtcctgatgtctgtcaatacgtttggggcttctttgtgtacttctcgtctcgcttcagacccttgcccacttgtgcctttgcttcttcctggaggcctatgaatgttcacatcctcgtctattgctcaaggtctatgaccatttgcaatcccctctctgatgacaggtggtggcagatcctgccgaaattgatcaactaactatcgtcgaggcgaacctccacctcttgaagattatgtatgaggaaacaacactactttagcctatcattcccatagacagcgccaaactattgacagtaagaactcttcaacaaacttgtttgccagaaaatcaaactctacttcaaactatgaattaagatgaaatataaattcaagtggctatctcaaagtagagagaaaatatagaacttttcattactctcaatatggtgattacaaaaatgattttctaacccctctctcacttgagaatggggtacttataggctctaattgcttgagttacatagtggtcccaaagagacaagttgctgctttcgagctgcaaaccgtaggtacaggaggtggtcttctgcctcttactcttatttggtgtcaggtgatcccaaatcgctgaggtggtggctgcagcgtacccttggtcgggtcctcagaccttgcaagcgcactgcctccactactcgtatctccttactttcagagctggcagaaggcgtggtcatacgctttttccttgcatgccttatccttagattcctcctctaatggaattctcttaaacatgtattcaaatatcatccttacttcaccttacacacacaacaacacatgcacgctcgcgcgcacacacacacgcacacactacacgtgggctcgcatacaaggcccccatacgctctgagctcgcacacgagccctgacacacacacacacacacactcacactaccacaactcgcatgtgagcccctctctcatgcacacaacactcaacacacatgcacactacacaccacggctcgcatgcgagcctccacacacactcacacacacatgcatgactcttaccacgcacacacaccatgactcgtatgtgagcccctcacatcgcactccgctcgcaaccttcttccatgtctttctctattcacgagtcatcatagggtcagtccttgtgatgtcttgaattaagccaaaaattgtaagcactgatttttggggttaacatgtactattgaatatgatttaagtttataattttattattgtgtgatattgagtatgtttgatatgtgttattatgagtgatgataatgtgatgtttaatgtgtttaattttaattt

SEQ ID NO: 224932 - DNA, 6503 bp, Cannabis indica
gaagaagaagaagaagatagtgtgtgtagttgtttagtatttgagtttgattatcttagatatagttctcactatccactaaagattctcaaaattgtttagtattagagtttggacaagggaaaacaaggaaccttaaatttgtttcaaatagaataatcttctgattgtcttcatcattaaagattctgaaatttgtttagtatttgagtttggacaagggtaaacaagctaactttatttgtgtttcaaatagaataatcttttgactgtcttagatacaattcttactatcttgcatcactaaagattttcaaaattttatcttgaatgaagaccaaatctgttgggaagtatcaaagtcctaatttcaaagacattcagaaactcattgccaataaactacaacgctctgtgggtaagaaggagacagttcaggaagctagcatagtcaagaagccttcctcgccatttccacaaccaccgccgccaccaccaccaattagtccaactcccaaagttgttgatgttgcaaggaagactccatcctcaatgtctgtgctgccacctcctccaccgcccccacctatgccctcggctagaacagcacccgccaccagtcagaaagctccagcatttttggaattctatcactcgttgacaaagcaagaggggaagaagaattctccagaactaagaaagagtcctaatcataaacaaacagctattagtgcacataacagcatagttggagaaatccaaaatcgttcgtctcatcttttagctgtaagaattcagatattaccaaacataatagcatagtttctttctgaaaaatcttaatcttgaacagtttgtaagcttacaattctttccagataaaagctgacattgaaacaaaaggagagtttatcaatggcttgattgcaaaggtgttggatgcctcgtacttggacatagaagatgtcttaaagtttgtggattggcttgatgaacagctctcatcattggtattttgttatagcccttaaacctttccactactgttcttactgtttcattaaagattctctttttcttatgtattttgcatttgtatattgtgttgtttgtgcaggctgacgaacgagctgtgttaaagcatttcaaatggccagagaggaaagctgatgccctgcgagaagctgcaatcgaatatcgtgagctcaaacaattagaaaatgagattgcttcttacaaggatgacactgatattccatgtgctgctgctttaaagaagataaccagcttattagataagtaagaattttgtcaataaaaaatctctatttcatttgaaatatgttctgttctctgatcaccaagtccttgtcttttttgtcttcttttcataggtcggagaaaagcattcaacggcttatcaagctgcgaaattcagcaatgcgttcttataaggaattcaaaatcccaactgattggatgcttgattcagggattgtgagtaaggtattatattctctttcaaactcatccatccatttatactatgaactgtaatgtatggcttattagttcatttcatatatttaaacagataaagcaggcgtcaatgaatcttgtgaaaacatttatgaagagagtgacaatggaggtggaatctgataaggaattgaatcaagaatctcttcttctacagggtgtaaattttgcatacagggctcatcaggtaaaaccttagaggcagtttttgtttctttcttggggaactttttggtctaaatgcttgttgttgtaagtagagaaccgatttgtgagtgagaccacatgtcttagactagcctcccccgatatacattacaagcctcacttaaggccgaggaaaaccataataaacaaaacaggaagcaaaaataaacgaaaaaaaaaactgtagaaaaaattgagacagcagtcacaaaaaactcaagattattacaacagcacacaccaatccctgcttaagtctaaaaaggagagatcctcgaaatgtttagttctgaagatccaagtggcagtccagaatttgattctttcccaaacattctccgcagaccttttcagtccaccaaaaattctgctatttctttctgtccacaccgcccataacagtgtcataatggcagtcttctacaatttaacttttcttttgttctccatcggtttgcttattgtgagcttctctttttgtttggcacaacagtttgcaggaggtctagattcagaaacattatgtgctttcgaagaaataagagctcgttttcccggacacatgagagggtctcgacagttattgacatcatagcttctggtgtggacagcggccaggcatttttgtttcggttttttacatacagactctgacaaagtgaatgaaaatggtgtttgtgataacaaatatccaacaaaggtctaagcttattaactcaaaaacttgataggagcaggagggagaagaagatgggtgatattttgttgcagcaaatgtagtgtttatatttgttagtatttgtatacatgaattttgtttttctatgattagaaaaaaaaatgatgcttactaaaactctttttattatggttttgttatacttacaatgttgtaataaacaagaatagtctcctgagtctgctcaagttgattctgttccttaatcaacaactaaaaacccctaatctttatacttttaatgttgcttattaattggtgttatgttgttttcataaactttggtcgtttccaatatttatgaaggtaattgcctaagctaattggcttctagaaaaacagaatgccatattacagtaaatttataatttgaattatgctcacttagttaatcaacttgaatctaattttatttttctgctgaaatgttttgttacttgttatccaagtagaaatggcaaactgagctttttcacgggttgggccgcaattcgatggtcgacctttgacccgtactaaccgggttttattcgggtctcagccccgccccggtaattttagttttggataatccaagttttgactctttgttgattatctagctaaagccacagttcaacataattgcaagttcaaagcagactctagactcaatcattcaatagcttttatgtgagttttgacctattaatgactagaacaattctaacttcattattacacactacatgatatgaatctacttcaaaatctcacaatatattccaaacttctgtacaatttttctctctttttatacatttccacctacaaatattgctacaataacaatatttttacaaaactggtcgtatcctactttcaaatgcaaatgttcttgtgtctgtcttactgcctgtgatatttgagcttcggctcactttcatggtcgcttgtgttattgcaacgcttaataaaggaatcaagtgtattctgctttgaaggactgctttttggttggctggacgagttgacggttttctgcttggaagggctgcttttcggttggttggctgcaactttcatggtattctcatgcccatcaagcatctactcaacacaacaaatcagttaaagggaaaataataaagactatgatcttgaacaaaggttattgcaattaggtaaacagtgtttatatctgaatgcagtattatagtaagtgctgaaagtgtttaataatagttgagggtggttagggttgcaattttacctgccccaagttttccaatttgctctgaactacatccctgagttgagagacaaacaaccaaactcgccaaaattagaaatcgggtagaacgagctcagaattgaaataattgaacaagaaagttaccatatgatgtcatcaactgtgtcatttgctagcagatagtatacattcactgaagacgcctagtaacacgaagaaagtatatcaaacatgggaaagtgtactcaactcaaagaaatcaatccattaactataccatccatttggtatgatgctattcagcaaatatacctggccgattctatgagcacgatcttcggcttgaatcaggtccccgggagtccaagacaattccgcaaaaacaactgtgcttgcggctgttagagttaaaccaacacccccagctctaatagatagctgcacagatattttaaatataagtatctgactaagaaaaaagctccacaaactgtagtacgtcattttctgtatccagtattccacttgtaacttatgtcaatgagaaaacttcgaacctatttacaagttaaatgatgaacagaaacataccacagctgccttcacagaatctttttcctggaaatctgtaaccagagcttgtcttgatgctgcaggggtatggccgtcaatccgaatgcaatccactttcttcttctggaaattggaagttatcataagctttaccaatctcaaagaaggttcaatatttttcttatttttttcaaggaattaaaaataaaacgataataatagttttgggacaagcttgtcaatttaacttaagtggcctcacaagaagaaactgatgtatggaatcaatcattggctgatgatgtgcaaatattaagaacttacagcctgcctgcacattaaagttacaaacatacttcagaggatgagacaatgaaagttctgcataccccatggtttactacacaaaaatcaaatttataattcactacgaagcttgcaatgagaaaatttcttcacactcttcacagtgttgagcaatttgtaagaatatatcgacagtgtggagatttacctccaccatagttgcaaggtattctagaactgctgggattttggcttcagcagactcggtataaatctggagaccataatgatgttagaaggggaaaaaaattgggctagaataaatataggaggaaacttatttcatgaatgagaaaacagtagcagagtgccgtgaatttagtgggtgcacctattgcactgcaattttcgctgacagatgacattatgttatcagcatgattagtataaaagatcaccttgttaataagatttttctcagaaaatttcaatgtatcgacctcttcttttgaattgcaggccttgattttcctttttaatacctccaactagaaaaaagaagattaacaaatttatactttcttttctcaataagaaaagagaaccctgatataatttgaacatctcctaaggattgatgagtaaaatacctcacgaaataaggcgttaacttgcttcatgtccttttcagctaaatctaggaagacctgatattcattaacacacaaaagttcttagagagctgaatagtagtttacttcacacaaaagaagaggaatgtggttgggttaagtcaatatttaatgataatcacgaggtggaccatatgcacttctcccacacgaagtacagggagcaatgttgcaatagtatgatgtatgacaatacgaactgcatctacttcgttgaccaaccaaatctcaaaagcatcacttgccacaccatacatcaactagcagaaacattgcagatatacactaacctgctgcctacgcttcataggtagctcagaaagaacatcttttttaagtctacgaatcatcaaggttgcctttatcagattatgcaattcttcatggttacttgcaccttgatacattccaaatactccctgcaacatccagttgaaaagaaaaatattagcaaaaaataattaagacaggaaaagatacaatcaagatgatatagcaggtcttataatgataacattttacttacacccttgcaatatcgattaccatactcgtgaacatttttaaatacatcgggatataatgcttccaactgtaaaattggcaccaagttgtcaaaataactaatatagctgaaagatacttgagcattttcaatgaattgcttatcgggattcaagatatacctgtttgaatagttcaattggtcgagacaaagcaggagttccactaagcaatagtgcatactgagctttctggaatgtcaagattaggattagagtaaagttaatagtttgcaacatccgtcctagtttatcagtttgtaaacaatatgaaattaataagtagtaatcaattatcaagaaggaaagaccttaatgactggaagagaagcagttgtcctctttgcctgtgcatttttcagaaagtgagactcatctgcaatcacaacctgaataagaaaaagaaagatagcaactcatcaaatcagcaagtttggtaataccaattgagccctatattttttgtaagtaacacaatatccacccataatcaaactaggccaaataacgacctactcacttcatttgatgtaaagctagtgaaatctatgtaaattaccaacataaataatttacatttttattcgtctaagataatttcttaatgtatacatcagtactacaaatttacaagataatttgatcactcc

SEQ ID NO: 224933 - DNA, 4955 bp, Cannabis indica
aaaaaaaaacagaaagaaagaacataatttcttctctgttaagatcactgtttctagttactataaacacacacacacatgagcattcacatatgcacacatatagataggaaaaagtatatatgacataaagaaaaaatatcctcttactctttataatctagtatggcttttgtacaattttaaacccttgttacaatggaaatgagtgtaattttgtttgttttctttccttcttgttgagcaacacttctattgatagggcacacacctgcttggtaagagtaaagcgttattttctttatattttctaaggtgtgagattctcatagcatactggccttttttaccccccctcacactcacatctcctttaaattcagcactaaatgagataaggaagctcactgaaaatttctcgaaaaaagttgcatattatctattgtggagaagagagcaagaattttatcccaaaataacaggcattagaatgaactacggtgttatacttcaaaacaagaacagaattttttcaagagttataaatgtgttactttcttgaacattttgaaaaatttaatttcagaatactgtttaacattatagtttggaaccatcaaaatatttggataggcattttcttttggatagtaagattcatttgacttcctgggagttaggcatttaattcgagctctttaggtgtttgaacaactggagtcttgtcttagatcacaacccatttcatacaagatagctgaattcttaaccaaggataattgatgaccgtacataagtacacattttttaagattccagtatgggactttttcttatggcattcttactttgccattatgccattttgattcttcaagtcctgactctcaccagatgaattttagattgaggctgatctagaaaaagtgattataaaacttgagtatggaatttgtttttatatttttttggtcaaattttttttatatggatggaaagcacattgaggatgtcaaattcgaattttcaaagggtctgataggatattatgagctcttgtaatacttggatgttttgcaattaggtcaaattcacatttgctgattagtctgataggatatgagcttttatagtacttggattttttttctttctttctttttgcagttacttttacatttgtgagtagtctgataggatatactacatagaattggttacaaataatcatcgtcttctatggaaatgttttgacatcaatatttcatctcttttccttttactgaaatatttaaataataattatttttctctgcagtttgattttcatggttgtaacctttaaccactgttattttggtgaaattacatttgttaaatttatctactttttgtaaaggttttgggtggttttgatgcgtcgcgatatgtgactgagaggaaatgggccagtgctccagatggcactcagattccaatgtctattgtctatcggaaagatttggtgaaacttgatgggtcggattctttactactctatggctatggttcttatgaggtaatataataagttacatattgaattgtgtattcacattatagagaatctgtttcatcatatttgttttttttttcatataatcattcttgttatgtttgaatggattttgtttcttgaaaacatttcacattaacttatgaaactttctcgacacatttgtagaacatgtgatctcctcgtagaatattatgcttttgaatttgatactgtagttttatctaaatgggctgtagttaggtttttgttcagtgctgttaagttatacgaacgttagtcaaaattgaagcttggctgtctggtttctttcttgtgtatgattttaattattttatccatctctctcttttttttaaccttcaaatgtttcttgtaatttattagttacagttagctagtgctgtcaatttaatgtttgttggtatatatatttattagtgtaatcttcttagtcatgcactcgcaaaaattgatgggaaggcaatgtttttcatatcttacacttagtcattttgctatttatactactcaaaattcataaccttcttataaacaggtatgtgtagatcccagttttcagtctgcaagattgtctttgctagaccgaggatttatttttgttattgctcacattcgtggaggtggtgaaatgggtaggcagtggtatgagaatggaaagttgttcaagaaaaaaaatactttcacagatttcattgcttgtgctgagcatttaatagcagaaaaatactgctcaaaagaacaattgtgtattgaaggaagaagcgcgggagggttacttatcggtgctgttcttaacatgaggcctgatttgttcaaggcagctgttgctggagtaccttttgtagatgttgtgaccacaatgcttgatccaactatccccctcacaactgccgaatgggaggtactattttttgtcttgtgatcaatttttaagttatgcatttaattctctcttcttagaacatataattaggaactttatattgaatgaaatacttgtatgtgaaaaatttgcatcgagggccacagatttttttttccttttcatggcaagtatagtttaagttgttccctcgatctcctggggttctcacaaggcccgccaccctaataatcacattttctttgctaagcaccaattattaaagcaatgtttacatgaactagtccataaattttagattacaaaaatcttaagatgctgctttctttctcttttactggattttatttatttatttatttttattttatttgaatttacagcttacaggttgtttaggtgtaatatagttttacggtttatcttattagtccacatcttgtgggctcttgttttcttagggacagcagtttgtgggtttagacgatttgacgctgtttcattttgatttgtttatgtttctgcaggaatggggtgaccctcgaaaggaggacttctatttttacatgaagtcatactctcctgtagataatgtaagttcaactaaagtttgcccaggactaacattgaccaataacattgggttgtgacagccatcattgtacgagtatgctgatcaaacttatatccttaatgttggagcttgattttcttgtaatcattttgtttacaggttaaggctcaaaactatccacacattcttgttacagctggtctaaatggtaatgttttgacctgaagaaatttcatttctttcttaatccgttcatgtagttctattttatcaataagctataaaactgtatctaatcactctcatggcacaattggtattctaaaacgaaaggacgttgcttaccatatcatgtacgcttaactatgcatatgaaaatagtttaactcatgattaggaggtattcctaggttggcatatcagatgtgtgttgttgattccatccatgtaactgacataggtttggtctatttcaacagatccacgggttatgtattcagaacctgctaagttcgtggcaaaactaagggaactgaagactgatgataacatactgttgtttaaatgtgaacttggtgctgggcatttttccaagtcagggaggtaaacttctaatctcagtttattttgtttttttgattctctcttttatttatttatatctttacttttcatggatcaacaaacacgagagaaaccttctctttgttttacatttccaaaattaaggaatatcttctattctgatgaatctctttctgcactgttttgttggattgcagatttgagaagctccaagaagatgccttcacgtttgctttcctaatgaaggctctcagtaggattcctgcctaggtaagaggtttgagcgtaacgcattaattttgtgcatttttttaagagggtgcagtgcaatatttatttttttagtttttttttttttttgatgaagaggtggtgcaaataattattagggttcttaatatttgttgtatggcaatgtggtcagctgaatactctacccttttctttattaagaatcagtgaatgcaaatttaaaattttacataacaataataattctgaattttgcagcaaaaatacttaagttgcaaaaagtgacagacttaaaattttatttttggagcttaattgttataataatatttataattactagagataaaattataattttttttgtgagagatctttttactattttattgtataattatttaattctaaaagaagatatttaattttttttattggagctataactccaacactacttatatctgtgtttatataacataaaactaggtactatagccggctaattttttttttttttttagtcataataacaaaaaaaaactaaaaaaataattttaaatatataataaaagtaaaattatagttatctaattttatattattattagtaattttatttattaaaaaataaaacttcataagaaaaaattcagtctattcacaatttgctattgttataaaaataaataaataggatagtggaggaaaccattaggggtatcatatcttatctattatcattaccatatcttgcttgttattatcactgtatttcatccgttgtcatcatcgtagcttacttgtggtcgctactactgtctttttcgaaatctcaatcttgaccatagatttcatcttgaattttaacattttctttaacattttatagatattggatcaaattcattaatatgttctcttaattatgttttgttgagaaacatggggttccatctcaaaaccaattggtgatgagtggagtagcccatgttcttatgtatgactcaatatttttacatttgatccatgtgggacaatattgtccaatatttcccgtcaagatgatagctatttttgct

SEQ ID NO: 224934 - DNA, 3511 bp, Cannabis indica
ataagttttggtatatcaagaaacatgttaagtcttatggtcccatgatatggttctaatagtggcctgtatcaattttattttccagttttctttgctaggagaatctggttccattgagagagctctttatgagttgcacaagaaagagtcaaaaatagtaagtttcaactattatatttctaataaaaaggcgtgtgaagctccctgttttctctcatggcgaagagaaacgggtggtttcaaagcccaccaagaccgtagctgctgtaacagagaatgaggtgcctgatacgatggagagagttgagcctgatctccgttcgatccaaaccggagaggaagagcatcctgtacttgaggtatttcttcacttgtgagaacctggaagccgatttcgtcgatgagagtccggctgcgaagactgacgttttgaagccaatgagctgggccaaggaagctgagagagatgattttaacgccaaagctagggatgtatggagtaaattcaaagccaatcaagttcgtactccatctacccgacttgattttactgaacctatgaaaataggggatcaaattgttgctaagctagatttggatgaggttgaatctgaggcattgttgtggaaaaattcgatagtatgcattgtgttaggggctaatcctcctttcagggtttttgaagggtttatcaagaggatttgggggaacttgggaattgagaagatagctaggatgaattcgagattcacactggtgagtttcagggatgaagaaactagggatcttattcttgaaactggggttatacactttgataagaaaccagtgattctaagaccttggacaaccgatatggatacagcgaaaatggtgaaatcagtcccagtttgggtgcgtttgaatggacttgggttacaatactgggggaaaacagcctaattgctcttgtgagtaccatagacaaacctataatggtggataaggttactcaaagtagaactatgataaaatatgctagagttttagttgacattgcgatttctgattgtcctcctaaaacaatagcctatgttaatgaaagaaagcagctggcggaacaaacggttgagtatgaatggctaccaactaagtgtggggcttgtgatcttttggggcatatcacagcgaactgtaataaagaaaaggcgccagtggcatggagaaaaaagggggtgctagagcagaaaaataaactaagggtactgagaagactattactagtgatgagatcactaaaccagttgaagaaaaaagatttgataccagaactaaagctgatcttggggaagaagagagtttgaagcggtctgaagaagtaactgaaggtttaatttggattactcctcgacagagaagtactaaacaagcagctactgctgaaccagaagcgattacaaggaatggatatgagattctaaccgaatctatggatgggggattggttacaaatacctttgaaagtccatggaagtctgcaatataatgggatgtaatgtaaggggtttgaataagagggaaaatagattggtgttagatgtttgtagagaaaataaagttgggcttggtgccctccttgaaacaaaaataaagcatgaaaatgtgaaggatgttattgcctctagctttccaaactgggatttctattccagttcaactataagcaacagaataatattgatatggcaatcgaagtttgtttgtgttgaagtcctgatagaggatgtccaattcatccattgtaaggtcaaagggatagggttaatggaggagttcttttttactactgtttacggtagtaatgtgttgctggagaggaggaatctttttgaacagttggctggtcatggtttattaaataagccttggttaattcttggggacttcaacgccatgtttggctttcaggatagagagggtggcaagcaaattttggcgaaagacattgaagatgctcaaacttggctctcccaaggtcaagtggaggagttaaaaggatctggttcatattttacttggtctaacaagcatgacatgggctctagagtttattccaagcttgatagagtctttattaatgaagattggttggatcaatttccaaacactgaagcgtgcttcaaatgggactgcatttcagatcatagttattgcattgtcaagagcaatagaattggtaatgtggaagtaaaatctttcaggtattgtaaccattggactcttcatagtaatttccgtgagactgttttaagttgctggaacagagggaatggtgctaaaaccgtgggagatgtgggtagaaagttacttagactaaagcatgtgttaaagaaatttaacagggaggaagtcggggatatagtgcatctttatcatcaaagcaaagcccagtttatctcggctcaggagaacctggaaaaagaccctagcaacagcatcctgcatcagattgaaaagagtaaaggtttggagtacgctgcagctataaaatagtatttctgccttcttcgtcaacagagtaaaataacttggctgcaaaatcgggaagacaatactagatacttccactcgattatgaagaaaaggaagttggagaatcgaatgacaactgttgaattgaatggtcgtctggtagatgattacacccaagtagtggagcatttcctgaaccatttcaaaaaaaaaaaattatgggaaggaaaagctctgctactaggagacttgataaccaagttttagtccaggggccgatcctttcgttggaacaacaggctagtctagttagaccttttaatgagaaagatgtgaggaaggctttgtttgggattcattcaaataaaagccctggtcatgatgggtttggttcaagttttttcaaaagcctttggaaagatattgggaaagaggtgtccacagcgatccttaatttctttgaggaaggggtattgccaatttcaatgaaggatgttgtcatcactctaatcctgaagactcttgatcccaaggaagctagtgactttcgcccaattgcttgttgcaatactttgtataagtgcatctcgaaaatgatttatgcaaggttgtcagaagttctcccctgtcttgtgagtaataatcagggtgcttttgttaaaaacaggctgctagctcataatataatgattttccaagatctgctcaaaggccataccaggaaaaatgtctctgctcgttgtattatgaagatcgacttgagtaaggcgtatgataccgtagactggcaatttgtagaagacctcctcaatggtttgtgatttcctatgcggtttattcattggctacttacttgcttaaggggtactacttactttctgttgcttaatggaagaattcaaggctctttcaaaggtgaaaaggggcttcgccaaggagaccccttatctcctcttgtgtttgttttgataatagaatatctgtctagattgctctc

SEQ ID NO: 224935 - DNA, 6641 bp, Cannabis indica
aattttcaattcaccccccctcttggaaacatatcttgggctaacacaaggcacgtgtagggaaagtcatggcaactaagttacttatgctgccattgaaagtgaagaccctagagatcatgacattgtgttaagacctcttgtgttttgcatcaccaagcaccatgtagagctaattaaggattagtactctttacccaaaattgttgttaggaaatccaaaattgagtgtcccagtggttcttgaaattcttgttgtagtgattggttgagattttacatgaatggaggtacattgtttcccttacacctgtggtttgtgtcaattacttataatttcagagtctacccttatcagctgaatctaaacgattacaaaaatttatcaacatttttcatcatgagtctacccaactcatcatgaaattaattttttgtgtgatatggaaaggagtgttattcataaggaggaaggcttgtgtcgtcttcaatattttagtgtgtatatcgataacatcactaaaagcaactacgacatttaccataaagagtatttttatactcccatcattcctttaaggcatgtcacctttcaaaaggctggacctttcaaaagaccaacttctctgattgacatgaaatggagagtggatgctatgttgattgaaattaactatgggagagagatgggaagatgttttcagtgatgacaaccttcatcgcgttggctgatagcaatgactcttggacaatgccccttgaagacgaagagagtgggcatagtggtactgtcattgggtttgaagaaatgtcagaagttgaagatttttctcataatgacccagattattcaaggagaatatctgtgtcccttgaccaaaatggtgatcgagatgaagttgaattagaacctttgggtcacactaaagcttgtgcacccgagaaagttagggaatcggcatgttgttgatgcgccaatcatcgatgtgatgcttaacttgattgtttacctttctatccatatttctctcatgtaataaccactcgttcttttgtttagtagataagatgagttttcttattgtcatgggaacttgctccaaaagaaagaagcttgcaaccaaggttgcgaaacttttgttcgagaagttgtgcaagccatctcgtcgcttactctattcctttgaagaaatttaagaagagaaacaaagttgttgtggctgaagcatcttctttggctagggcctaacataaaaggaaggagaaggttattgaaattaaggacgagcctcctgcttccccaatgggtttccctagaagaaattgatgtggtcgggccaatctcctatgagttagagctcttggccagtctgggtgtgcaaggcacaatgttgttggcacctagggaagctctgattacttccaaggcgaatagcaaacctttagggaagctgttgtctactgaacctccacatgttattgccgagaagagattctatgacatcttcagggtgagtatcttttcttgaattcacctttctttttaaagaaatcttttgactttgttttgccacttgtaggcttgcttggggtttgcttatgctatggaaaacgagcataagaaagttctcgaattcgcagattgtgttcatctgccaagaaaagagcttctgatgcagagaacaaggttactggcttggagaacatggtcagtgaacttaagactaacgtctttgatcttttaggtgttgcacacaatgcaaaggactgagaagagagcttgctataagagcttgcggattcaagaaaaactttcaaagtagaagagtccctttacaagtcccttaacgaaaagacattgagtgctgctgaactagaaggtcaagttcatcacctcgagggagaagtggcgaccctagaacaaaggtagctgcaaatattgcccttttcgatggctacttctttgatgttgtttacaactcttcgtcagctaatagaggagctactagcttgaacagggaagccttccgagagaacaaggtcgagttcctctcgagctagtgtgagtagagtgcaagtgaggaagctctttgcgacatcaatttttacttgaatggcgatcctcaaaatgtcagggatgttgcaagggttgaaggatacaaccttgatcacccagaattttctatactcgaagattcatcaggagaaaaatgcagcgaaatcaaggagctattgaagaattagatgatcaagacgttgtcttaatcttttttttttagcatttagttttagtgtgttagtttgtcgcctcgacgaccattttagtgtggatatgccttagtaaaaactttatcagaatttgtttcaatttaattagaaattaatccaattcaattagactttatttcaatagttttttttaatttatctgaaactacatgacctcaacacttgcacaccatttaatgttttaagaaactcaatcactgggagtaactttaacatttctttaatgcccatgtaaacatactatggtgtacatgccccccaagtgatcaaagaagtgtcttgagaaattgttatatgttgagcccttattaacttaaccagagtttcgtaggttggaaatgtttaactcattaaaaaaataaccgaagttacctcaagtccaactctacaagctttacttaacgtttgagagcgtcatcaggtctatgagttgtaactgattgatagcaatgaagtataaaaaaatattgttcaacgtttttattcatccgaaattaaatacaattacatattcatagctaatttaataaaaaggaaacaacatttgtaaatttgtatttttatcataaatagctgagttgatccccagtacactgatgccctattcgacaaataatgtaagggccataacttggtgatggacctcttgacttatagatgaattcgcggaaagaggtgatcgattcacttgcatgtgataaaatgaatatctctatgaactgaactgttttgaaaataactcttttattggtcatatcgtcttagatgttttctgtttcaataccttggtacaggtactgaattcaagtagcagtcatagcgagccaacttgtacgtctcgggttgaagcgcttctgtgatgacatatggtccttcccaagaagggctgactacttctagtgccgagtcttttgtatttaggaatacccattgtaacatcatgtatctaggcataaattttctatctttaaccttcgagctgtagtgttgggaaaccttttgttgatatgcagccttgcagagcttaaatgtctctttaatttcctcaattctgtccaaagactaagccaataattagtaactggcatgttgatcataagtgagtcttcggtgtgatgggggtgtgagttctatgggtattattgattcatattcgtaggttaaatggctagatgcttttttttacatggtgtagtaagaccacaacacctcgggtaattcttcgagccagtttcctttagcttgctctaagcactttttaagtgtatctttaagagtttggtttacaacttcgacctgcccactggattgtggatgagctactgctgaaaaactcttaacgatttcgtgcctttcacagaagtcaataaataggtcgatgttaaactgttttttgttgtttgacactatattttgtggaagtctgtggcgacaaatgatattcttgactatgaagtcaagaaatttgtttgatgtaatagtaaataagggctctgcttcagcctatttggtgaagtaatccacaaccactaccccttattggactctacccattcccttaggcagtgagtctatgagatcgattcttaagaccgcaaatggtcagggagtttgcatgctcttaagctcatttgggataactctaggtatcttggagacctctggcacttgtcgcatcttttaacatagtctgaatcttcgatcattgtctgccaaaagtacctttgcctcaatatcttttttcagaggcttttgtcccccagtatggtttccataaaaccctcatgtacctttaccatgagtagcttggcttcttctttcatgacacaccttagaagaggcattgagtagaatcttctatacaatactcattccatgatgaaaaagcaagctacttttctcatcagtttcttagcttcgtttgggtctgttggaagaataacttgttctaagtactaagcaattggggtcatccatgattggatagttttcggtcatgagaatagactctaaatcttcactgatgcttggttgagtgagttattcgacgggaactacgcttagagcatcgaagtttgttatgctaggtaatttagctaggctaataaatctttagctttgctcaagcatgctatcatcttaagtccccgagcttggtattcgcccaggatttaatttacaataagctaagagtcattgtaattccctagtgattgagttttgatggccaacgccaattgaagtcccgctacgattgcctcataccctgcctcattttttgttgcgataaatgcaaactgtagtgcacagtgagcgcgaaatccatcaagaattttgaggatgagccctgcaccaaagtcattctcgttggaggatccatctacataaagcttccaagaaggtacataatcttcctgagctgcagtctcaggcatgtagttctgatcttaatagatcatgggttcatcttcttcgaggccaatgcattcagcgatgaaatcaactaatgtttgacctttttgttgtgtgaggattataggcgatttcaaaatgaccaagctctactactcatttgagtagacatactaatgtttcttgattggacgccgaaagcatacttaaagggattaagcttcatcctgtaagctcatgggatgttgaaccattcctctaaattgttgatgtggttcttaggtttccttgatttaaccaacatgtcatacacatagacttttatattattcctcattaggccgtggaacatacggttgactagtctttgatacacagcacaagcattcttaagtcttaagggcattacctcatagcaatatagtttgatttctgtttggaagctagtgtgctcttcatcaggtgcatacatgttaatttggttatatccggagtaagcatccataaatgtgaggagttcatgaattgctattgcgtccaccaattgatcaatttggggaagtagaacacaatgtttaaggcaagtcttgctaaggtcagtgaagtcaacacacactttccagtttccattcagtttgggcaccagaacagcgttggatacccagaccgggtaaaatgcttctctaatgaaattattttcttgtaacctttcaacttcttccttaagagctttggagcgctctttgttaaagagcctacgtttctattgtacaggcttgaagttctctttgtcaatgtttagagcataactaacaaccttgggtatcccaatcatgtcctcatgcgaccaaacaatttttttttaattttcctgaggcaagccataagatatgcacttaattcatatctcaagtttgtaggtccgttgttgtaaagagaatttccttgagttcctcggtcggaccaactcccgagtcaatatccccaaaatgaggatcaatatcgtccccgtctaaggcacaccttcaaatagaattgggtgcggtctttgttgtctccttggttgcaaccttggaggtcttcattgtctctctggtcgtgggggaaaaggcctttgtcatccctcagttgttagaacaactgaagaggtcttctttgcgagtgtcaatgatatgttgtagcactcgcgggcaaatctttggtgatcgaggaggcgactgatgccagatattgttaaaaatttgacagacaaatggtagatggataagatagctcggaggtcatatagtgttggccttccaatcatcatgttgtatggatatttggtgttggccactatggaagttgccataatagtgtttttcctcgggttggtgtcgacagttagtggtaatttgatcttacaatagggagcaatttcatctccactgaaaccatacatgagttggggcatggttctaggtcttttaaagacaaacccattctctccaaggtttgcttaaaaaggatgtttgacgatactccgtcgtcaatcattactctagccaccatcatgttggctatttaaacttcaacaacaagagaatagttgtgaggatagaggatgtggtctgagtcagatttgtagaatatgattggatgacacccaaagcgtaaaaatttaagaggtctctctgcttcctcaaaaattttcgatcttgcctcatgttgtagagatttagcatacctctctagtgctcttctcgagttacctgcaagatgcggacctccaactaccacactgagtctgcttgccactgatgtaggctggagagaaatgttgcctcatgtaggcgcctctagccttacatgaatagaataagtggtgaatctaggctcgtacgccttgtcggacatgtctctagttctagctgttttttttttttttagtctgtaagaag

SEQ ID NO: 224936 - DNA, 3741 bp, Cannabis indica
attcaattcaataactgtgtctgtaagatctgtgtggggctaagatttgagtggttgagttgtgtataacaataaagaatattctcaactttggttgaggtagttaatatagacaacacaacaactttataatttgatcaatcatatcataattcataacacaatcttatcttattatgcataaaacatcctcccccataataactaaaacaatattcatacagtaattgttcaatcaaactcaaagcttgtagtttaagtaactttttggtcacttggaaatggcttgagttccaggaggaatgtctactgttttatcctgataattcttcccttgttgttgagcaaggattccattccatcctacaacagaaaaaaaaaaatagattcttttgttagagaaattgaacactgattacaagaattgaagtgcattatatagtgatatacatatatatatatatatatatgtgtgtgtgtgtgtttaccaagagcagggtcaagtcctctgattttgagctctctgtattcttgacaaagagaacagcaggggcaaaagacatgagagataacatctgtatatggagcttcaactagatcatattttgtccttagctttgttctatattttgatcccattatccattgagaacacaaggcaggcatcatcaataagtatatgaagcttcccaaatggcaagctatacagtagcaaattattgaacagatcagttaaaacctcatttgtaaaaagaaaaaacattgagaaagaggaagagaatttacccatttctccttcatctagtacttctgcaatctgtccaaatgtcacacaaggtaaaaaagatgtcataacagctgccataataaaaccagaaattctataatcagatttgtttctttggcaaagattgatgacattgacataacaaaattcccatattaaaattgtatgtaagcaacatttaagttttagtctcattagttaagttcttttgtttaaaacttgatggacaagaaaataaatttaccatttgtctgattttcatagcaatcaaacagtcctgtggtccatggttttccaagaggctggttctggtttggatgaaaatttggagccactgagccaatgggttcagccgtttgctgaacttccttcctctcaatctcttcgatttgacccatttgatcacttgcactattcatgtgtagcttattcttttatacagaaaatctgtaatgtcaaaactcattaaccaaaaaagtgttgacttctcaaatattttatagtcaacgtcatgaagtaagaaatgtacataaaaaatgaggacaagccactaaaatatcattgtttcacctcactgtatctttgacattttgaagaacagctctaaattcacatggatttattcctcaacttgtaaattgtagtgtaagcaagcatgtactaagtttatcttatgagaaaaataagtagatttcttgggcaatgggttacgatcaacttgttgcataaacaatcactcaacttactaagcataaaaaaataaaaattatgttctttacaagttgaagttggagtttagctttcttgagcaatcgaaattcaatactgtagaaagaatacataaaacattcaaatcttgtttttaacatgtgcgatcactagttacagtacgaaagttgttctaaaaagatactctttattgggatacaaaaccacatattatgatacaaaatgtaataaaaccatttaaaagatggatttgttggatctgtatataatgtttaataaaaactttgccattcccaccaaagtcttggccaagaagcagctgatgaataggagcacattattgatattgatttcgtaatcctctccaccaagacacaagagcattttttggtttttttggaggtgtaaggacgtgaagcatggtttgcttctcttttggagtcaatggaacacttctgacaaggtttagagccatgatatgaacgctattcttctctctgtaccactggtaagtccataacccgacaccagcaccaaacatcagaacctatggcaaaaccaaatgtaaattaaattaacataaatttcagaataaaatggaggttttaagtttacaaaagagtaagccccttgaacagaccggtgatagaaaaacgacaatagtcttgaagtcaaatccttcgatgttgggttcatatagtacggtatcaccaaaatcattttccagctttttaaatatctccttgtctgaacttcctgaccgaatctcatcacggattatctgttaaaagcattgaaaatcactaataaagagaatggatgatcttaattgcaaatgactagaacaaaaagaacaggaagctttcacggattcccattagagaagtaaaagcaacagggttgcagtggcatgtttagcatgttacccattgcgaattacaaaactttatctactactattgttcaaaggtttcatccactgtcatttattaaaacccaagttcatataagactaaattgaactgacagcctacttctagtctacacttgactaaaattttataggagttgctaccaaagccacttaagtaaatctaaagaggggcaaaaataccctttagaaatggaacttacctttctaagaagaatagcaatatctgcttgagaatcttcaatagactggctaccacattcggtacagcggacattgtgactgatgttccttgctcgagcttcaatcacctgagtcttcttgactacatccccttctttctccatttatacaaacaccccttttcagattctacaaaatattcacatttaacaacaacaacaaaataccgtttaaaaacttggagacagttaagttcactgaagcattttatcaaacatctacagcgcaaacagaaactcccacaaaaacaaaaaccaaaatacataacaaagaaatgcaggtgaataaacagaacgaaaacccatcaatgcggctagaagcctataaattaaaattcattgaaaaaaaaccgtgcggttcagaaagattagaatttcaggttttgtgtaaaagaacccagtcgagtgcccaaaaaaaaaaaacaaaaaaacttcaattacttatcagagaataaagaaatgaaattcttgtcctcattcattaggtctattaacctaaagataaatgataattatgaaaacttactacgagagtggccgagaatgttgctattgctgttgctgctatgaacctgagaaagagaggctagaccagagggagtcaagctcagctcacgccgagaaaattaccataagggtataattgtaactttgagttcactaaagaaatgttcatgcagtcatgcgattgtcgttttattcatatgttgtcgttttatttatgaaattgtcgtttttcatttattatcgtcgttttcaaaaattaatgtcggtcctaaaaacattttgtcgttattttcaaatgttgtcgtttcattgattattgtttttttccggccgtttttccagattttcatatcgcgttttaaaaaaaaaattaatgtcgtttttttaatataataatcgaattatgaatttcgtttcttgtttactaataatattctcgtcatttttgctattgtcgaagaaaaagaaaatattgtcgtttttgcttgagcaaaagaaaaagtattgtcatcgtttttttggttttacactacacataaatgaac

SEQ ID NO: 224937 - DNA, 4043 bp, Cannabis indica
tttatattttaaaatcatacaaaatacacatttaaaataatgaaataattcctataataaataaaaaataattgtaataaattacgacaaattgtgactaatgccttgattagtcattaactaaaagatttgataatttcttttttctttagattgttttggttggggactatacaggtcctctgcttctttttctggactatttcattgattcaggttactttgtcaatcactggattacaaaaagcagtcttattaaaagagcataaaaaagagatgagtgtcactacctttaatgtggagttttaatattagtcacttatgcaacatggcacattcagctctaactcaaactcattggcggttaagttagttaagggatatgtcaactcttgatgctagctatataagttgccattacacccttattcggatcagctaacacaaccagtatagagagagttttgagagaaaagagagcagtgagagaatacaggagcaagactcctttgattttgtattcctgcacaaagtactcaatctttgtaatctccattgcttcatcaataaagaaacaagttctgttgttccccgacgagtatacacaagttaaaacttacttgtgaccgaacctcgtacatgtatgtgtcagattttaattttattgtcactgcattatttttgatttctggtttagcgttcatctcagatttgtgttgatcaagttaaaatgtattttctgatcattggcttttgttctttgtcgtgtgttcttgattgaggtgaacctttgattcaccacatttacaatcatcagttaagtgaagttttagttgtatgtactactttcatatgatttttcatggtttctagagtcgaatcttattaatatcatatgaatttgtagagcaattgaacaaagatggtggtttagcaatatgtttatttcggttttcagatacgttactattgagaggcgttgcctcatattaaataaaataaggtctgaacttccaatattttgacatttattttggatgtctcaacatctctgggtttatatcagcaaatcagttatgaagtgtcttgacgatgtgcccattttgttcagagaatcagaatagagttaaccgaatcagagagtgaagttttctggtttgtagaacctggtaattcagagaggtttttattgaaagagataaagaactattctctggttttgtaactcttcttctaattgatctcgatacacaattgaggttgtgagactgattcttcatacctctgtaattacattggtggctgtaatctcttctatatttcatggtgaattaatagaagtagaacaagctttggaggcaggtagcaaaagcacattgcttttgtctactgaaccgagtaatctttggtgttagttgtttgtgtgtgcatttgttgtgttctttgtgtgccttctttttccatctattctcttggtgtttaatcctaactgttactttgagtttgcttggtgaagtggacgatggagtgggcgcaatggagagagggtgcaaatgagtttgtttgttgaaaatttatcatttagtttgtttaccgtgattatttagcttttatgtgcccataaagtttatgataatatgtactttggcgtgtttgaatggtcttataataatcccctgcctgaaataatggcttaagctttctttaattttctcctattgttgttgtcgagaatatactcatggtggtatataggttgcataatcaatacaactaatttgatttacggtattgatgtttacagtaatatataaactttttctgtagtcattattcacaaccaagagattggagagctgtgttgtaagctgcctggatgcagcctcataggtacttatactgtgagggaattagttttgcttctgccccctagggagccagaagtttttgtttagacagggcagtgagtttgttttagtatccctaatttcggttaaagctgtggaacctactctatttttgtaaccacggtattcctccgccacaagtgaggatttttatccatatcggggatgggactagtctaagacaatggcctcgttctcttttttttttttaaaaaaaaaaaaacagaatattcaaatcccacttcttacaatacatcattacattcagaggatgtgaagatgtgaagctataattatttaaaactatcaaagatgaatagcaaaattgtgtttacatttcagaggatatggtgtttctgtgagatggtgatgcttatataggaagaatgctctgtttgactatgcttctgctttctgttttttcaagaagctctttaaagctactgatttctattaaaatagtcttttatagttaaaggcttatattcatggtatccaacaagcagcggaagtcaaaagtggttatagaacttcttaagtccaaaagtaatttttgaaagcctaaccaactaagaccaaagtttgttggtaaacacaccaatggtatagactaggggaaatgagctcttcacgatgccctatcaacttctgctcttgtgtgttgatcaaaaaaagaaaaacttctgctcttgtgtgcataagtgtatcttagtgcacaatacgggaaatttgagaagactttttatgtagaattcttcagagaaaaagaaaataaacgctacatttgtgatttaacgttgttggttttgtaatatctgtaaatgtgattacagcaagacatgtgatgagtgggtttaagattcatataaggttccaattatgaaaaccatttaagttatgctggaaagcaccaaatcaagttccataaagttcttattgatagatttagtttcttttgctatttattcctactattcacattatccttttcagtttcaaccaatttttgcattggccaggaaaaatactgagatgaaagtctatccaattacacagtaacaagcagaaacattcattattgaaccttatacatttttggaggaaaaacataaatttctcccatagcagattgccaaaataacacatcttctggcgttgtcttgtgacctaggctgttgttatcaagatcacagttaatatgaaatcaaaattattgtatgtcttcatcttaaaagagactcataccaaagttttcatatttttcttaaaatgaagttactcatgattttaccacaatccacaatctaggctaatattaattcagaaaaagacttatgaaatcaaaaatataaacaacattaaaaacctaaataaataacaaaaatacataattctaaagtagattagtagttagcactagctaaatctgattgcgaattacctgagattaatgaagaattaatcagaagtatgttttgattcttgaccttgttgttgagatccttgaccttgttgttgagatcttttttgcataatttgcatttgttcccttacaaaaaactcacgtactttcggatcggctatagaattcaaatctgccagtaaaatcttattttgctcacgatattcagccaaagccaattttcttgactcaatttgagctcttaccatttgcatttggtaaatcttttgcctaaatgagttgttctctttgagcatctcaccaagttgtcgattttcttgttccttagtttcgatggcatctgaactttcaacgctatttttccttttagatttcgctttgtccattccattgggttgttgagttgaacaatgcccaaaattctcatcgaatatttttagagaaaatgatgacaattcaagcgattccgacgttgatgattctgaagtaggtgactttggttctgatactacaaaattttcatgataattatcctgataattttgataatttcgccttcgagagactgatattcgagtgttgatgatattattttcatattgttcagaatctttaagaatggagaagacatggtcaaatttgaacccttttttgtaatttttatcttgagctaacagcactttagcttgatttaactgcaaaaatggtataat

SEQ ID NO: 224938 - DNA, 1481 bp, Cannabis indica
atggggcatgagaacaatatgcatgtatcttttcatcttacttgatttaagtttaacatgggatttaagtttccaattattgtgatcagaaatactcttactaaatctatatattctttccattttaattgattattagaaagcaaattcatttttatatgcatacgtgtgatatatttttgctcctttaattttcttagagaatgataagatgttttggtgttttgtgaagatattactaaattgaataatcaccattgaattacaatatatgttaaaaatgtcctatgttttcgcaattgtagatcaggcattttctaactatatttttgcttgctttggtatcctagccatcatcttattttgttgtgagaagtgagatgtttagtggtggttgaatttatcatagtatgagagcaatattaatttaaaagtttgtatttttgcctccttagatcgatctttgaattgtacagattattattaatagctactgattattattaagactgttgggatcgaattctggactaactttaagtatgaacatctactcacttttctgttttatttgtagaattatggggcattccgaaagtttttgtccacggcatttcgaggttggagagggtcagataatcaagttgtatggggaatggatgtgagtgagacctatacataataaccacatgatcggagctaaatggcttaagcagtttaatgctgccatggacgatgtttctgcagtaaaaactatgggtcatggtgaggtgtctcggtcgacgatggcaatggttgaggggaatcgtggtgtgttggggtcagggtcgatgatagtggaggaaacttcggctcaacgtgaggcagggataggttcatcaaaggttgttaatgggaatcctatagttgtgaaagatattttatcagctgctcagaataacaaaatatctaatgatatcaatgaggaggcttgtcatttggttcttgatacgaagaggagaagaacgactatggaagatattgatggggcccatgtgaggggtgatgtggcaacgggtcaagaggtaaatggttcaaagaacttgagtttggtgggtactggtgtccagacccaccaaccattatgaatattttatcttggaatttctataggcttgggaaaccatggactttacaattccttaaggatcttgtgatctaaaagaagcccagtattgtgtttctctgtgagactctatccaatcattctcaaatggagatagtgcgtgtgacgttgggatttgatggcatgattagtcatagatgtcaatggtaggagtggaggttttgcgttattatggaaaattgaggatgaagtgtctttgcttggattttctgatgcttatatagatgtgagagttgcttctgaaggtgtgcaggaatggcgtttcactggtgtgtatggggaaccgaataggagtaggcgtgcttctacttggaat

SEQ ID NO: 224939 - DNA, 2613 bp, Cannabis indica
tgtgtgtgtgtgttttgggggttataaatgtaaggggagaggtgaatgcatatcaacaagaatgacattgtaagaggaatcaaaggacaaggtgtgcaagggaaaagcgtgaaaccacgccttctaaagactctgaaagtgagaggttcgagtagcagcgacaacggacctaaaaggtttaaggacccgaccaagaatatgctgcaaccactctcctgcaacctgtcactagggaccacacacttgcaatcggggaacacatgcctgcaattgaggatcactctcctgcaattggggaccacctgacactagacaagggtacgaggtacaagaccacccctaacacctgcgacatgcagcttgagaaagaccttttgtccccatgggaccactttgtactcaggccattagagcctataaatactcccacctcaaatgtgagaggggattggaaaatcatattgagagaaataagagttttctccactattctctctatttcaagatagcaatctgggttcatgtttcattttcctcttcatcccatttctaaacttaaagcataagttggtttttcggccataagttagttgacgagttttcaccgttaacaccaagtaaggggtaaattggtcttttcacctaacctatctagttttgtccaaagtgtgattctagagatatttggctgaataaggataggactgaacttagaattttaaagatttatcattttacaaaaaaatgaaaataatgataacactctctctccaatctttctccgttctctcgaccaaaaaccaacccaaggaaaccctcaccaataccaaaatttttaaagttgttctttcatcaaactaatcagaaaatcttgctagaaatcagcagtgaagtgaaggaaataaaaggtaaacctaagtcctcttattctcttttaattttgaataaaaatattagttttaagtaggatttcataaattagtttttgtatagtgtgattagtgttcgattatgtttttgagtttgaattatagtagacaatgagttgtttaaaggttgtttgttgttgtatgggtgaaagcttcaagtttgagttcatggaactcaagcttgagctttaatggtgaatttttgattttagtgtaattttgtgttctgtgatgtttgataggtttattttgggtatttatactattctagaagagttggtgatatttggcttaggtttcggcaaatttgagttagaaaaactcgagtttttggtttctagtgcaaatcgtttaactagtttaggattcagttaatcgaatggtcaggtatgcacttgggaattcagttaactatttcttgatccggttaaccaaatgaggcccatttttggtgccttaatttttgtgttttatcgatatttaggatattgtcacaccatttattgatagaaaaacttttagttttaaatttaagtcctagaataaattcaaataagttgtttaccagtttatcgctgttgtgacataggagcccggatcgtcgagcgatttctactcaagttgatcgtcacgcttgaatttagacttgaggtaagaaaagtacaattgcaccacatagcatgccaatatgtaattcaataattatcgtctataagaaggagttattactctattgattgtctcattaggcaacaatataagaaagagtcactactctaatatgaaattattattaggtttcttacttatcgattgtctcattaggcaacgatagtcattgggtcaccactttaggcaacggtgagtaacggttactttattaagtagcaactttagtttgtcttattagatcaatatctgtctagtaattttttttagtggataatgtgattttctggttatggagtgaatatgtgattatttagttataactatatgagcatatctgattatgtctacgtgttgatattcactgtttatgcttttgcttttctttttgagttagtcacaaatgctttgtggtgcaagtaaggaaatgattaagctaggtcaactatgagttagaggtctttcataactgtattagtttatccggctagcaatgccgagtagtcatgatttttgttttgtggaaactttgatgagtggaagtattttgttgtaaagctgtaatggaatcttttataaattttttaaaaggagatccccaactctaattattttatattgtcaaaataattttatatctcatatagttattacttaaagtaaaatattttgtaaactattagtttattattataaactaatttataaaagtacacatgtggcatccttacgggttagggcgatacagggtggttccactgctggtcatggttttgctataccccaaaccccaaaaaaccccgagatcatcctagtgtcgttgccatcactacgagcccgagatctcgagacccaccatcgtcgccatcgtcaatgctctaagatcccatcatcatttttcagtgtcatcgccatcgtacgcatcgttcaccatctcatattttctctctcacattcttcagatctgcttgctctcacaccctcagtcttgctattgcggaagaaaaagaaaaac

SEQ ID NO: 224940 - DNA, 5051 bp, Cannabis indica
acgcaactttcatttaagcaaagtaagtgctttcttctatacttcctgctcacataagtagatgagcatagttttcacagattctgtttcttcctcagtgtcaactttgtttatcagctcgattatagactgggtttgaagcatttctctgatgatactcctgctttcttccatccttcctttggcacatagacctcttatcaaatacacaaaacccaagaaatcaggtaatacatctttcttcttgcactcgaaaaggtattcgagagcaccttccatatcaccattatggcaataaccatggattagtgcactaactgtaaatccatcaggcttaaggcctttggactcagaatcataaagcagctttagggcttcctctatttgaccaattttgcaataaccataaataactgagttatacacacggatattaggttgaaagcccataaggaccatcctcttgaacaactgcatgctatcttctagaaatccctctctacataaagcaccaattagaatagcaaatgtcacttcagatggaaataaatcaatcctctctaacgagtcaaataggcgaaatgcttcaacaaggcaaccttggcgacatagtgcaccaataactgaattgtaagatacaatatttagagtaatcccctttctcttagcaaaaccaaaaagatcaagtgcctcactgatatgtccttccctgcataggttgttaacaacgtatgtataatcaaagatatccattgcaggtagattgttctgagcctctgttataagttgatacaaatctaaaactcttccatctcttataagttccttgaaaagaattcgtggcaaagtgatagttgcacaattgtattttgttttttctaaaaataaaagggcaatatcaacatctttcagacatagataatgcgctaaaactttgttaacccgaggttcactaacaccatattctttcaaaaagctatttaaaagagctaaaattatctccttatttccaactacaagtagcccttttataagtaaatagtaagatttgcttgttaaagttaatcctttccttttcattattgtgaacacttcaagtgcagcctcaggataacatctcttgcacaggacactgatcacagtgtcgcataaaatatcatacacatctgaacccatgttctccatcctgtaaagtaaatttgaaatcttttctgctccattcctttctatgatttctttaattaacattgtacatatacctgcatccaatggcagattcttctcattgagttcaataaacaccttagtggccatatcaactacaccccgactgcagagttcactgataagacaattatagcaggcaactgaagaaattgccgtgctcctaaactcatcaaatatttctactgcctcatcaattcttcctactttacaatatccctgaatcaaggtacaatatgtaacagaatcagcaaacaaatccttttcttgcattcccttgtaaaccatatacgcatcttcaaatgctcccaccataaacaaagccttgataagtacattgcacataacaacatccatacagacaccttcttcttcaaatcttttttttgtctccaatatcccactgaaattttcttcaatcatgtacgcatgtaatagtgtagtgtaagttattgaatctcccgatatactcttggaaacattatctgcctcagttgtccttccaaacttgcacaatccattaatcaaggtgttgtaagtaataatgcttggactgatccctatcttctccatctcattaagtagatggaaaacacgatcgaaatctccaatcctgcaagtaccattaatcaaagttgcatacatgaattcatccgctttaatccccaaatcatcgacaattttcaaaacatcaaacgcctcctctaatttacctttgttacaaaatcccaacataatggcagtaaacgtaatcaaagtaggctggagtccaccactcctcatcttctcaagaaaaccaattgccttctccacatctcctaatttcgaaaaagcatctatcagtacagtgtaactaattgtatctggaattattcccttttgcaccatttgcctgttcttctgaaatacctccaataaaaccccttctgaaataaacccacaaatccaactactataaaaaacagcatcaaatgccactccttccttctccatcctatatactaaatcacaaacctcattaactttacccattttacaaagagcatctactaaagtggtataagtcactacattaggctgcaaagctccagaatttgtagcattctcaaaaaatctcactgcaaattccggcttccctattctacaaaaaccagccataaccgaactacagacaaaattgtcaaaagggtatttcacatctgtcataaactccaagacctcaatcgccttgctcatatcaccacgggagctaaatcggtaaatcaatgaacaaaatgtgaaagaagaaggcaaaatacctctgtttttcaagcaatcccgtaacaccaacaatgctctttctgggtcctcgtgatcaatgcataggccacggatgagagagtcccacagggtatttgtcgaagaattgaaactttctaacatttgggtcctcaggaactgctctgcttcttcaaacctccgcaattttagaagagcgcgtgtaaaaatggaatttgtatgggagtttcccttaatttggttggagctcaattgacagaaaaagtggatgattaaattgagtttacgagattgggataggaagatgagaaattgattaatggattcgacggtgggagtgaaccctctcttgagtaaagtctgaagaggttggagttttgaggaaggaatacaagaagaggaaaaagaagaatggtgaagtttgtagcgaagaaaggttaacatttggtcgaagattaagtgtgtcagaagaagagaagagtaaagaaggacgatgaagttagccgagggagactgcccgggacaaaccggcgatgtaagctaaatgaccctctctcaactttttcttttagggaaatttactattttacagaatgtagcaacttttgaccacagtttatggtttcgggttggtgcaaaggatcacaacccgtatttggtggaggccaaagcagtctatcacaggggtacaatggcaccaaatatagctgaagctttagatattaaagaggcgttaagttggatcaaggatcatgaatatcataatgttcaactcgagttcgattgtctctcaattgtctaagctattcgaagtaacatcaccatggtttcacctcttgagggagtggtgatggactgtcgatagcttctatctattttaaacaatgtttctttgtttttcattaaacgatctgctaatatgactgcgcacagctttgctagagcatcatattcttttctagatcgagtttttagtgggagagatgttcctactgaattacagtcttgtcatttgactgatttagcaaattaataaaattccattttgcattcaaaagaaaagtgtatcagaagagaagagtgaagaaggacgatgaagttagcagagggagactgcccgggacaaaccgagaatttaagctaaatgaccctctctcaacttttttttagggatatttactattttacaattaaattgcacaaataacgttagtcattactaataccgcaatttactttttaatttgatctttcttttttgttgttggtttaactttattgtaaaatagagcgtctgccgttagaatgctctaaggcggttattttgtaccactttttggtttttttcttcttttcttcctgatcattcatgttacttcccttaaccgccccacgcacttgcatcttctcttttcttatcaatcactgaattccccccatttgaattatgaatccatcaactaataagatgaaaagaacgatgatcctcactgatgaggacgactcaacactgattttggatgatgatcaagacaacttaactactagtattgataatgttctggttgcacaaattcttacaacaaaaatagtttttctttctactttgcaaaaatagatgaaggttcattggaatggcagatttcacactaaaatcactgaaaaacctcctgatctctttgttctaacctttggatgcgaaggagacaaacagagggttcttcttaaggagctttttcattttcaaaatcatcgcattgtgttgtacacaccaagtgctttacaaaatgtctcgccagatgatctcatctactctccgttttgggtccaatgctatagacttccttttcttagtaagtctaaatcgttggtaaaagcattgggaaacatcattggagaatttctagaagtccatgatgattcggtggaagaagtttggagtccattcttaagatttcgcgtcaaaatggatatcactaagcctctgctcaagggtcgaaacattagactccaacaagttcgtgataaattttgggtggaatttcgttatgaaagactccccgaatggtgcatggaatgtggtaggcttggtcatctataccagaaatgcatagtatcgatggaaaaaatcgataatggaatagagcctgatctactttatggaccttaattgaaaggggttgctctaccaaataatagttatgacaggtacagaactaatttttcgaaaggaaatgcttggcctctacttacgcgtttggctcaaaaatcctttactgctgcaattccaaacctctccaacagacaagcttctcacccttggccactattaccaggataatcatctgatcaacaacaaaataccaattctgaaacacatcactccagtttagtaccagtcacgaataaccccttacccacggttaggattgctgctacttcacttgactttgtttggtccacaaggaatgttcagaataatgccactattaaagtcaactacaaaaaatgttatgttcgcaccaacattgctaaataatcctaccaac

SEQ ID NO: 224941 - DNA, 3791 bp, Cannabis indica
aattaaatttaatactacaccttatgaatacttaaaagtgaaattgcaatacatacatcaatgcatttcaaatttaggtttccccatatttatgctctgaacctaccattttaatgtctctgtttttttttttttttgcttttcattttaagtacttaatttcattatgctatggtaattgaccataacttaagttaatgttaacaaacctgcacatctttcatcaaaaagagacatataagaatgagagcactcagcagcagcagcagaaaatccctcgccactatccaaagccttctcaaatgcttccttaaatttatccaaagttccagatcttatatgtcccagcaaagtttgaaaagccggttgtacaagcttcaagacagcaaaaaaaaaaaaagcaaagacaagaaaataataatcaatgaataagactgcaaatgagaattaaaaatcattgtgagaaacattcacaatgtgaaattaatttatctaacttaaatccacactataggctcaatagcctcccacagagttctctgtaatgtgttattaacaagcaaacccaattccagtatcttttatgatagaatcttgttgagaaatgactcagggtactttatgctattgttatgtatttttaataagccaaatcaaaagcaattccatgcaaattagctcacccctttgaattttgatcaatataaagtgaaaacctaaaattttacaccctcaaatcatcaagaaaataatgttacactcatgattgtgtgtgttttttaatctcaattcctggagaaatttcatgaaagggtgggagccaaagtggttttcaaacagaaagtttataaaatattgactaaagattaagttggagatcagaaaagtgaatacttgtagcagtttttcttcaagctgcttccgctttgaagatcggacaccttcatcaaaatatgtagcttctgcatcatacctaaacattaatttcaataaacagataatcaataagtaattaaagaaatgcaaataagatcttgagcatcatgagtttcttaatcaaaagaatcacatagcagtcctgtcatttcatgtatctgagaaggtaatatcaataaattaaagatttttggcatgcagacacaattatgttgtttaattaaagtacttggtaacaagaaacaattttccaaattttccaaattcaaatgatctccacttgacgatcattcatcactctatgaaagaatccatcgctttctctctcaacctcattgcactggagattttgttgatgtacaaaaaccattcaaaatacttcttagaaacaatggacttatttctcaggtttcttcaaacagttgataaggatgacgttaagactttaaatagtctgaaatggttgacttgcttaagactttatacatctgtgacccaaaagaaagtaaggaatcaactaccctcacagaggagcatgaacttttgagccatctcaaatccatcgccaagaaaatcactaccaataaagtgcatctgccgggagttgaacccaggtctattgcttggaaggaaattatcctaaacgttggacactggctaatttactatgttgtgtgattcttaatctgaagtaaaatattgttgcaaacattatcccctaaactacagtgtaagtagagaacaagtagcagcaattaaatttttacagttaatttaataatcaagacaaagattggaacagtcaaagccatagctgaaattgtcaatatacagaacatggttgttaatgacaaagcacgtatctgcagaatgcatactgaggataaccacaaaggaaaggaggaaatcaatttctaaaatgcataaaaatcatcctccaatcacacttgcgattaatttttgtttacataaaaaaccaaacaaatcttactctgtacagacaggtatcaagaattgaagtgagcttcttcccaaatccagtaacaggaccaagttgtacagcctcctcgagtgccagccagtactgtatcattgtttaagcaattaattaccctcccacaagtttaaataccaaattaacttaagtcgtggaaaagatgtaaatgtatgaaaatatggtacctcatttcctgaaaaaccagagaacttctcattggcaatttcttcacagcgcacagtagccaccataacctgtgaacaatgaattattaaaatttgtctcttccaaatgtcaatatttctgtatatagcagtacaagccacagtataccctggctactgcaatgagctggaatttgatacgataatttaccttgtgggcaggaagatcaaggtctttgttttccttgatgactttccatatttcatgtgcactaaaagaaaaccctgaagcaggaacaactccccttcgatctccagcaagtccaccaggtgcaatcgagtgaaagaatctctgcctcaagttagcaacctgattcatagaaagggcaacgagcgaaagaaaaccaggtgtaacaagttataccttcaaccaatccaaggtcttcaacatgtaaacaacaagaattacaatagacatctctactttaccattttataaaattcataaaataaactaatttagtttaaatatttaaataatttaatgcaacagtattttttatttttatttttattttttccaatgcatgcaacactaaaaataaattaagaagagataaggtaaacattcactgccatttctcaacaatagaaaactatttcttgtaaaatatttcaagagttcagcaacttttcctttagtttacttttctttcaatacaatcttccttttgatatttacaaacaatgatttagagaagcaagaagaaattagaacatttcacacaatgtatcgacatcttgtacacattagaagcaaattccatacctgctccctaaatagctcttctttttcttcataacttgaaagagctacaacctcaacctatagcgaatttggtcaacaatagaaaccaatgtcaaataaaaagtgtatcataagtgaaagggaatagtagtttttataaagagtatggcatctcacattaaaaaattcactcaaaggagtttccaaatgagcttgaggctttggcaccgagtcccatatctgacgaagaaaaaaaaaggaaaggaaagagatgttgaaaagtaacatatagaaaacccaacaaaagatagaaagaaagggaaaaaacactaaccttctgaatatcttctctaagaacaggttctaaattctccaatggtgtctattaaaaaaacaaagaattaataaatctcactataaaacccaactcttgacaggaattatctcaaaccatgactacaacacagatcaacgaaaaagaggaacacacccttgtcttatcacgtatgacaaacatcaaagttgttttacgtggactaaacaaccgcatcatcacctgcaagaaaataaatgataaaagctaaatacattattatttctggtatttgagctagcttctaaacaatggatagaagagagaacagcagaaagacctggaagacagtttttagaagaggcttatttgcagcttgctcacggccaatatcatgacaccacctacacatagtagttgaagatgattatctcccaaactataaaaatccagcacatacataaaaatggccggcctactaggtaccagaaaataagcaatagaagtcagtaagaaaaaggaagaattttcttacatgtttataagaacaatatctgaaacagcaagagcaaa

SEQ ID NO: 224942 - DNA, 4060 bp, Cannabis indica
ctcaaaatttcttacaaacttttccctctactttatagagaaaaaaatttagtaagtcccacttaatatatttccactcatttttctcttccctccactcgtctttactaccaaacaactttttttttccttttcattcctttcctttatcttctctaccaaacataacattataatatgttaagaaaacaaaacaaaataataagctgtttggtaggagagaaaagtgaaggtatgaggtagaatggatggaaaatatggtgaggcccgccaatttcttgtctccaaaatgacaagaaatgggaagataaaaatttattagccaagactttaagggtaatatagtaaatttcacaatatgttaatttcattccttcctatatagaccaaataatcaatgggaaaaaaaaaatagtcctttcaatccatgtatatatttccttccgccctattaccttttcatattttctttaaatcatgaaccagaaaagtcaggtttttagcaagaacaaattactgtagcaaacacaaaaagtgaagataccatacagtaataaccaaaacagataaaaatatacactaaagacatctttcaaacttttttataattaatacctcacgcttaagccatttcctggtacaggagagttacagctgtgacacttggtatgttttggacacaaataaggtccagaagaaacattctgcattatccaccaacaaaattaagaatttagaatacattttttaattgcaatgtaagaactcagcaatacacatccacacgcaccttgtgagaaggatgttggcagtagcaatggtaagcaccatcacaccttttacagaacataaatttgttaggatctcctgttctccggcatacctataaaagaaaatgtataacatatttactacatttctgggttattacatttactttaaataaatttacaacaagttatagcaaccatattacatcttttcgtcatattgacatggaaaattaaagtaataatatcaaatttctaaactagcaatgatgaagttcttacaatcatattgaataagaaggaagaaacaacagttttacctcacaaattcggcaagaggggcatgtccatgaactccaatgaaacagatctgctaacaagttccactaattaggatatgtgaaatttgtagtctaaagaaaatgcttggaccaataatcctacctctatgttgagcccaacttttcaagcagtttctgtggtacttcttgcaacaagttttgcaagaaagcatcctctttgctctttcacttccttcattttcaccaaaaaagcatattctgcacaatacattgacattggactgaccctgttcttctcctgcagaacctctagagacatcctgtccgagaagaaaaacggcaatcataaattacaaatttggaattgtacagaaatcatcttgactttcaagaataaacaaagacaaaacaaaaacaaaaaatataacacatcatgtgggcagattaataagctcatataaagtcactcagcaatagtacctctagtgacaaaaggtccatgcgtgagtgagacaatacagcaataattaaaggtctttcaccaaatttatcattaaaagaggtcctttttccttatcaccccaaacccagaaattggtaaaaacaaatgcattataaccagcagaaatcacaatggcaattgactcccaacataacaagatcataaaaagtcaactaatttgcagcaaaggacgcaaattagggtttatgataaagagtccgatctattctaaaattctccataacaaaaaagttcaagatactaaatttcttctcaaactcccaaaatttgcaaacactgaaaaacacccaaccattcaacaacaaaattacgcacaaaaaggtcaaattttcaactccactacatcaaaaaaacttcccaaatcatcacaaacaaccaccattccaacaaaaaacccaaaattgagaccaaaattcaaagaacctcaccgccgccaaatcacccgactcaaatcgccgagcataatcttcagcagcaaccatagccgccgcagctttacgctgcaacgcagctcgtttagcttgagccgacgcagcagcagcagcttcatcatcagcgatattaacaaccacatcacctaaaatcgacaccaccggttgataaaccgaagacggcggaaccaacaaaggcggaggtggctcaattctcggaacagcaacctgaatcgttcctcctttctcctcccgaaccctatttccccaaggatctttaacaaactcctcaaccttgcgaatctcatcaaggaactcattcttcgccttatcagcaacaaaccctagcgaacaaaaacaaatcctccgactgcaaaaaacacagatatagagagtgagaatgagaatgaggagagtgaaagagagggtttttagagagagaaagagatagatatagagagagaaagtactaaccatgtaattgggcaagctacgtgaaatgccatattgaagagagaaagaaaagattttgatttgaattttttctttttttttttcttttaattatttttgagtgtgtgattttagggatttgctctcgtaaaaaaaataaaatttagttgggaaaaaataaatttatttatttattaattatttgttagtgttttattttgtgagtaaataaatattattattatttaattgtatatattaagagagagagagcgtggtgtgtttagagagagaaagagttagagagagagagaagagagaaagaatgagaatggtgcggttgggttcgggaatttgaggatctgaataatgggtgcttggattagacgatgtcgttttgtatcacggatcataattacgatgtgtcgttttatgttcaataaacgacgtgtcgttttgttgtcatttaactagacgacaatatttgcgggggtctgtaatagagcgtgtcctactctttcatttctagttacgacgtgtcgtttttttgaattttaataaagacatgtcgttgtttgttagtttgactaaacgacaatcgttttgtttgtaatcttccatttgacgacgtgtgatacctatataaagtttatatattttactcgaatgattaaataaattagtttataatatggttttggaaattttttggagaattatttaatatgttgtatttatttaagatattttgtaaaattttgacacatttgaagaaatttaacactctaaaaataaagtttaaatagtttattacacgtgtgactcttttatttaatacgattatgatatagactatcacactactttttatattataaatttattcagaattttttaaaattttataagatgtacacaactatgaaaaaaattaaactacaatattctttcgaatatcgaaacagacaaggggtgcacggtgtaccctttttaggagtgtgcactgtaaaatcattctatggtttttttggtctttaaaattaccgtttctcaaaatgatttgggaatattctacaatacactccattaaaatgggtgtatcgatgcgctcttatctgttttgatatctaagaaaatatttagtccaatttttttttataatcgtgtacgttgtagttatttatgacatctgacaaaattttaaaaaattcataaaaatttaacatgttaaaaatagggtttaaagcgtttgttacatgcgtgacttttttattttatatgagtgtgaaatagatgatttgaacattaatttctataatgtaaattatttaaaattcttcaaaattttgtagaatatcttaaataactataacatacaccactataaaaaaatttatactaaaaaatttttatagatatcgaaataattagaagttgtattagtgtaccaattttagtagggtgtcataagcacccaataaatccaataaattatattgtaagatataaaatcacattactttcttttagagaaaccataccattttctaataaatcgaaaaagtaaaattttttatgttt

SEQ ID NO: 224943 - DNA, 4716 bp, Cannabis indica
ataagcagaattggcgagatgggattaaattttacaggatggacactgtggagcattctctgccaatttcgcgctccgtgtgcatctctaatacacttaagtattagatctcatttaatttaatataataatttttataaaaaatattaatcaaataattaccaaatatagttactggtataattttcaaactttaaaactttggggtgttgtgggattttttttttttggaaattttgtggatgatgagatgaagaagttgtatacactatacaccacttaaatcattttgtatttattaatttttatatatacatcactagagagtagagagtaatagtctgagagtgtcatgtttgtccttattaacaaattccattgactagtctggctatggaataataaccacataattgagtcttattgtatcttattatataactaaaagttccttgaaagttatagtgggacaaattactctaacatacttcacttcattatttatagaaaattttttgtgaagttacctccaatttctggcattgaatctgatatgtttttttgtgaagttacctcaaattactctaacatacttcacttcacataattgagtcttattgtatctgatatgtattcgaaaaaccacttttaaaagaaaacactttcattgaatattacatttcgagagatatatagtatccttgtggtgcttatgcatttgtatcctttatgagcattattataatcaagattgatacacttggtagaataaaattgaaacttgtaggttttgtaaggtcgaagacaaggataacatgttgtcccgaaaattttgaggactttataatcaagttgtttagagtaaataagttggaaagaaaactgatcattcagaataggtgttggcagcctatttgtaaggtggacagttgtttgaaaggcatctccctcaatattttagtggcatatgggcttgagttaaaagtgttaaactcatttcaataatatgcatatgttttctctgagctcttctattttgaactgatgtatgtggacaaggatgattaaaactgattccattttcaatgacaatttgtgaaaaagcatgaatcttaaggttttgattttcctttcaaatttatttttaactaaagcctaaggctaaaacaacttctaatttgtgcttgagtggataaattcaagtgaatctactatgatcatctacaaaatatatgtagaattgatagtttgagttagacatgacatgtgcaagaccctaaaggtctatgtgaataaggtctaaaggagctttcgctcgttcattgttaagtgtaaaagaaagagcatgagacttgccaaactggcatgcttcacaggaactatgtttttcattgatggtagacttgacattaacatgactcaaaacaccactcaagactcgattggatgggtggccaagtctcttgtgccacttatccttgattcaagcagatttaacaatagaaactaaagctaaattggtgttctgagagattttcttttctccaaagactttggtggatgattgtttttgactcctttgcagcttttcaaattgatacggaccttctttaagattcccttgaagaagcacccttctttgttcccatatccttcacaacaaaaaagtctggaaagaattccacaaagacattattatcaaaggttaatttggatatactaatcaaatttttggttatttctaggacatgaaggattcctttcagtattaagggatttggggtgtatgaaggtaaaagtaaagaaccaacatgactgatatgcagcttagaaccattacctatagtgagagtttccttaccgttatactcattcttttgaaccatctagtttgcatctgctatgatgtggttattagccctactgtcaacatacaaagaagtgtcctccactatctcagggatggcaatgaacgtagcagctccattttgacctcatttgttgttgttgctactgttgttgttgatattaggatatgtccccatatatgattcataatagcggttgtaacagtaggttgcaatatgaccatagcgtccacaaacttggcatgttggttttgagttatttttgttatgtcttccaccacctcagcctcgaaatatgccaccagaacctttagttcctcttcctccatattgtcatgtattgcctccacgatttccaccattatactgattgtttgagccacctctgctaccagagaagccttcaaaccttgttgttgtaatattggcacttgagtttacagagaaacatttttgttagtaccagacaatgtactaagccttttaactttattgtcataacttagcaagatatcctgtaattcttgccaagttattaagaatcttgcctctatttgcataatgattggcaaatactcaatgtcaagacttgatagaacattagacacgagttgttttctgggtatgggtcacctgcaagagctaaaatattggtccactgtcatttttgtagaaggtagtctgtcattgacactgctccttttctatccgttcgaatcttcgtgcgatactcatccattttctctcaagagtgagcaccaaacatggtgtccaggacttgccaaagacttgaagatgattcacaccccataacttctatggcaatgctcttggtcatagagtcatataaccaaccaagaagaagttggtcatgaactatctaggttttgaattctggattcatagggacagtgtttccatctaatgtttcattaagtgaaagaaactcgatcggcttaacctttgttttgttcagatatccatccaaacggtgacctcgaactatcgcaaaaactatagttttccaaagggtatagttgtttcaatctaactttggtgcaaaaggctgagttagtgtactggaaacttgtgatacatgagttgtcatggaatgagctaaagattgagcaatgacattagaggcagtctttactgctgattcgtctaaagcaccacgaggggtttgatcaggcatggcgctagtactacaccatcggtgaagctaggctctgataccaagtttaaaaactaagaaaagaaaaaggctcaatgattgaaaaacttagctcttactttttaggcttgttttactttcatttatacaaaggaatacagaatacaataatattctagaatggtatagctcatacaatcattgcaatcattacaagaagggatctcaagaattattttaacagtaatgtcaaagaattttgttacagtaaggaccacacaaaatcattggaaaatctcatgcaatcatcaaataagtgagtgagggcagagcatagtaaaactatgaggaccaactcattttattttctaacactacttacctacgtaatctattgtatataactctatccataatgagaacataaaatgtgtacatcacgggaaaaataaatgcaaaataagcaaatgtgtgcaacaatgtgacttttgtagacatcaagtaagcccatattgacgaagcaatggaggcgatatttaggcaaaggacaacgacaaataaatacaaggaggttgattttggaaatctttttttaagagtggtattgtagagcactgatacaaatgtgagaaataccgaggctgatgagaaaccgaaagccaatgagttaaaggtcatgaaacgtcgaaacgatgagttttcttgtaagatgggattgccgtcgttgttgtatccgccgggaatatggataccagcagcaaatgtgatgcttactatgattgttgccacaattaagttgacattcataatatctctattattgcgttgttgtttaggttgaaatgaaacaagcatctctttctcttttggtatatcactcgagagtactagtttgttatcatcaagatcacgtacactttccaaactccttttaccacaaaaatagtttgtatcaactgccatcattagccaagtaaacaactgcaaagtgtgttcaaagtagactttgtcattaactatattcgaatgaagaatcaatgtatagacataaaattatattatgattctcctatagattttagcacatgaattaaatgtaaaaaatattaatccataggttatttcactaaaaatactaaagggtgccagtagtgtctataacacatttttatgtgttaatatcgttattggttcaactaactatcggatcctctataatttaatataatagcttttagggagtattgctaaccaatcgcaacgcgacatgttgagaaggtgttaggcaccactgttgtctaatagcaatgctcgttattccactcataataacttacttttgaaatagaatctcatagttaaagctttgatcaattataaaaagatattaatgctttgatcaattaattattataattaataaggatatttatatatttttattatattaatgtggtaatgtaattgaaagtgttcttctattttttaaatattgtgattcaaatttaaatcacttacatacctaaaaatctaatataggtacatatctaaaaatatattattattatttaaatttatctctattatattatatatatatacatatatatatcttatattaaatgtggatttccaacaaaaattgttagtttaacattttttttttcaattttt

SEQ ID NO: 224944 - DNA, 4502 bp, Cannabis indica
tttttttaaaaaagaaaaaatgtatccattaataacataaatcaaagtataggacacaatattaaagaggaaaatcagttcctttccacaaagcttcctcatctaagcgtaaagcatactttaacaagacgatgagcaacttcatttaccccttgaggaatatagttgacagtagctttaaaaaaaaaagacagcaagctttgaatctccgttgcaaacctattcagatggagattatgagaagcattgttacaaatatagtcagcaagtatcttacaataaaattcaatataatctggctgaataaaatagtttctacaccaagtaagaacatgctggaggcgtgagcttccattatcaaaggcgaatggaaaccccaccatggtgttgctaaagtcaaaagcgcgtcgttgtgattgttgtgaatagccataccaaaacctattttgttattatttgcatcttgagcagcgtccacagtaaacttcaatcaataggatggtattgttatctcatagtgtgatggctacagtggtgaagcatgactagcagctttatgagggttgttgatgttttgatattgagccaactagtcttcagtccattgtattattttgatgggcactaaaacagaggggtgatgcagatgttaattcttgtaatgccataattttcaaatcaaacaagcaaaaaactgaaagtcgctagctgtgaaagtgctagcatccaagtgaagtaagtccatacaagttagagagacatgattagatataaatttaaaaaaatttgttaatttctataccttctaaatagttaaacacctaaaaagagcatttagtggggtctcattttagtagtggcaacgacaacattttggtgaaggcaaagactttcttttatgcaaattatggttgattaggaggatatcatggtaagcttgccaaaaaagtgtttgatttttgaggaaataggttgagtccacatcatgatcttccaccatgtttgggtggccatcgtgtccaagggtgtctggtcaatttggagaagtgagttgtgcactttgtgctattacaatttataaaaatatacatgtaatatagaaaataacttaatatcgatgtaattcaagtacaaaaaagggtaaaatactatttcacataattcgttagggtataaagctccacatgatgtgagttggtattagcgtaaaattattgctgttaaaaaaagcttaaacaattgaccagttatcaaaacacttccctaccatattgctacggtatataaagtccttatttaggattgtgatagagttttttgggggtgaggttctttggaataaatgtgtggtacctaacaacaacagataaatatatttttgttgagatttgaactattgacctctattatataagtaaggtagcttaacaaatattataccaaatatagtattatgattatatatatcatctttaattacaaatatatgttataaataattaaatacatatatatatacatatatatattttttctaattgtttttcaaaggggagactgcccccattatctctatgtggattcgtccatggtggctaagtatagaattatcggttggctcattgcttccaataaattgtatgcctgagataggcaacggaatatgagaattcactctaatagtagttgtcttgttggtgataatcatgttaaaagtgttgaatacttatttttcattgttgctatatttcttattgttttaaagtatagttagattggaaaacgcaggaaatttttttcaactgatgagatggataactacaagcacgatgtccaaatttcgaaaggttaattttttttgcttgttatctcaaattctgcacaaggtgatgtggcatatatctaagtgacatgtgattttaaaacctggacaagtgacaccatccttggtatgttgtccatagtgaattattccatgaaaataatttatttcaagattaagttggaacatcgggatagggtaaatggtattgcccgaccagcgtcaatctcatagctagtctgtatatgctaatcagggtagatgcagctggaatatttttagagatactcatttattttattaatctaattcctattttaatgggttttccacacatgttgttgtaaaataagaaatgttcctagtttcatttattattctcatttatttgggaaacctaattaatgtaattcttctcaataaatactagagttgtttactattcagggatccaaaatcaattgttctagagagctcttatgctgtaaaaaattttaagctttcgagagagatcaagaacttcgatcttgcttcttttctcacaagcaatacaacaaaaaggggagtaggctattaccatactcacgaggttgaatctctataaatctctatattcttaatgcttaattttatttaacaattatcatatgttctaatcgccttagttgacttatcgtcgttggctaaaagcaaggttaatatttggtgctttcatttagagaaaaagaattgttttgattctcttcaaaacacacaaagatggatgttgctacaaggagggggaattgcactgaaaaaaccgatccaatggtaatagatcttaatgtgaaaactccaggaaatcaaatccagtgaggatggatcctgatccaaccattcctcagcctccaagtggtccccaatttgtaggactggcagttacaacccctctgactgggttcactcttgacacgcaggaaactggaaccaatagtactcatgccgaagacactggcccacgtattaaaaattagagaaccacaagtggcgattggtgatgatacggagctacaaaatttgtcaactactttagggaagatgcaagggcacaccaacactcttcaccaagattaaaaggataccagagtagatatgaatttgaccttcgagtaggaaaaatgccaattctaagagtggatggatcaacaaatggagattatgagagcccaacatgtgatgaatgataatttctctaggcaggcaaccgtggtgattaagagagcctatcagttaactggacaacaatcagtgggagatttcaatatgagatcatacgggatccaaagagaaggaaagaaacttagatccccaatggatcacaatatgacctaaaagaacgtctatccaatcacactcaatagacccatggtaatgaaccgcctagtccgaggacacatgatcaaactatgggccacacagtagatgagcaaaatttttctagcccattatgttggggaatggtcagtataattacgtccttagacaactataccaaactagtcaactattgataatgacctaaaatgaaggtgtctaggggaatcagtcttcaataagttgggactcatatacaatttaagaggcgatctaagtcacatagggagacaagatggaaatttcatccctcctaatattcaaccaattaatgtggacaactacgtgcctggtgaaatttcaaaaggtacagaggttggccaacaagcaactaaagatgatctagtggtgcaagcccagataagtcaatttaagagcctagtacaaaccctgaatgacccaaaacttatcaacttagagcttcactagatgcgaggttcaccattttcaccataaattaatgcccttgatctgctgacaacgttcaaaatgcctatatggaagatgtatacgggcaaagaagatcctctatcccacatcaagcaattcaaaatgaaaacggacttgcatgctgtaaaagatgatgaatggcgtaaaatctttccagctaccttggtagaggccccccaacagtagtacttcatgttagccccaagaaagtttagttcatggaattcttttatggtggagtttcatgcacagttttcctcttcaaggcaactcccaactcacttagaagacctatttgaagtaaaacaaatatcaggagagcctttgagagactacattattaggcttatgaccgagggtacaaaagtgaaaggattaactgaggaaggaagactggccgctatcctaggaggaattgaacctttgggagaattatggaaagatattgaaatgttcattgtggggttaatgggagagtttctaggccgagcatatggatttataaagcttgaagaagcaattcggcatgtagacacagttggtcagaataagaccaaccaaagtcataccactactgctaatacatctatccagactcaaaaatatcatgacaataatagtattttggttcagaatggtaaaaggtcaaataacagaaatcatcaaggcaacgggaagaaaggaaaattaaataataactctgagtaatagtattcttgagagaaaattttgaagttcgtagccttcattatccttactaaagaaatagaaactatcttcacgataactcagtctgtggtgccgtacaaaagaaccc

SEQ ID NO: 224945 - DNA, 4820 bp, Cannabis indica
aagatgacaaatgggtttcagttcagccaatcccaaatgcccttgtcatcaacattggagacactatagaagtaagacatattatatctttacttttttctttgtttcagaatttgggtgttttggggtttcttctttcctttttctttttcttttttctaacttgtacaacatatacaggtccttacaaatggaaggtacaagagtgtggaacacagagctgtgactcacaagcaaaaagataggctttcaatagtcaccttttatgctcctacctatgaattagagataggacctttggctgaattggtggaagaaaataagccatgcaactatagaagatacaatcatggagagtatagtaagcactatgtgacaaacaagttacaaggcaagagaacactggattttgccaagattcaaactaaaccaaacccatgttgaaaaaagagtatagtaacattatatgagaaactagaatgttttagttgggaaaaggaaaaaaagaagagggttttcagtcctttgctaatttcaatgtgatctatacactgtttgtggatttaactatgttctgaaaaatcttacaaattaatgaaagctttgtggggtcttgtacttataatttctttgtcaaattgtgttttgtttttcaatgactaaaaattaagtagtagcaagttgtagtagtaagtagaaaaaaaataaaataaaagagtatcaaacataagtatattttcactttatgctgtttccctctctgagattcctaatatggaaagagccaatcaatcaaaatacttgctaggatggaatctaacaatgcccaccatataattatatcacaatatggtcatgaacaaaaataaaaaaatcaaaaactcaataataataataataatatgggtgctccattgttcaagggaaaggaaagcttttttgtcaatggtgggagtgaggagaggccccaattacatcatgtgtgtctgtttttctttttagttgttcatataattggagtcaaggaaggcactaagtcaaatatatatatattttatatataaagcaagtagttattacatggatattttgctgattctaagctgaagtgacattattaaatgagtggtaacaactagaagagcacatagaaattaaggagtccaaacatttgatgacataagatgtgatctaggctttaatcaaaaaaatcaaaagtggcgtatattacataatttcattgtattcatcatctaaaataggtatttttacattttatactaaaatttttaatttttgcatcttcttataggcagattttttttcaaaaatactgtatttttttttaaaaaaatattgtataagttttatactgtgtattgtgttaagttttcacgattatttcatagttgttttttaattaacccactgttattttgattgttctgttttattgttttacagttattttgtaaaaagacagtactttaataaaaaaattccgtgcagcagtaaaattataaacttttgtctaaaattttgtatttttgtaaaaaccctaactatatatatttacatatatacataatacatataaaaatgagaaatgctaagggcacccatgatacttaacactcttatgaagtgtaagatcgctattagtgtaactcaatatcggatcccatttgttttacttaaataatattataaaaaatactaattaattataaaacggcacttcattgtggtgttagacaccataaatgtcttatagtaatgctctataaaaaatacataagatttttttggggagggctacagccaacagccccctaagtcaatgaatggctcaatagtctttggagagtggagactagtgtagtgtcagcaaccataatatttctcttttcgactaaggcttgttagcccctcttggatttaggggtagctctagtagggagggcttgcttgttaatttcctcaaaagaaagttttcatgggcattggacagtgttactaaatgctagctagggagctttatcttctggtgagctacattttcaaattaaggacttcgattctagtagcatgcgtgtatgtcctcttctataatttgtgcaacctattcgattggcaaattggtgggggtttgttgttggaggcttcgctacagttcttgttgtttaatatgaatatggggtggagttggttttggtgtgcatgagacatgagtggtggtggtgtttcataaatcaagagaaaagatactttaggggttcgggttgtattcactatactaaagagaggaggttttggtggtggggtattgaatgggtggggtatgtcaaattatatattaactattcaaattaaatttgtttatttgtttatttatttattttgaatagaaatgcaatttcatccatttaaattattcaaaagaacatcacgtaaactattcgaaatcgtaaaatctaaataggttgcaatcagcatttaaccacgaagttttagctaaatagtaagcaatataattggcaaatcgtttgacaaaaactaaaaagatattattcaaactagaaaaaatttgtgcacactctgaaatgcataactcaaaaaaagtcatatctaacgaacttcggattagcttggattgtgaccaaattgttcgaatctaccaccacatcaggccatcctatttatttcaactaactcagcacctcattaaccctgatagcttcagtaagaacaggatcaaccacccccatctgacttattgtcttagccataataatttgactagaagagttatcggccacccaactatacccatgctaattctgattgctaaagatagctgcatcgacattaattttgattgtattacaacccgatacaatctagtgctcgtacccttcgccatcttgtaagaaaaacaaagaggaaccaaaatttttatcttgagcacaactccattgatcaaaactacccttagccatacctctttaacagtcttattcttaccattccacacattgtcattgcgcgtagaccataatgccgaacaaagcataacagctctatgtttcatctcagaatctcaacattgaaatctatcatgaagctcgaaaaatagttttcaccaatctctatctccgaaaacccaccatctgccagcaagcaaaagcaaacgaacaccccacaagataatgagaaaactctccaactcacaagcaccttgaacacaacaatgagggaagaggaacatgtttcacatctaattggacacgggtaggaagacaattggaagcagccctccaaaccaaattcttaactttaggaggcactctcaaatctcataactctttccaaaaaacgtaattatcaattccaactaactcacatttaagcttttgaagaagttggtacgtaatcttgaccaaatatacactagaactatcaccatttcattgtcaaatattgtcaaacattgagaggaacaaaaaaaaaaatgcccaaaataaactaattaaattagccaattaataattgataaaataagtaccacattacaatatactgtttattgaggttaatactaaataagcttgctctccaattcatattttgtcttaattattctataaaagtctctcaacaataaacataatttaaaattaataaagtttcttgataattatataacttgtatatatactaataacctaaaatataacaaatgaaattatttgtatacataattaaagtgagataatatttatatataatctataatttataataacaataactataatgaaagtattaataattttagttcttccacgttaatttataaaaatattctttcactatattgaattattacttttaagataaacattaattattaatatgtttttcttaaattttgcaatttatataaatttactacttcaaaaattttatgtattatttattttataaaattaattaagtattttatgtattaattatttctcacttataaaaaaaatccaaaatattctatttctatatttatatataatatatattggcctagtctatttctatttatttttttcaaaaaaaaaaaaaaaaaaaaggattttgatagtaaaagtataatatttttaggtttctattcgattttattttttttacttttaatttaatttgtatgcttatactaatttactgttttttttaataaaatttagatactttattaactagcaatcgttaataacaatatataacgcactttgttggaacaatcttccacttgaagcacacgacctggagagaaacaagaattcctggctaaaacatgagccagcttatttgcagatcgtttgacaaaacacaactcaatattatttaaagataaaagaagagtatgaacattatgaacacaaattaaactatcagtttccaaaatcatttacttttagaccacgtggactaagttagtcaagattagttttgggttgttaatcttgattttgtagctaatgattttgttaatagttggttaattctccaactaatttaccttgtatgaacagagctatataataagctcatctctcagttgtaaacgagaattgaagagccataataaaattcttgctctggttttctctgttcttctttcttctcatatttactgttaattatatttgatcgaaaatattttattgtaaattcactctctcaattatagaatatgtgtaaaatttaagggcaatatatctttttttattaataaaaatatagtgaaataatttttttttttt

SEQ ID NO: 224946 - DNA, 7240 bp, Cannabis indica
gtaggatttaactctccactagaatacacaagcatgagatctctcattctctgaaaatacttgagaatgtgcttcataactatctagtgatgcaaacctagatttgattggtaatgactaacaattcctacaacatagcatatgtcaggccttgtacataacattgcatatatcaagctcccaactgctgatgtataagggtactttctcatgtcgtccacctcttgaggagtctttggacattgatccttacatagagtaattccatgtctggatggtaactgtcctttcttggaattctccattgagaatctttcgagcaccttatcaatataagttgcttaagaaagtgctaaagttatacgctttctatctctatagattataacctcgagaacataacttgtttctcctaaatcctatttagaatttttttggctaactaattatttacgtctgataacctttctacattgtttccaataaatagaatgttatcaacataaaaaactaagaatactactatattacctctaatatatttgtatacacatgcttcgtctttgttttgctcgaagccatactctttaatagtcttattaaaggtgatattccaagatctagaggcttgcttcaatccataaatggaattaagcaacttgcatacctttcgatcttctactggtagcacatacccttttgtttgtttcatatatatggtttcatcaagattgccatttagaaaattagtcttaacgtccatgtccatatctcataatcataagtggtaattatggatgttgaacacgctccatttttgactgaaaataaagtttgaagcttcaagtcaattttggactatgatccattctaggaaaaactttttgaatgaaagttctatatctctctttcagctttccaaaacatcttgaatcgtctaatttcgagctatattgagagagttatggccaaaatactatcgatcatcgtaataggaaatcagaaaacgagaaggtcgcaactcttgtgaaaaaaaaaaataggaaattttccaaattttgtctataaaatgagttggagctaggtttcctttatcttttgagcttgaagaccaattttgggcattggaggattttgggaaaccttcctaattgtgtatttaaaggggttgagagctaatctaatatcattcaaaattttagaaaattttgagtgtagaggagtgcaaggagcataagtcaccattagaggactccaaaaagtgttctttctcatctatctttatcttttatgtttttaattgaatctttgttgttttagaatgactcttatgagctaattttcttttaaggattttatgtgaagcacttaaatttattttatgtattaacgtagttgttcaatttatttttcttctcttaattcaattctatacaatctattttaattatgcaattatttactggccatttataattgttatttatcaattcgaatcaaaattctggaaggtgagatttaaatatgctctgattgttatggatgcaaattaatttaggattaaagtacttaggttgtttttgtatgattttattagtttctatacttaatgttatctttgtgattaaacttaccataggaatatatgaagttttcatatacattgagtttgtaagtcttaaccagattattaacttcttaactcaattgtcaattgaatatgaagaagaaaaattgagtaattacatcagaatgtaaaataaatgatagttgaggatcataataatccttgtctctattattgttatttcttaaaaaaaaaataaatcattgtcttgcttcatttgctttctatccaacaatttacatgaataaaatagaactaaagaattatatgattggtaattgacaatcaatcctcatggaaaagatactttatttatcattatattatttgcttcgattgtgtatacttgcgtatcagttataccgaacaattggcagtggaactgtcatccaatatcgaaggaagaaaactagaagaatccattactcccccttaaatatgattttgcaaagctttagcaccaataatgattgttgtagttttgactatattacttgattcgattgcgtatacttgcgtattaattttatcgaacaattggtggtggaaccgtcatccaatatcgaatgaagaaaattagaagaatccattactccaccttgaagatgattttgcaaagctttagcaccagtaacgattgctgtagttttgattacataatcaaccacactaatttggctttcacaatgaatggatacaaattcagttggaaaagactggataggcgtagggttggacacaatttggtcggaagtaacctggtgagggaagggaagagcaaactcagacaagggggtgattaaaccaaaaaagtagaaagtagaacgaggggcagtaaagctctgagctacaacctcaacagctgaaaagttttcatgcctctgagtcaaacatgtttgaggacgaaagcactttttagtacctttgttctcttgggaagcttggccttgctcaacaattctccttttcttgttcctagagcctttggcctcgagaagaatgtgaataggagcagacattgaagcttgaggtgttgaagaggaagaagagcaaacattagtgggagaagaggcaaagctcgtatgcacgttgacttcaaaaggagaagggtttgaattatatgaaattggggctacaccgtcaataaacacttacaaatctcccaaaatgaaagtacccttcctatgaatttcattagcagatttgaagatcacacaatttcgcttcttagtcattttttggtcgtgagcatcaacatgggctctcagagcaaccatttgagcatgaggaatttccttaagtagcaatgggtcatttttggcttgtaaattcttcaagtattctttataatcactgatcataacatcaaggctaatccttaatacttgacctttaattttcaaagcaaaagggtcagcagcagaagacgagcagacagaaggcagatatttgaagacctcttcagtttggatgtcaccaatagattatgtgtaatctttttcattatggatgatctccaatttgtgcagtggagtcctatgaactgtaagagaatatcctgagagtcaagagatggattcaacaatacgattggcgacaagaaaaaccttgggattaataaattttggaaaccatttaccaccaatcataaaaaaaataaaaaagaatcccaactcttgtttgaagaaggaagaccttgaagaaattaattggaactttttgcaagaacgtatcaagctagaaagcaattagggcaagacgctttgctgaagtaataaaaaaactccacggtaaggaacaaagtacgtttgagagcacacacagaaaatagactcaaattgtctgaaaaatatagggaagaagttgtaacaaggaaaccccagcaagagaaaggatgttaaccaacagaggaaggataggaaaccttaaaagttccatttgtttcctactgaccagagttttaccttcagccagtacaagttccttaaaattcttatccaactcttcttttgttaacatacgaaaagtaaccccatctggaacgggatatttggcgcggatatccttaaaaatggatttgtgttcagtcatgaaatttggttccgcaataggagacttcttttcagaagtagaattggtcctggccttggaggatctggaagtaagcgatgcaatgaaaatatttctagtaaccagttccatggcatcaaagctcaaactaaaatgttaagagctttgataccatagaaccgaggggcaattataagagataaaaataatcttaagggtaaataagtaatttcaaaaaatagaataagaggaaagatcttatcctataatattgcaggtctttaaaaaaaagcatcgtttcactaaaaaaatagagtaggaaactcgaagacagcagagcagagctctacataagaagaaatgcagagcagagcttagaaaggaggagaaggtgcgatgagcagtagatgagaattagcacatgtgggaaaattagaacaggaaagaagaaggaatcaagcattcctccccacctataaataaaagacccaatcattcaaaagaggggacgacgaattcttgatcacactagagtagttgaaatactgtcagaatacaccttcaaatccgtacttgaattcattgagcagacaactgagtgaattgagaggaaaattatgtaaactgattgagtatgtaattcgactagatcaaacctagtgtaaagaattcaaactcttaattagaatttgttgttgagctaactttcagcatcaatatggcgtcgtctgtaagaacctcttgaacgaaaagctaaagctaaggagacgaagtaagataggatcaaagaaggtatcagagaaagcaacaactctgagtgaagaagatacatcgaatccaattacagatccaactactagattggcattaaagatgagagaagtgaatcagagaatgactacaagagacaaacacaacgaagagatgcaacgtcttgctgaagaaagatttcagtaggaacaatgtgttgttgaagaaaaacgtcaacatgatcaagacaaaaataggcagcatcaagagaatactcatcgcactatgtaaaaattcatggttgatatggttgatattcaaactaaaatgaatagaactcaaattcattatgagcctaggcaaacgagtggatcagatcctcaacaggcaattgatcgaatacaacctgtagcagtatcacagaactttgaaaaagaaaatgagaaatcagccagcgacaatattcaaaagaaaagaaattttgaacaaaataaagagaacgaaaaaagcaaataaaaatcacaacttcatgtcaaaatcaactaatgttgcaactgcagagcaagtattctagaaattatttaatcaggaaggtagaattaagaaataatttgtctagttttgttaatatagactccattaatagtgtcttaaatttgtaattgtggaagtgacttttctcgtccagatccaataatttaaaatttaagtcttacatgtatcctatttaagaagtctatcatgacaaacttgacaaaaattacaattttactaaaatttggtactgataccatgtggttacaaactcaaaactttgagtacttatttactacaaatattctattttatatttattaaactataaaaaaaaaatataaaactagaactatatattaatttagttttaagttgccagctaaaatttgaacattcattactaaattattaaattctaataattatatttatatgattgtgtgtagagtattgtgaaaaaattaaataaaataattaaaattataaaaaaacatatatagtttagtaattgattaattaattgtaaaagaaaatatagaaaagtagactacgaattcgaacctataagaaaataggctcagtttagcaaaatagattagcccaaataaagttcgagcatgacatgaaattattgagttgtacgtacataaacttttgtaaatcgttcaacctgaacaacctgcctaaactaaactaaggtaattagacaaaaaatataaactgaaaaatccgacgaaaatataacccacccaatctttatattgggcgggttaaaaataagaggaattaccccatatactgttttttcttaacgtttttatcaaatttacggtttgagtttttaaagtggttgcagcgctagttgcaataggggtttctatacgattttttgttgcaatttaagttgcagcgctagttacaataagaatttttatgtagaattccataaaaatgaacaaaaaaaaaaaaaaaaaaattgttttgaagtgtaaaaatgaaaaagcccctaaaaataatgccaacccgcccaatcaatctaaactaacccaactaatccgattgagaggatatatatatatttttattatatatactctatatattatataatttatttacatatttataaaaagttcaaactattatattttttatgggtttatgtatatttgttttattatcacaattcactaaaatataacaattaaatgtagaaaataaaaaaaaaaaaaaaaacattagtgttcgatttgggtaagttaacctgaccaaatcgacaaattcattagacaagttgaaaattttcttttcttaattaagcaagctacacttaaaattttataaatcggtctttatattaagttaaataaaatataatgtaaaccgaccaaattgaccgacatacatgctatgacataaactatattttaaaaaacacacagactgggtacagttcacatttacatgatatgcaacccaaaaccatgtgtggttgataagagttgacacatgaagacacgaatcactaaaactgaacaaaattattttaaatatttttgtgggccatatatacaatatcaatatatgtacgtaagtaagaaaataatgaaagccaccatttaaattcattcatatgaatatatgaataagatatggaaactcctaggtagtttctttgaaattaattaacctatttttttcccaattaataatcaaattaaagtctattcattgattagcccaccttaattgaggttatgctaagctgttaagttgtgtgagaaaaaagaaaatcatgttaaaaaaagagaagctaccagccaaatatttgagaattgattcgataaaaaatcatgttagatattattgttgaaagcatatgtgaggaaatatcgtaggtaacttcatggtgaccaccaagccgaaaaagaaataagaaaatatatgattgatgtgatataagtgtgggtgaaaatgtgtgcttctccattcttaggtagaaatagtgttttgggttttttgagatgacacaaaatcggtatgagtctgagagggacgaggatgacttggcatgaaaaaatatgaatttgtatgacatgacacggaaaatatgggtttagatatgatatgataaattcgaacacacggcacgcacggatagattagctcgaatgaacgacacattaataataataacaataataaatatttatttatcaattaaaaagatagtaatatttaaattctaataattat

SEQ ID NO: 224947 - DNA, 5155 bp, Cannabis indica
tgataatattatttagtaattaatttttagttattaaataattagaattgacatttaagtggttaaattgggaaattgacgtttttgagaaaataagataggaaaatgataaaatgacaaaattgtaaagtggggcccattatccaactcatggccggccactatgtatggattttatcaaaatagtttttaaaaatgcttagtattgaaatattttagacaaaaaaagtgttaaaaatattgtgaaaataaaataaaataaagcttcaataaaaaataaataaataaaagaagagatgaactctatgttagaaaaaagaagagagacttctccaaaaagaagaaaaaaaaaaaaatacccttttttacttctctcgttttctcgcacccaccaccctcaacctgacgattgcgaacacccgctctcactctcactctcactctcacgaacacccaacatagcttcctatcgaaaggaaaagggaaaggtttctctctttcctttcttttctctatctatccagattctcacatgtctcttcttccccccaacttccgtgccctaatcccctctttcttatcatctacatattttattaaatttccaaaatcaaacccccgttcctaaatttccatacttgtaactctgcactcaatcctggccttttgttgtatacgagtacgtaagtatctgctgcaatggcgattattggggacgcccttcgccaggcgtttatgccgaagccggagtacgaaagcctcaaggaagaagacagagtctggggcaagcttcagagacctttattggtggctttcgtggctcttgtttgtgtcgttgttatggtatgtgtagttattacattgaagatggtttttccgtctgaccccgcgaggagaccattctgcggtgaccgggggatacagccactgccgatcaacgttaaaggaggggattctgatccctatcctcatgctttctatctaacggatcaggaaactgtggactatttctggatggtttgcttcgttcctactatgatcacttttttgctaaccgttgtgtatctgatatcgggtaagaactaagaagtacttttaatctttgttatattatctagatttgaacttcttgattcaatgctatgaaaatttcaaagaatttagtatgtgaaatttattggttaagttttagaattttaaaaagttgagtttgtgaatggttggtagttgataatatgtagtgaataagtaggaaaatgtttgaaggttttattttttttttcataaacaatgatttgaatactcaaaacattatttttaatcttaagtttaatttcagatatatttctcgatttagcttttaaaaactcccaaacgatcagatatatgtgggtacctacatttttagttatggtggtttcctgctatagtgttgtaaatattaaaaaattttgatggttgatgatttaagggattttctttgcctagatttatccaggcaaagtaaaatggaattatattttattatggggacttagttggataatattgcatggctgatgtacataataagaagtttatgtagtgaaagctttgtatgtaccttggtatctggcttatacatttgcttcttatacgtaaacatttgagattaggaattgataggctgtagtggaagatacagattagttggtctaggtggaaggatgtacaggttgtagccttttttttttttttttttatgttagacagggagatggcaattagatattcacgtaagacattgattctcaagaaactaaagtattttgttccaaacttagtatgcaatcaagaaactttaggttgttgttctgacttgcacgtattttgcgaagaactaaagtataatttaatgatatgatctcgactgaagtcatagtttactgcattgcattaagcatagcttgtataagttggctcttgctgaaaataagaagggagctgttagtatgttaatttattaatgataattttggttttttctttcttcaatgaagttagtctgcagctgaaggacattaattatcaccgattaaattaccaattcataatgggttctcttattctttttcactatgtttatgtcaaaatactatcttgttttcatgcgctcattatgattctgcaggtattgctgttgcttattcttctccaatgagacacgtttgcttaaaggttgttgaaaatagctattgtgcctcgaaacgaggtattttccctcactttgaattcctttgttttatcgttgtttgttgaatgctaatttgttgtaatagcgtgttgccttttcaatcattatttatttactttgtatttttctgattctagtcatggggtatatgtcaagttagactgtattcacgatttctgaattgtttatgctcttacattttgctagctttattttaggctgttggtttgttgttttaatataatagcctatatagagtgttaggaggatcactgaaaatatttatgtatacccttttatcatggtttgttctctcagaaaatagatggaattaaatttaatacgcatataaaaaataaattaatcttgcattggtcacccattttgaaatggaatatccatttcaccaagaaacagttggagaaaggtgaatcctccatgtttttggaataagatattgtagactgaaatttcgagcatcaaggacaagggttcctttcaggattcaaggcaagagatggctcgacagctacatgtccagttgcaagaatcactccaagaaacggtacaacaacaatttaagactttctcggaactttaacaaaatcaagaatggtccaagaaagcaaggtagaagggtctggagctgctgggaccggggagaaggttgaaattcaaggggctacgacagcttcgacaccacaaaccagcgctaatatctcagaaccacggcaggttaccacgggattgtcaccaatgacagaattttcgattgaatcacactccgggcagggggtattttgacaaggattgacaggagacttgttatgtccatgagaatcggcttaagaaactcaaaatgcccacttttgatgtggatactccggatgggtggatattacaagcagaacaatttttcacctgcaatgggtatgaggagggcgaaaaaattgaagtcgcgctcattttttgttcgagtgatgctcttctttggtactaatatgagagtcataagcgatatattctgagatggggaaacggttacttctcaaacatttgagaaacacacaattgtgtttgctccacgaacagttcgcattagttaagcaagaaggaacaaatataatagggacttttattcgcttgttggctccttttaataatgtccccttagaaattcagatgagcactaatcataaagggctgaaacccttcattcgagcagaactaaaattgcaaaggccgctcaacgttgacgaagctatggaaatttctcaagatattgaagaaaaactgagaaagttaagcccattcaagcagcggataggtacaacaagaagaacactttaccccactcctcagactactcccaccacgtttaaaaatagccaagaacgtgcatcaagagaaataaggcgcttaatagaggctcaaatccaacagaaacgtgaagaaggcctttgttttcgttgtgatgacaagtgggcaccgggccataggtgtaaacaacgtgaaatgaatgtgttgatcatgtctgaagagggatgcgacatgctatctgaccaagaacccgaagaagatgaaaacaacacactagaacttgattccattgaagtgaatacaaaggtaaaggtgtccgtaattggtggcagggctatcctcaaataagaccatgaaattaaaatgattggtagaaagtactaaaatggtaggcctcatttaccctgatgctgatgctactcacagttttattttccaagcattggcaacaaggttacaactgtcagttaccgagacgattgcttatggagttactatgggaaatggagaattaataaaaacataaggggtatgcaaacaactacatgttcatttccaaaatgggaggattttctaccattaaagtaagggagtgtcaacattattttggggctgcaaggtgagcctcattgggaatgacacacaaagattggaaactccaaacaatgaagttcctaattgaaaatcagcaagtcatgataagaggagacccatatttaggcagaaatgtagtctccctaaacaccatgtacaagtcgttatgggcggcagagtggacttttgatagagttgcattcatgggaagaggctccacacacccccaattgtccatcttatttgcaagacactctccacaatcatgccaaaatatttgacccacctaagggtttaccaccctcatggcaatatgaacatgccatcgtcctccaactcgaaatagaccccataagcccgaggctttatcgatacccctattatcaaaaagctgaaatagagaagatagtccaaaacaggcttactttggaatcgcccaacacagttgtagcccacattcaagccctgtgctcttggtgaagaagaaggatggctcatggtgcttttgtgtagttatcgagcactcaatcaagccaccagactagataagtaccccatccccgtcattgatgaattaaggctgtgatatttactaaacttgacttaaaactaggatatcatcaaatgcttgtcaagaaggaagatgtgtgtacgacaactttctgaacacatgatggggactacaaatttttagtcatgccctttagattgaaaaacgctccagccacttttcaatcccttatgaaggacatatttcgacttctcttaatgaaattagattgttgttctttgatgacattctcatttatagcaagacgcaacaagagcatgcgaaccatctaaatgaggtttttcagcattctttctttgcagcagctccatgttaacctcaaaaaatgtgcttttggacagcatgacattgcgtacttgggtcacctcatttcttttaagggggatcaaagctatcagcagaaagtttacagtccggatagactaacaaagcttaaa

SEQ ID NO: 224948 - DNA, 5069 bp, Cannabis indica
aataatctctaacaatattgggagtatgaagtataagaagcagtgtcatggtaagagtgggggaagggaaaataagactcatgaatctagctcatcctttaagtgttgttctgctaatgggaagaagacccttaactgtttgctttgtcaaggaccacacatggtagatgcttgcccccaccagtccaagttgagtgccatcaaagcatccatttttcaagaggagtaaggttataaggatgaagacaaagatgaagactgcgcacatccccgttcaatttttgaatgctcttaagaagcatggcaccagagggaagaaaacccttggggagggattgatatttttgaaggtcaccttaaatggaagtagataaagagtgtgttgattgacattgaaaccacacacacctttatttttgaacttgaagccaaggatagggtttaaattggagaaagatatgggtcgcatgaagttagacaattcaaaggacattgcgacaattagagtggccaagaaagtgaatgtaaagatcgatgaatgggaggggcaactaggccttgtggaagtttacatggatggcttagatgtggcattagagatggagtttctagatgaaaaagggtccatcccaattccagcaatagggagctacttatcatggaaaagaaacctttgatagttccagcaaaagtgaggaaacccctaaaagtcaagcttctttctaccctgcaactaaagaggggtctgaagaagaagagacaaacttttatcattgtatctgccaagttcgatgataaggtggaagaatctccccaacctaaaatttagcaggtgttaggtgagtataatgatgtgattctatatgaataaattacctcccaagagaggagtttatcatcgaatgaaaatggtattaggtgtaaagccccctagaaaagtggcatacctattgcctctcccagaacttaaggagatgaagaggaaagtaacatcaatgttagattcaggttcataaggacatcgaaggtaccatttggtgcacctgtatttgtccataataagaaggatgggagcttgagactatgcattaactaccgcgccctcaataaggtgattgtgtgcaacatataccccattctcttaatcgttaatttgtttaactagctaagtgagaaaaaatacttcacgaagttggatttgagattaggctactatcatttttggattgtagaatggatgaaccaaagacaacttggattactcagtatagctcatttgagttttctgtcatgttgtttgacttaacgaatgcaccagccacattttgtacacttataaatgaagtctttcattaatacttagaaaagtttgggtagtgtacttggatgatatcatgatgtacaacgccatgttagaagagtatcgagattacttagctcaagtgtttcagaagttaagaaaaaaggagttgtatatatatcaagttcctgggatatgttgtggaacgtgagagaattcgcatggacttagagaaggtgcgagtgatccaagagtggatgaccccgaccaatttcaaataattacattcttttcttggtctagccaactactatagacgattcgtggagggtaaattaagaagagaaatccttgacaattttgttaaagaagggtgttttttggacgtggactgataggtgtgttgaagcattttaaagtttgaaactagccatgattgaagatcttgtacttgccctaccagatgtatgcaagccctttgaagtacagaaggacgtgtcagataatgctttggaaggggtgcttatgtaggagagtcaccccgtcgcatatgagtgtcgtaagctttctaaggcagaaaggcaatatattgcgtaagggaaagatcttctgacagttattaattatttatagatgtggaggcattacttgttggagtcaaagtttgtggtgaggacagatgatactattgttagttatttcctcatgcagccaaaactaacttcaagcaagaacgatgacaagaattcttgaaagaattcaacttctactttgagcacaaggctggaaatctaaaccaagaaaccgatgtcttgagccgtaaaggcgagttggcagttctaaaggtgctagaaagtattctagatagccaggtggttacacccatcaaggagcacatctaggagaacctagataaggaaccaatcgccaagaacattataaccctagcaagaaaaggaaagataatctagttttgcatagagaatcacctattatgggctaaaggtggtcatttgtttgttccaaaggcgagcgatcagaggaggatgttgctaagtgagtctcatgacacgttgtgagcgggccatcaagagtggcaaaagattcatgctcttttgaagcacgggtactactgaccacatatgcaggatgacgtgtttgactacatcaaaacatgtctcatctaccagcaagacaaagttgagaggcataagacgccaagtttgttacaacccttgatggtcttaagcaagccatgggtgattattttgtgtcacttgctttcattaccaaacagccaaagacaggagacttgaatgcgatcttggtaattgtggacaaattttcaatttatgaagctgttatacgtgtattttgagcagaaaatatgtcatcaacatgtgtacaagagcttggtaatgaaggaggtggcatattatataaggaatttaaaagttattaatgtgcctcaaaagatactgcatgtagaaaagtatttaaagtcttgccttaaaaataattaaggatgagtctaaaatgctaactattaaatagtaaaccaatgagaacaataaaatacataacaaccatcttgggaaagactaagtacagagtttgcacgatgagaaggtattcaagatcggcaagaccaagtgaattacaagactaagtactcccaatatgaggaatacaaaagatacaatattaaaatataatttcaagaatttatacaaaaatatccaaaatctcattttgaatcgtcaagtacgtgaaagaatgacaaatcattcattttacgagaaacctaggacaagtatgcacgcgaattcaacaatgtattttgtgaagcattaaaatgataaatagaagagcagcttggtaaaataacctgtatatgataaggccaaataaatagttatttgatagttatacatattatccacacattcgagttatacgaaacgtgtggattgttcaagttatgtgagcagatatttagttatgatcaagagaaataatcgccaatcccagtattcttataaatagggatggaacctacagtgaaagggacgacaaaaattaactagggataacactataagaaattcatcctctattgcatgtattatttgaattctatattctgtaacacaaaacactcagaaataaggacttgtggactatgtagatttaactacaaaatcacgtaaaaattaccttcttttatatattatttcttccataattttattaaagttaatcttttattgttaataaaattttgagtaaagagaaccttcataccagtgtcaaagtagtgtccatcagaagagacaacacaacttttctttaaacatatagtaaagtattggagaatacattagaatatagcgagtgatcgagataaaatattcattgagaccttctggtctaaattattcaagcttctcgggtcataaatgaaaatctcctcgagctacgatccataaacagttggacagactgaaagattcagcaggatgttggtggagtacttgcgatattttttcatcactaaccataagaattggtcgcagtttctagatttatcttaattttgttttaactctcataagattttttttcatcaaacaagagccaatttgaagttgtgaatggaaaacaaccactgttaccccacacggtggatgaatactacggatggaattcgtaggccttcaattttacaaaatactggaagaagaataaagagattgcccaagcatatttagagaaaaccttatttagaatgaagaagtgggcatatcaaaaaccccgaccgttggagttcaagacaggtgacttagtgttgatcaagctacgaccagaacaactgagattctgaggggtcaagaacatcgaactcgtctgcaaatatgagggccctattccagtcatctccaaatatgactagcctcctacaaagttgaactatctacacaggtgaagatacactcggtccttcacgtcagtaacctcaagtcgtatcatgaagatccagctcacaactagtctaccagggacgacatcaacctccaaagatgtaacaacagagaactagaagaaattcttgccaaaagaatactttgtgtgaagagaaagaagagaaaagagtgtctagtcaaatagtaggacctcgctgatgacgagatcagttgggagaaggcagagcgcctacaacagtttttccaggagaatggagatcatatagcaggtttgtcgagggcgtcgaataattaagtagggaataatgtgttatgttgccccatggcacacccacacggggccattttgtaacatgagcattttcttggtgctcgaccattagtcaaatcttgcaccaagcacctcattaaggttgagagctaccttggtggtggtacttttgtatttagctgtgtttgtaattttcttttcatatgtaagcaaagttaatatcatatttattcctaaaaatctcttgaaaccccattaagctctttaagaggagttggtgacttttgaagcaccttgtcaccagcatgatatgaacttaggcgtgtactctcttgccctatcaaggccatataataataataaaaatatttgtccaaacttctttgtgtatgcttatatgttgcatatgtgatgcatgtttgttgcgagtctcaagctaattgggggccttgggccaaaaaatttaattgggtttttttatataaatattttttttatatatatatataatggt

SEQ ID NO: 224949 - DNA, 3904 bp, Cannabis indica
aaacaaatcaaaattacaaatcatttgaaaaaatctaaaatattggtaggaaaatgtaaccagagagtaatatatgtgatgcagcaccagcaagtcagacagttccaaatgcctcaaatgttttgagttcataaaaggagttgttatcctccttttcacacatctaattgaatcatcattcttgccaaatccaagcccaacaaatcaaatttgacaaatcatttgaaaaacaatctaaaatatcggtacaaatgttaccatttcaaaataaaaggcattccatgaaactaaagtgacctaaaatcccattagccaaaccaaggacacaatagaaaataaactagtggccagtaaagttagacaaatggtaacaaatcagatcaaagtagaaggatatatgcctgatgaagaaatttaaagtgggaaaactgggaaggcctcaaaaggagaacccttaaaagacactcccaaattagaatattactcttgcacagctatgactcaacacgcttccatggatgaggaaggggatcctaagggccgtgcttaacaaatttattacttaagaaaaaacaatgaacaaaaatgaatcagaacttcaccttcacaaattagattgtttcgtcaatcttgtccaatcacaacaatacccacttaccagacacaggatgattaaaccattatgagttaaaaactcctagagatatagccaacgtatgaatacaaagaaaagaaggctatcaaacaatggaattcatataatagtgaattcacatccagattcaatacacaaacagaattaaactagtatataatgtaccatccatgaaaatcaactgcaaagaaaaaaaaaacacagctgacaaagttaatagaatggaaagttcaatgttgggaacaagtataacctcatttgcacaatgcagcaaaaaaagctaagattgtcccgttatacaagaagtgaaaaaacactacaaacaggttaaaaggcaatcaaacagctaaagaacatacttcctgcttatcattttctcctgattgtactttcgagccaataatcaattaaaaattaacttactggttggtatttctaagagaaatagctgaacattttagatgttgtaatcggccaatgtacgtatatcctgaaactacttttaacaaaaaaccaaacgttgctagtcaggaggaatactagttcaaagtttcaactcaacgtgttaagcttgatttcagcaaaagaaacataaaatataggcattgagcagaaatatagaatcgacacaagtaccctctttgtcttgaatcttagccttattgttgatggtatcttacgccaacacctaagactaatattccatttcagtaaagctgtgttttttaatgtttcaaaaaacaacagagattttaggtacaaaatgtcaatttcattcttaagattttgcttatcataagccattgagtttggattaatgaaattaaaattaacacagcaaccaaaacaaacagggttcaaagtgagttttgtggcaagcaagtcagacagttccaaatgcctcaaatgttttgagttcaaaaaaggagtttttaagctcattttcacacatctaattgaatcatcattcttgcaaaagccaaacccaaagaaacaaaattaacagaccactagaaatgtatatttaaattggtgttagaaacaaaatgttaccactttaaaataagaggcattaactttaaagacctgaaattcccattagccaaaaacacatataagacactggaaaatacaccagtggcaaatagggtttggaaaatggaaaattttcagatccaaaagtacaaggaaaatgcccaaagaaaatatttaaggtgggaaaattgggaaggtttctcgaggaaaacccttgagagacttgcccaaataaacatattgctattgcgcagctatgactcgacacgcttccatggttattgaggaaggcgatcttaagggccgcgcttaacaaagagcattattaactcaaaataaatgaagaagaaggaataagaagacgtaggatgagaatccatttctgggtaaatgaaaatagatttcaacaacaccaaaggagtgttgggtgaggaagaaagagaaagagcctcactggtctggtctgagacaaaggcggctgagagacctaagagttagggtttcatatagcagctcccacgtttctatatatataatcgacccatgaaaaaaaaaaaaaaaaaaaaacaaatgttttcaacggtaacaaacaaatgccataatgcacagtatggtctagctaaaagcctttccgtgaggagaggtccgacccacacacccatccaaagcccagaggactcgactccaagacgagacttatctgggtccaagaactggttggaccagtcgaagttttctggacaagcgttggcatgcgtccaaaaagggtaccccaaaaggcacctcagaagcctagtataggatgatgtggctgccctctcacaccctgtcccaccgaaccagggttttccctgtgccaaagcataagagtgcacgcaccaccaataggaaacctcccttttgtcaaatgacacaaacttgacactacaatacatatatgcggtgtgcatttaacatctattaaggattgcatggtcccgaagcttatggaacgcctttgccccatgagatggacttctgctagtaggtctatagtcatgtattttatgtatttacctaattagtgggcctatttacatagaaaccctagcggttcacgagtatacccgaacccaattcctagcctataaataccattttataccttcatgcaagggattagaatctgagggttagaaaactagaaagtgataaaacactatagcaagaagctaaagttcttgagcttgtaaaatcacattgtaatacatcaagggtcgtcagctaaatacaagggactcgtagactagggttaattaacacatgaaccacgtaaaatattccatctccattctatattagttactttattttcttaactatcatttcaattgatttttaaaaatctcggtatatattttggtgctttcattgagagctgaaggaagatctgaagctaccttgtaatcccaacaatggtggctaccaggaagaccattgtcgcacaacccactcatctgagccaagatgtcttcatggatgacgtcaacccgcttcctccatagcacgttcaaccaagcactgtaggggatgaggaagcgtttaaagtggtagtcgatcggctgataaaacccaacatcgggaataatatgtggagaagaaccatatcaatgatggagatatagaagaagatgatggcgagatcaaagatggatattataaagacgaatactattatgagcaagaccctaaagtgctctaaatgctcgttgagcttgctaaaacgcaacaaaagttagcggtgtaataagcattctctctccagatgcaaaaaaatattagaatggctgcaaacaaggctcgataatgttgaggaagactccgaagagaatgttccaaaatagcacatcagtatagagaaaagggcaaactcttttgacgtaggaccctttgctcttgaaaaggacaaggggaaaggtaaagtaggtgaaccctaacaaaaaacttctcgagttcctcctagaaccaacatgaacactaccaacccacctcaacagagaaagaaggccaccgatgcctccaaccttggacgcacttctactctgtgaggcagagttgtgcaaaataatatgcctgacactcaggtgcaaaggcctaccgttataggatagaaaatgaccctagtgactcaattaatcaggacgacgacgtagaagaaattgttggaaatatttt

SEQ ID NO: 224950 - DNA, 4998 bp, Cannabis indica
atgttgtcgaatcatttgcagaatgggatggagacagccaagctggcgtggtctagacttccgaacgcggaggaaggggaaaccgacgctcttggcatcgcaaagagcgatgtgaacagtgtcgagagccttgactatgaagttatcgagaattacgcttactgggaagagcaggtcccgtttctggggtttcttggttcgagttcaattatgcctatttttttatagcctttttgtgggtttgcggccatgttgattcttaacttttctggcgtgttttgggttctgtgtaggctcaaagaggaaagctttttgtgggatattatgtggtagtgaaatggttctttgcactgcttattggcatcggtatgtcgatgaattttgctttttttatttttttttccttcgtgaaccttaattttggggcgttatctctatacattctattatatagcttttcatgacactcttctagttttgaatctttgcattagttactttttgtatgagtagtcgtctggaggttgaagcagaggatatgtgttccttcgagtataaccaaccagattatataaacgaattgtaactagtatattttgacagtaagtgtaaagaagaacgatgtattagtttgtttcattggtcagagataattgaccttcaactactatgattatgtcattgtttattattagaaacataatgatcttcgattgttctagttctgtatttcatttttttttcctgctggaggaagcgatcgtattggtgtttaatcatgtatttgatttccattgattgccttcaggtactggactagccgctgttttcatcaacatttccgttgagaactttgcaggctggaagtttgctctgacatttgctataatacaaaaatcatatgtagctggatttgtggtgtacatattaatcaacttggctctagtattgtcctctgtatatatcattacacagtttgcaccagcagctgctggatctggtattccagaaatcaagggttatctgaatggtatgttagattttcttttctttcccctgtaatatgttcattgtttccattttcctgttcattatctaattaatatcttatttggttaaaatttatcaggggttgatactcacggtatcctgcttttcagaaccttaattggaaaggttcgacgatcctttcgctattaagtcgtgcttattttgacttctatgttttcagtatttttattggtttgttttttcttccttctggtgatacacagatatttggaagtattgggtcagttggaggtggtctagctcttgggaaagaaggtcctcttgttcatacgggtgcttgtattgcttctttgcttggacaagtaagcacatattctggaaatgcactgtgtgtaaattttctttgttatctgttttgatttttgtaatcaaactgaagaaccacttttgaatgcatggctaacatacatgctaggaaggcttatgcatgttaaaacaaaaaatattaatgccaacattttctacgcattccactacaaactaaagtttttctacatatgatcctatctcagggtggatctacaaaatatcatgtaagttccaggtggctacaagtatttaaaagcgatcgggatcgcagagatcttgtaagttccttttgttgtcaagttaattttacaaaaattttgtacctaattagcgtgtttcttttgtatgacttaaatagtgaaatatttcaaattaataaattattgagatgaatctctccatatcatactcattctaattctagattttgtgacttttgaaaaggtaacttgtgggtgtgcagcaggagttgctgctgcttttagagctcctgttggtggtgtattatttgcattggaagaagtaacatcatggtaatgccaattctgtttcctgacttttgtaaggactggaatatctgcatgggttgtcttgtgctgttaatgtaatcattcatggatgcgttttgacgtgcttgcttgtttcgaaagttgtgattgtgaaaatgttatgttttgcaatttcaatgttaaacttgtaatcctgataagttaaaatatgctggtgccttaacagttctgttttttttttttccttgaaggtggaggagtccacttatgtggcgtgtcttcttcacttctgccattgtagctgttgtggtgcgtactgcaatggggtggtgtaaaagtggaaaatgtggacattttggttcaggtggcttcataatatgggacacttccgagttaggttctttactctcttcagatacttacattactgtgtctgttcagcttgttctaattttaacttgccttattttcagtggccaagacgactactatattagggagctattgccaatggcagttattggcgtgattggagggttattaggtatttcttcatttccttttgcctggatgtgttacatgctgctttttatgggttacattttcttctgtttttccccttttttcacaggtttgatatatcttttatttttcaggagctttgtttaatcagttaacattttacattgctggctggcgtcgaaattatttgcacaagaaagggaacagagtcaaggtaatctttggactgtaatataaaggcagactcatgtgtctccatcactattatttggtccaatttcactcaaccatacaagaaagtgtttaaactatgacagtaatctgtgatgggatccctaacttacacatgcttgtgttctcactctcatttgttaaccttacccttaatttttgttttgatgcagatatacgaagcatgccttgtatctgtaataacttctcttatttcctttggtttgccacttttaagaaaatgcagtgcgtgccctgagtcggattctgataatggaattgagtgcccaaggcctccaggaatgtatgggaactatgtaaacgtaagatccctgttcatggtgtttctgtttaaaattttagaatcacttattttgctatttgctttttctgcctaccaacttctgttccccatttctattaaatatatagattctgtgagattattgtttcttctcggcacaagaaggttttgtaattagtatattctgtcttctacatctttgacatggttatgaagaccaaaatcaacctaagttacatgtctctgatatttaggggctgttttggcatagcctgattctactgttagggttttagggcatgtgagtgatattttgaagcttactgaatctatatattttcagttctactgcagtaaggacaaggagtacaatgatctggcaactcttttctttaatactcaggttcttttctactggctgaagtctttattttggaacataacattatagttttatggtgtctttatgatttctactcaattgtatctgctttgttgtgacaggatgatgccattaggaatttgttcagtgcaaaaacaattcacgagttcagcgctcaaagtctattgacctttctggtaattcatttttccttgagctttttacaggctatacagcagcaatttgtgagttttggtacattttgggtaatttttttgcaactgtattgcaggttatgttttatagtttagcagttataacatacggcactgctgttccagctggtcaattcgtacctgggattatgattggttcaacatatggacgtcttgttggcatgtttgtagttaacttttatgcgaagttgaacattgaagaggggacgtgagtcagttgtttagctttgtgattatgctgcattaactttcctatctttgaactaatgtggaatacttggtggacctgcagatacgctcttcttggagctgctgcttttcttgggggatcaatgcggatgacagtgtctttatgcgtcattatggttgaaatcacaaataacttgaaacttctagttcctatcatgcttgttcttctaatttcaaaggtctacttccttttatctttttatgttttaatacatactatatttgtgagggaatgagaaaataatttatatttttatctgcaggctgttggtgatgcttttaatgaaggtttctatgaagaacaggcacgattaaggaatattccattactagaatcgagacctaaataccagatgcggaaaatgacagcaaaggaagcctgtggaagaggggtaaatgtctttttaagccttcgtcatttataatatgacagcctatagatagtaatgagtattagtatgaatatagaccttggatgtttggtatatcattctttttaaatgtggacattatgaatcagacattgcattatttgtgtgtatgtaagctttcaagaacctttatactaatccaaattaaattaaccggatgtctgtgctgtgttaacctttggtgattacattgattttgattgttgtggttttttctttctttttatatatatatattgttaatgaaagtctgctgctaatgataaatgtgaaaactcaaattaaagtgctcctaattgatagagttctccatcttttatactgacttctcatgggcacttcacatggaacatggagattcttctggtgctagaattttttcttttgtgacaaacaaactcataaggcttgtcaaaacacatgaatgtttacaattgtcgtatgcgtttgatatgtacgagattgtgctgaaacttcatttctgaagcggtgaagccatctgaaattaactgtataatgtttcttttgaaggtggtctccttccctcgagttgttaaggttgcagatgtagtttctattttacatagcaacaaacacaatggcttcccagtatgcatgctctttccctatatctttatcgtcaatatttggcggcatttggaggttaatgcttatttttaccctatacaggtgattgaccataccagaaatggagaaacacttgtcattggactcatgcttcgaacgtgcgata

SEQ ID NO: 224951 - DNA, 9682 bp, Cannabis indica
caactcaagcatcatttgagcaagaaggatcacagggacataagttatgtaatttcatacctcaaagcgatcaatgaaaaaccaagccacagtctatgagccattatttgttcaacgggatcaacttcaggtagcccttctggctccccaggagcaaggtgaggccttaattttgcagctagcccagaatacttcacatcagatgcaaaaagaccccgttttgtatcaattgtccacaaccatgcatcaacaagttcagcaaggacaagagaacccaattcaggtgcagcagaaactaaccatgtccaaatgaaaacaccagtttccattgcatcttgtgtacagatgtaagctggacaccaacagagaagacgaagaagttgtgaacagccctctacatttttgttttgaatcagaaccctggaataggatagattaagaatttaagtacatgaatatcaaccaagatattagaaatataaaaaggtaaaagaacatctttgtttaccaaatttgatagaagtaatgcagttgcttgggaacaagtttcacgaaattgtagacttgtcaactttccccacctttttctgcaatattaacaaatttttgaagtaaacgaacaaacttgatcagcaacatcccattaaatgagttatcctcagcctgtgactgatgaggaaacgctccagatatcagcctctggaggccagcaccaagcccaaacccacttggtgtgttaccagaatcaaatccaccaatactgttaaacaaccttctcattccagcaatttctccagcatggttgcacttcactgttagcactgactatcccagtactgagcacctccaaattaaaggcttctgtcaattttaaatttgctcctgatgctgctgcagcagcagccatgacagcagggatatttgctgtccgtatgccagtccagcactcactttttgctgtaccaatacgtatctcagacagaagagaaacaacatcagttgtatgttgtgctctttgccatgtgtttgctttacaaagcttgtcctagcagtatgatattaaaacaataaaggtacgtacttttacacgtaaaaactacttaaaataaaaataaacaattgaaacaaaacatgtggtctgaaagatgtattatctctaaagaatttatgaaacataaaacccaccatacaatttttcaggtcatgggaaaattaaatgcgcttccacaaaacacctcccaatagatgtgattttatgactgtcaatgtaaatggtaagatccaaaatcggggaagtgattcaaaatatgactgagcaagagagcaacatattgtaaattgacaacccttcatttaaagtcaaagaaacaagatttcttggcatatgagaagaaaacaatttaattaggcaaggaaaagaatgccactaaaagttcatatattttgatgcttagagagatggacactttatctcagaggagagttttcaacctgtagaagaccctggctagtgcaaggagcataggaaagtgatttaatgatccattctcgaacaactttttggtacaaagaacgaacagtcgccacccaagtagggtcattgacaacagcagaaggagaatcattatgcattgagaacagcagggaatcgaaacatgaagagttccataaaatctgtataaatgttgagattttttagagttaaataggtaagggaaattgcacaataagtgaatgagtacttgttgctggcataatttacctgtggaaatctatctctaatttgggttaacaagttcacagcaacatcacgaatatgttcctccctctgggacatacttctgataagaaaacaggcatgaacagaaagagttgattctctgacctcagcttcctttcctgtttctgatatcctatcctcctgaaaccatatgaaaaaacgacgacattgacaatgcaaagtcacagcaactcttctaaataataagaaattccctcatgttaaaaaggttaacgcagccagttacaataaataatgtatatgcatccaatagcgaagaaatcactttagctatcttttcaaaatgtaaactggttccatgttgcatccttcagaaaaagaaactgatattgttgggaaaaggagcaaataaaaagagctaagtttagatgttttctcacaagaaatacataccagccataatactgctgtgtcaaaagcttgatggacaattgccattaagcattgaaaaacagctggcaaaaggtttggcgtttttaagtactcgaatacacaactaaacgcacttctagaagcagttaaactagcgttgccatttaggatgccaccattactgccaaagcgaatgatctccaaaaatgctactgcaagaagataggttgcctttactcctgcaaccattgaaaagtaccatttgaaacagtagatgagaatattgaaaagtaagagaatttctaccttcataaaatcagtgttgatgtcttgtaaacaagtaatgaagcagcactcaaaaaggaaggggaagagcgaaacaatattttgttcaactaaaaccaataaataagtatttactctcaaacaatctcaaaagggcacaaacaaaaatcttattttatttttttgtatgaagcacaaacacaaatcttaaattcactaagaagagaataaattacctgaaattgtgctcattgatccaacatcaatgcgccctccaagagcagaagagagagcagatctttgggcaagagcagctttctcatttccacttcctcggcggcttccagggttgtggagagcattgagctccaactcatcctcaagccatttcacagaactaacaacctacggaaatggtacaatagcctcaaaattactcacaagacagacacaaaactacaagcatatacattgaaagaaataagcctgagttcaacacggaaatccaaaaggtacaacacgtgtaaaaaaaagatgattgataaatgactttgaatgacaggtgccgatacaaggagattaacgaacagtaagcacaatgaatacacaaagctagtaggtgtagccaatcatcaggagttcaatgtgataaactttcttcagtccaaatatttttatcatgtttgatctctcagctattgtcaagtaggataaactctacttgcacctatagaaactgggtttttagtaccaactgtgattttgcaacaaaacagtgctcatcaaactcaaactcataattcttcaataagaggtcaacattaaaaaaaaaaaacagttctacacgatttgtaaagagaaaaaaaaatagatagctttgcttcagttttattttttattttttattcttttgtcttttgaaaattatacagaccatagtttggtgtctttcccaaaacctactggctcaaccaaagatgttataataaactcctaggttggacatggattcagaacacagttcatccttccataccccaaaataatttttcactgatcagtcttttcttcttaatgaaacattagccaataacatgacattcattaatttaaaaaattacacaactaataaacttttttaattaaaataaaaagagttccaaggcaagagagcaggaacgaaagtgaataatccaagatattcatcacaaacttaccagtggaggtgtcccttgagcaattcgctgcacagcagaagaccattgtgtattccacatgtacggacccccaacagcttgaagagcaattgtccccatgctacccacactgttcaatgtagtggatactgacttcgttgttggtggctgtgttttttgtatgggaggtgctaaaccaaacaaagcaatatagaaccacaggttacgaaataacttcaaaagtgaaggttccacgtctaaggtcggatcaaaatcagaacatatttcagcaacagcaggaagtagaggcccaaggaaatctgctccacttctgcaatattagaatacatttttaagaaaaaatattaaaaaaataaaaaactagaataaaataactgcatgaatcaacgtcactgaagccttgcagaacactgcacacatagcaaaatcaaaactacaaagactagcacagcagcataattgttttctaagagtgctctaccttccactttttgattcagcagcaaggcctacatcagagcacaaagatagcaaacggtaacgataatctgaacgcaacttagtattcttaagaccactagcaatgagaaggaaccctgctggaagagtctagaatgtgattgaaccagtgagaatccattgaacattatatttcaacaagtaactcaatagtaatattatggttcatatttctgatggaacactgacctcaacacgctctgttgtagcctcaggcgccactgttttactttcagcagatcctacactcgaaagcttatgtaagtaacttcttgtcatcaaaacaaccgtctcacgataggacttttcaaaacctaaacttgccatgtgtgatacagcatcaagaagctgcaaaaaattattaaaacaagattttagaaaatgccatcaaattgaatgaagcaataagcaatttgatttacaatccaagtaaccttaacactacgtttggtagaagagaaaagtggagggtatattggagagaaaagtgaagagaagaaaagaaagttgtatgaatggtaggaaagaaaaggggtggaaaaaagttagaggacccaacaaatttattccttccaaacttggagagaaagttgaggagaaaagttttataacatacctgaaattcaaaacttatttacccttatttttattccaaataatttatttaataaattgtaatttttcttttatcattttattccttcctccctctctaccaaacaacttaagacaaacctattttcttttctatcttctccattttctatccctcattaattttctttccttcaacttttctttcctttcaaccaaacatagtgtaaataaatcatgagatcgaagtaaggttaaagaaataacataaaatgcacgctttaaagactaagattccatactcggagtcgcaataaactaggagccgaagcatcaccctcttccaggctctcaataaataaaggtaaaatcatgtccactacttcagacttgttcaccgcaacaattaaatctgctagcagacgaataatattaagctgcacaattggtagagctggtttgtctttctcaacctgatataagaaacaatataaaatgaaatcatcaataactatgaatttactcttcttttttgtactcttcttcctattgtctgatcactaataaaagttaatgttttcctttgaaaaaaggctacgaatctatgaaatcaataatatgtagaaaaattagatttatttcacaatctgattcttaggtagatctatcatatatagttatttatacgtaaatccatataattccaaagtatttaattacaaaacaagcgcaagtccacaggtatatatattaaacaaaagcaataaaccaacttgttcatcatagtcatttcgttcacgaatacttgcagccaaacccataatgaatgtatctacaggaggtcgctccttgctccagcaagattcaattatttcacagcttgtcttcatgacgctctcaaacattgctccctggttggttgcccaagtatcagcctgttgctattacatatagggaaaaggtaaatagatatttgtcttcatcacattatatattaataaagcaatctacatctaaactgttttacctgagcacatacagttagtacaacaggcttgagccggatgagcaaaatccgaagtgattggccccctcgagttattgcaatttgtgaaagcccagcaagcaaggaaccaaagagttcttcacagattctcaacttacgccacactgaaagtaaacatgcttcagcagcatccataaacaatgttagagtctcatgtgccaacttcttagccactttcccatcagaatcaaagcaagcaaggctcctgagagtcaatgtagcagcagctttataaactaacagttttgtattgattctagccttcagaagtgagccatgttcattccaatcgcgcttccttatctgtccaacacgttaccaattatacgggtcatctgaatttaatatttccttgtctttaataagttcaaagtttctcaaacgatactctcgaaacaaaatacatttcattgcaataactatatggtcaaataataaccatataagagattcactttgcggggaaaaaaaaacactaaagagattaccttcaaaaagactgtcatcgactggagctgcctctttgctattagcctaacgtgctccaatagcccagcgtcgatacggactttatctaaaatgtgagcaatcaatttgaaagcaatttcttgcttctccaaactctccacaggctcttcctcaaaagaagacacttgctgcctaagcaacgtagctccacctccctcattgaacccaaaattcccactcatttgatcaataccactcttccacaaaatgccagccgccattgaaccccttgacgaagcactagttgcctcatctgcgacccgggaagctgcactgccagacgaacacgaaatttggctcgtttcatttcctgggcttgaactttcattcggctggtaatgcttcacactcaaaggtgagctttgtgatgaagaagtctcggaggtcactcgaattcgttccctcggagtggccggagactgaaccagaggaccagacgctgccagctgatcaaggagaaggttaatcaatttttctgcgtccgaagccgaaattggagggaagctctgggacagggccattagaaaagccctagaaattcccaaatctcctccattactgatggccgaaaccacaacctcgcctgtgaactcggctatctcagctgtgaaatccggcgacgattcggcagctttccatacatatcccagaaattcaacaaagaacgaagcaatcgcatctgtgccgaacgcttgcggccaaaacgattgattgaatgaagccaaaatagaacgaaagaactccaagaccactgctttaggacggagatcggcggaatctgggcatttagaaaggaaccgagccacggcaaggacggcattgagctgagggcgcgaaaccctaggagatccagcgacgagagcctcgggcgagggacatcggctacaaatccaagacagcttctcagataattggattgggttctgcgcaattcgcaaagctcgatcaaagcttccatggagacctaaggacaaatcaaagaacaaagcaatgcaagaaaatatttgaataactggcagtccctccaaactgagaattatccaaagaattacgcatcgggagctccatcagaaggtaccatggccgcacaaggaagtagatagccaatgtggatattgggattcgcggatgggaacattgcttctcaggttcccgctgtcgtcgtttttcatcgttgggccaaaggacagagaaacaaaggtcgctttttaagttcagttttctgccataactgttttccttaagtttcttcttccgtatttgctttttttaataaattaaagcagattaaatgattttgaagatggtgatcggttcagcccaaacgttgtcgggaaagcccaaaatttcctgagaaaggaaaagaacaaactggaaaaccaaaaaaaattgtggggatttcttactctctttgtttcttatgatattaaaagtggtatttatacaaagtggtaaaaatctaaacaaagcccaataaatataaacccaatcctaatacaccccctgaagatgaagtgtacaaattatgaagcttcatcttggatacacgagattgaaattgattgggaaataacggtttagttaagatatcgacaatattgtcctttgtagaaacatgtaggagtttgagacgaacttgttggagcttttccctcacaatgtgacagtcagcttcagagatgtgtatagcggcggtattatcacaatacaagacaggtgggctggtgtaatggatgccaaagtctgataaaagagcaaggatccaagtgatttcgcaagtagcttgggccatggcgcgatactcagcttcagcggaagactttgaaacagttggctactttttggacttccatgaaaccaagaaatacacaataccctgtgatggaccttctggtgtcaacacaagagccccaatctgcatctgaaaaaaattttaagttgtggttctgcatctttaaagttagattcagcaaaagcacacaaatgaggattagaattagcataaaaaaaatcagtccttgtcctggtgtgcttttgagatattgaagaatcctatgtgctgcatgtaaatgaggtgtgcgtggctcgtgtaaaaattgacttaaagggttgacagcatagaagatgtccggacgagtaatggacaaataaataagcttaccaatgagtcttctataaatggttgggtccgaaagaggggtgccaacatctttgctcaatttaatattcggttccatgggagtggaaggaactttggctcccaaaaaacttgtatcatggagaatttgaagtgtaaaaggccattgagaaacataaattccagccgaggaacgacctaattccaaccccaaaaaaattcaaagaggaccaaggtcttttagctgaaaagtcgagtgtaattgcttcttaaaattctggacaacaacatcattgttagaagcaatgacaatatcatcaacatacacaagaatagctaagaaagtattgttagtattcttgataaacaaagtatgatcattaggagattgtttaaaaccatcagctaaaaggcattgactaagtttagtataccattgtctagaggcttgtttcaaaccatatagactttgtttagcttgcaaacggcatttttggggacaatgcccggaggtgtatagcctttggggagttgcatgtagatagtttcatgcaaatcaccatgcaagaaggcattattgatgtccaattaatataaggaccaatttttgattgctgaaatagcaagtaatattttgagagtattaaattttgcaacgggggcaaaagtatcaaggtagtctatcccgtgtttttgggtatagcctttggcaaccaaccgggctttacacctaacaacctcccctttttcattatatttatagttatagacccacttacatcctatagcatgttcaccgggaggaagaggaacgacatcccaagtcttgttagccacaagagcaatgatttcggtgtccatggcttgattccattcgcgaatggtggctgcctcgttatagcttgtagtaggtgcaacgatggcattggcagccaaaatggcagcacgaaactgaggggataacctgtcataacacaagaaattgcacaaagggtgagccgtggaagtagaggaaccatcaagagtgcaaacataatcattcaagtgagataggggctgagattttcggccagatttggtggtttggacacgcggaggagatgtggcagtgtcatttgatgtggtagtggttgttggttattctttttggggcaagccgaaac

SEQ ID NO: 224952 - DNA, 3710 bp, Cannabis indica
tttggttgagaggaatgaaaataaagaaatcgtaatgggaatgggaataagaatgggaatggaatggaataaaatttaaaatgcataaaaaaattgataaaaaaatcattaaattttttctcttgttacattgaaatgatctttctttcctttttaaaatagaatagtcattccaccaaaatggtggaaagaacattttaatttcaatactttaaaatacaaccaaataaaggaatgaaatgaaaattattttctttctattccattcaatttcattacctccaaacaaagacttcctaaatacgaagaattgagtcattttttcgaagattttcttgggtttatttaactgtgtcaccagaaagtagaaactgttttgtcgtttgatttaaagaaatgaaagaaacgacatgaggatagaaatcccatgtctgaatataaaagcgagacgtgaaatatctccaattgatgtatcagaaattcagaagaaaaaaatattacagaaaaagagcaaagaaatgaaggaatcccggaaacggaagcagttcaagccacttggggaatcacattccttgtccaacaaaaaatcttcagccaatcacaccaaagatccatacccaacttaccatcaaccaaccccagacgaatgtcgagccgtacgagactccctcttggctctacatggcttcccccaagagttcgccaagtaccggaggcagagaccaagcgaagatctccccgctgatgaaaacggctcttctctttccatcgacccttctgaaaatgacaacttggatggtgatttggaggaaaaggagactgttttggacggtttagtgagcactgtgctgtcgcagaataccaccgagctaaattctcaaagggctttcgcttctcttaagtctgcatttcccacttgggaaaatgtatgtctctctaccctctcgtgttcttcttttatggattatcttttactaatgttgttttgttgggttcagcatatttatgttctggttatgtagtgtattacactgtaattcatttcagtaagcctaaatgattaccgatgaattatgtgaggtgggttttgatagtatgtgggaaattaactgtgtttttgtttttgggcatgggggcaaggttttgggtgctgattcaaaaatgatagagaatgctataaggtgtggaggtttggccccaacaaaagcttcgtgtattaaaaacttattgagatgtttgcttgagagaaaaggaaagttatgcttggagtacttaagagatttttcagttgatgaagtcaaggctgaactctctctatttaaaggaattggccccaaaacggtgatctttctaacaattatatatttttttatgtttgtcctcaatgttgataattttacctatattaaccgagtaacagttgaccaaaaaaaaaatatataagagaatcaccctttgttggaacatgtctcatgcttcactcactctattgtcattccattactacattagtatgtggagtttgtttctttggttttcctggtacataagctacaaagatttttatttccacattgttcaaggatttggtaatggagctttataaagatattgtttctttttgaatatttgaaatggatgataggtttcttgcgtattgatgttccatcttcagcatgatgattttccagtggacacacatgtgagtgctttatccgttcaaatgtttccatattatgcaaattacatagtttagattatgctgagaaagatgtaaaacaggtgtttgagattgcaaaagctcttggttggttaccagctggagctgacaggaataaggcatatctccatctcaaccaacgtatccccaacaagctcaaatttgatcttaactgtcttttgtatacacatggtaaagtctgccgcagatgcatcaagaaagagggtaccaagataagaaaagaatcaaataatgattcctgccctttattacattactgcagaagaaattagtttggaatcacttggcaattttgagtgtaagtatattatatgactgccttgattctccttttaagattttagtttaagaacttagcatgttgcatgagctttttcctttttagggtgaggagggcagtaggttttatttgactgggagatgaaactcttttaccaatgattaactgtacaatttgcaatgaagtcaatgcaaccattagcctccgaaacaccattttccctgtttgaatttcacatttgaggttggctggctaaaacatgtttagttagattttctttcctggaagactggaagtaatactccaatttgaattcgtgcactgatcattgcataccagaactcatttttatatctttcatctgcaagacttgtggttgtcctgctcagaaattttaacagcagaaaatctgtggaatagtttatttattctaggcacatcatagtttatccaatatatattcataggcatatacatacacatacatgtttggcataaatattgaatcttttttatgactttttacaaaagaagagtttagatatgcttacttcatgatccacttccactattttaatatccttttttattccttcccaacttttaggtataacagtatatggaaaagattacacactagaaaaggtaagaaaagcatataatttgattgcagcctggctgcaatcaccatattgcaaaatgctgcattatcaaataaataaggtatttgctattcagcacaaataaaataatttaatggttccttacaaagacacacaacgtttaggaaaaccatcaaagaaattatagttttaaagttagtgctgtcttcctagcttatatatcccagcactttttgactttttatattacattacaatctttttttaattaagttgattttaaatgtccatctaatctttaaatatcattgccatatttgtggtgaaaccgcaaaaccagttatgggatagaccatagattttctcagtaatgccttttttggtttaaaaatttgcaaatacattgaaacatattaaagctcttttccatgtgatatgtatgactaatacctgaaattatttgtttattgcattttactttttcctttgtaataacttcatctgcacaacttgtcttatcttatcataataatgtagacaaaaaattataaaatggtatcggttaggtttaaaggtaactaaccaaccttgtagtatttgcttaaaaacagtcgggggaataagggaaacaccgaaaacttggctctgctagttaagtgacagtttacattttgatactcatgagggagaaaagccttagattatttggttttgaagtgaatctttattctgatggcaagagtcattctgaagaaaacagaagtttgatgtccatagatgaagttggttctgaagctgagcatactgatgcgaaatcagatggttcggtatgtcaactagaacaaaagaagcatagatgtgagttctgtcatagagagttcatgaactcacaggcactgggaggccaccagaatgcacacaggaaggagaggctaaagaaaaagagaatgttactacaaactaagaaagccaagctttatcctcaaccaaaggaatgtcccactggtttgactttttatcattcaacccaatgctatatagacttttcttcttctaagttagcttt

SEQ ID NO: 224953 - DNA, 1903 bp, Cannabis indica
agcttgtaaccctacatttatttatgacttctggaagaaatacttaatacaattatcaactttttattttgccattgttattttgaagctagatccatcgccatttcactctgttcagtatatcaaaatttgaagaccttttttttttgtttattatcctaacgtgacaaccttaaatattagaggccttgttttttttttttttttacccttttgatttgtaacacgaggtcttcattccaactgcaatgctgacttgtaattttgaatacatagtctagaaccgcctgaaggaataagtaaattaacatggaataatgatggaagattgataattatattaacatctcaaatattgcataggaagactacattataggaacacaacctcctgcaaaattatagcaaaacaaggctccaaccacttggctttggactgaaataacttcaaggtcaactattgcttgcagcaaaataaataataataatttctagaagtgcattagtttagctgagttacgtatggatcatatataggaagtgttataacgtgagaaaggccaacaattaattgcatgtcagtcttattcaaggacagtaatcctatcatcgtgtgtaaaccacttgctattagtgtttcactattagtccaccttgtgaatcgtgtagatatatttgataattccaattcttaatttcgctttattcatccattttttttctaaaacaaaggtttcaacggcacaaaaactctaccattatattggaaatgtgctataatttgtgctacattaaaaaattaacgttcctttagaagaaaaatctcaactccgccacaaaattcagacaatacaaggtgtgcagcaaatcctatcaagagacatctgagacaaactacgaaagcacagccataacatccgacgccctcaaagctatgtagtcaccatctttgcccttgaagtcattccctgcatatttagagtacatgacagtgttcccaggtgtgacggacagtggtttcctgttcccttcctcatctaaaggaccaggtccaactgcaattacctgttaaacaaatagcaaccatcatcaacaatctcatttccaagagtgaactattacaagtagtaaagaatatccaaatccaataacgaatactcaccgtgccaatagagggcttctccttacttgcttcagtcagcaacaggccccctgctgtcttctcctcagcctctgcaatctgaaagcacatattttaaatgtgtcattaccattgtacaccaacaacagtacatttttccaatgcaacttcatttaataaaagatggcgcttcagaggattaaataatcatatgaaaagagattacaataggtcaagttgccaggtaacaaaccttgattaagactctatcattcaagggcttgagatctttgacatcatcagtttcaagaataccaacaatgtcatcatccttcaatataagatgctttgaaccattgaattccagctctgtcccagcatacttggagtaaacaacttggctgccagcctacttgaaaaaagcaatcgagggtcacaaatgaaagtcttttattactcaaaaaaagaaagcatttatcaaaattttataagcaaatctactaccttcacactgacttccacttttgccttcccaactgccctgccttctccaacagcaacaacctctccaccttgaggcttcgattgagctgtggttggaagcaatattccaccttgagttttctcatctgcggtcttgagcttcacgagaactcggtcacccaaaggtttaattgatgtgtactgaaatttcaaatcacattttacatgtaagataatatacaaaaggaaaaaaaaaaacaattttagcatatttcagat

SEQ ID NO: 224954 - DNA, 8709 bp, Cannabis indica
caaaacacctctttaattatccaaaaataaacttaaatcacaagtaccccactcaaattatataaatcataagagtatttgtgtttagaatagtggtaagtcattttaataaatagaactcatcttaaataaaaataattaggtgaaattacgtaaattatgtgtgaacacatatcattacaaacatatatgatgtgacaaaagtattttacaaatatattacattaatttgtttttttttttttttttttgtaaggaatatattacataatgttaatagaggcaattatattaaattgctttcaatggttttgtcaaaaaatgcctctatatcaataaacggtacaaaatacaaaagtaaaaaagaggaatgcatattgcatattcaaagtgtgttgagcaaaagactcttttcattaacaaatacgcataccaattacttttatgttacaaatacagagtacacttaataagagagaagagtctaatagtacaattgcccaaacaggaataacttgatctacttgcactacaaagtacaaagcaacagaaacataatcgtccttaaggctacaaatgatacaaaattgtgacaacttatgcctgcattgcgaccataattttcccttacaacccaaaaatagaacaaatgaaaaaagactaaaaattttccaaagcagattttcagctgttccgttctgaactttcaaggggttgatgatccttatcacaacgttttaagaggaccagccaacccagcaaccttctgctccctgatgttgtacagaaacatttatttgccaattgcaattttcctaagagcttcaataggagaacaaaatagacataatcttttcacttcttccgttgcttgcttttaacttttatatattttctgttggacttgtcaactccactgcccccgctacccagcgagaagttgcttccatcagccattagacctagattaccaggagcctgaaatggagaagggttctgtgggttagacggatttggttggcccccaaattgaaacggattaacaactgagggagctggtgctgaagcaaatgcaaaggccgagggagctggggtaacattttgttgcccaaatcctgggactgcaggagctgatgcctgaacagtgtcctcggccatgctgtcttccatactcatttgatcattgtgaccagctgaagcaccaaaagcaaatgtaggactggcgtttccaaaaacagtctgtgtcgacgcaggacctgaagaggaattaaataagaaaggagaacttgaggatgcaccattagatgatgcaaacatgccaggcgcaccattggtggcagcaggcgttgatgctccaaatatagacggtgaactgtttgtggtagtgctagcagctgaagttgctccaaaggcaaatgtgcttggagtagagttgaaattgaatacaggtggagattttgaaggttgccaactggaaccaaacacactaggtgtactggtactgctggagctaaccaagttggcttcagacgaagaagaaccaagtccaggagtacttcctgaactaaatggtttaatagaagttgttgagccgaaaggagaactgccagaagagaaagtggtacttccagatagcccaaatattggggaggatcctgaagaagaaccaaattggaaaggattgctctgagaaaatgttgcaagtccagtcccggtaggggaagcctgagaactgggcactgatgaaatcccagcaccaaaagaaagacccagagattgagtggtagaagttgaagaggtggcagcagcagaaatcccaaagagtgtactcccagagcttgcattggtagaaggtgtggcaccaacacctgcactgctctcattaccaacagatgaaacctgctctgtcttaatggccccacgagtgacatcaaaagaagatccagaaactggtggagctgcaggtgaggctgtagaaaatttaaatacagatgcagctggtacagaagaggtttctgaaacttgtgcaactccagttgatgtatagcaaaatttagttgcaggggaaactggtattgaagaagtttcagaggctggtgcaactgcagttgagtcagtagatgatccaaatttaaatacagatggagcaggtactgaagaattttctgtaactggtgcaactaaggatgaagcctttgatgacccaaaaggagatacaggtactgctggagctggtgttgaggtggagagactgccactgccagtgccaaatgtagtggtgcttggagtgggaacattgctagtactatttccaaaaagtgatccatttgatgtgttttgacttgtactggaaactacaggagtagaagatatcgaagcagaaaatccattattaagaccatccctgggtgttgttccaaaggcaaatatatttgcacttgatgatgaagctgcagatggaagtgcagtctcaggtgtcctaaagaaactcctacatttaattattcttatctgcttcaggtgacattggaacagaatctattgcaccggttgctgttgtggacaagctgtaaagagataagcaaacataaaatgttcagaacaatttcaaaatcacataataattcagcagtcccaaactcaatcaggggaataaaatgagatggcaaagaataaaaagaaaaaaaatctctcctctccatcttctaattaagtctcaagaagttggaccctactagctattacatgtgaatcaaacatttcacatcttacgatctcacaaattcatttcacacccaaatttctgcatcatgcattggcattggatcaactgtctagactatatagcaattcaaccacccagcaagaaaagaaaaaggggtaaaagtctacaccttgtacacagcacaagtccgtttgcaacgaccaacagttttaaaaacatggcaaacaaaacaagaaatacagggaaaaggcctacaaacagaagttgctgttaaagaatgactggtgcaacgtttatcacaacaaatataacttctatccataaattttgacgttgcaggttctgagacataattagagtctctcaaaacaacactactaagtaaaatacggtcacattcatgcagacagaaaatcatagaaagccccaaagagacaaccaacaaatttattaattcaaatctaggttccccaactatccctacctacaatattcgtgaatcataaaactatagcaattactgtgtaggtgtccaaaaggactggaacctcaatcatagtcaaagcagactacatgtcagatcattcagctaccccctcttgaaaacaaaaaccacattcataaatataaaaacaacatcattttaataaaaaacaatacttacttgcttgaggttgcaggcttcgagtctgaagcaacaccaaagttaacattctcagatccactcgcagaagatgaggaaaacaaaaatggtgaatttgaaactttatcagcacttttgaggccaaagttgaaggatggagcggcagcgtctgtatctcttgatgatgcaatcttacccccaaagttaaacatggaagtagaaacgtttgattccatcagcggagcagcaccatcagttattaagaatggcacagctttagaatcagcaggtggggctgttgtgcaggaagatgtacttgggagcacaatgttggcactcttttcagcagtcatagacccagcaagagttccttcatcagtttttttattaaattcaggtcctgcaggtttactttcagtcaaagctgaaattttctcaggtatagcatcttcagttgcaatgcttgtcctctctatcaaagaggaattctcctttactctaccctcacccaatgaattagatgtacacccattcgaatggatatcatcatccaagtcaacaaaatcctgcaaaaagtattcataaagttcaataaaactttaagccatttaaaggtaaaaatgtacatgcatatcacaagaaaaatgcaatccatattataagcatgtggttgataaagaaaaggagccatagtaaaaattggcgagtatatatatgcttgcaactaggctcctcggttaaccctataatatttgggggactgattactatagtgattgctttgtaggtttctgagagaaactcgaacctcaaaaactatgggagcaaaccacaaagtagggggaaaaacacagattttttttaataaaagattaaataccaagaatcaaataaaggataaacaagataatacctcatgggcactcatccgaaatgtctttctcttatgttgaggatatgcagcggagtttaatgcagcaggtactgaagttacactactaggcacagaatcttttctaggcacaatagaatttgcaccattaacttctgaggcagtacaaactctatcattcattttagaagtggattggccataaggaaaatcatgcttaaaaccattttctttagccttgtctagcctttgagaagtaaactcctgagcatcaggtattctcatatcatgtgaattatccaaagacttgttattttggataccactgaaaatttttgatgagtctacatcatcaaggcttttcaaagcctgtccacgtagcatagatggtgacagtttactaggtaatttatccattgaagcatgtaccttggactgagatgatttttccttaggtgagaccaacttatcaatttgctgcaatatttttgaggccatctcactggatttaaagggaacagttgtattagacacaacattttccccattatcagttgatggtttaaagaagttacgcctaggttcaccaaatgatggcttcagtgctgaagatgatgagttttgacttccagctgaaccaaaagggctaccggagacaggtaaactcaagcctcttggagataaaaggtttggcttctgacgaattttacgtatagcaccataggatccaatgtcattgtccaaaactgaacttctgcgttttgaagactgcatagaatttaatttaaaaaataagtatcttcttaaaactgtaaacaaaagacataatcgtaattaagtcaagaaatggtaccccctgtttggatctagaaagtagattttgatcaggagcaacttgagaagatgatgacggaccagtataaacatcaactgcattctcgacattctggtatgcaaacagactggtgtaaggtcctcaatcacaagtatttgtaaatttcaaaaacaatatttacaaaaaatatactaaccttgaggctagtggtctgataaatccgagaataaggcgtccgggccatactataaatagcagatcttcctctagaccttggggttataaaaccattttcccgagcttcaacatggcctgaagttcttgggacaagcggtgtaacaggtaatttcataggagaagttagattacgggagtacatagcagatgaattctcctttcctgcttgactttgaaatcctgacattaatggagatattggccttttatgcatgtaagactttgcaagctctaccacatcagtaggagaagtagcatccccttcaaggacctgtcaacattattacatctaacgcaataagggtgatgtaaaaaaataaatttagatgttttctaaattgcacaaaagaaaaaattaaacataatttaattatcatacagttgaattgacaacaggagttgaaacaaactggcttcctgtcatattttcgagcaaagtagtttttggcaatccctcgctctctatcatatttcctcggacagaagttgtagtaaatgcctcctgtctatcagcagatcccacttctttcaaaggaatcacttctggctttttctccttattttcaactgccaaaccaacagttcttgaatgtagtagagctgtcagatgatcaatctcagatctgcatggcgattaacatttaatgacgtcaacatcacaataaggtcagttcaagtgaaaataaatacaaaaataagcactcgtggtagtggaaaaggaggcaataacaatatcctaacaacaagacatactgttaaccaaggcatgcaatagtataataaaagaaacaataaagataagtagtcacaacattaaacgctactaataaattgataatataaaaggtgtcgtcaagtgaggctgtattgtacaaggtaaaaaaatagtacattcagcacaatagtaacaacaattttacaaatttattaatttaataagaggaaaataaaaaagtaaatgtgtgccacagaacacaacacaacaaacttgaccctggtaaaggttttttgctgtagaatttgctcaagctcagtcaactcctctctactagagttattacttggtccatcgctttggtcaatggctcctttttgtgctccagaagaatcctgttctcaattgaaaaaaaaaaacagactatgaacaaaaactaatcaaaacaataatcaaaatgagattacccagcaatctgatgtcttgagtaaattacagtaaagtgtctaatgatatgaaacaagaagtcttttaaaacttgtcactgaccaggagatgaaatgagaaaacaaacttactaatatgctcactttattttggaacaactttatataaacatcttacagaatgttctgtttactagtaagaaagcagataagaaaacatatcaagaccacatcctctcaagtctcaagagatacgtactctcaagtcacgatttcaaacagataatcaataaagagctttcaagatagttctgccccttttcttatgtcctgtctctgactcagacctaactcaataagcactagataaaataaatgaaaataccatgctaagaatggtaatttgaacatacaaaaggctaaagaaaatgctggacctacctaacctaagcttaagtgaagaaaaaacatacccaaataatggaatataaactaactgaacttcataggcatacttactatactgctttgtttagattatagaaatttcacatatgcataactatagatgttaacaaattgcataagtattcaaacttactgtggcaaccgtttcttgttgcgtattccgtgcttcacagtttgcctctgtataatttcgtttgaagtaaatagaaagtggttagaaatcagtgactaatccaagcacgcaaaattatgcctgcagcaaactctactgctaaaagaggaataacttggacacaagcactaagcagaatgcaaataaagtaatttttatatgaaaattactgtgaatgcaaaatatcttgctacttgctattcaagatggtaattagacaatagcctggctgtagatttgtgaagtgcgtaaactttcttttctctaaactaggctccccacacctaactctacaaactcaaacctcaaaacttgtgcgagcaaaccatattccaaaccatttgacatttgacccattcctcttgagtcaggcagcaataaactttaatttactacaaagccagttgaaaaattacaaccgaacaaatcaaagtattttgacttcacgaacaaattttctaaattttttactaccaatataatttcatacataattggcatttgataataattaaaaatgcagttctcctgagcaaaagacttagctcctacaattgtatcgccaaacagatttggctcaatttaatcagcctgcctccgcaacatattaatgtaaagtgtttttcttttttttgttttaacaatatattaatgtaaggtaagccaatccgtcaagaaagaatcatctttctacaaccacccatcttttagaccaaaaatccccaaaaccctaatctcaaattaaaccctaaaatcaccaacaaagatatagacaaacacacacaccgctcaagattacattacccacataaagaaatataaataaataacctggccgtaacggggatgatggaggctgaggctgcggctgcggctgagtaatgcgttttctgaaaacagtggagaaaaggcggtgggcgctagaactaatgaggcggtgagccggatcgacgagcttcgagagccaacctcctccattgttagggttacgaaacaccgtgggagggcgatcgtatggcgtcgaatgagtggtcttcctaaaaggcttcttccgaaacttacctcctgcccctaatcctccgccttcgtacggttgctgctgctgctgctcccgccccgtcgccatgagagtgataaagatagcaaatttgaaagctttagggtttgagttccgaggggtagagagagaaaacggtgcagagagagagagaaagtgcggcaataacaaaattagggtttttaattacagaaagagaaggggggaaatgaaaaatataataataaaatatttggaaatgaagatggaaaaacaaaacacgtgcgaatggggggtgagacaaaagaaaatattctcaatatcatgttctacctttgcttaaaattaaaaattaaaaatctatcagtttcaaaaatatatatttttctaaaaaatttctaaagtatattaattagttaggtgaaaccaaataaaatactttttaacattttgtcccatttagagtctgtttgaaaacagctgtgtaattactatgcagtataattactagagtagtaattacactgtatagtaattaca

SEQ ID NO: 224955 - DNA, 3730 bp, Cannabis indica
ttatttttttttgtaaaaaaaagtcccgttttaaatttcgccctaggcctctcaacaccttgagacgggcctggttaaaccaaatatcataatactatttccattacattatcatttccattacacttcattacatcaaaacaaacatcacccactggtaggccaaacactcattgtagtttgagtaaatttttgttttattcttataatacacatgtttcgtttattatttatttaattatttactttaaagtaaatatgataaataataattaattataggtggatatgtattctatctcttaccaatctaagcagagataataagcttaaaaaaaatacaattctcttcttaattcatgaaattttagtgatgttttatttaatttttagagtttattttcttatatatttttgtcattgatccaataaataaaattctaaatttgccactcaatcaaccatataaattattggtttgaattgtataaacttttttgtttaattttttggtcagccatttaatatcgatgaaaatcgattaatgattacttatggttgattattaattagtgctcataatattttaatatgtgtatatatgtttgaaaataatagggaatatcaaatatatgattattgtaaaggagtttatagataaaatagccgtatgtttagaattgtcgaagctaataacattataaggtggtttgacataataatataatatatatgtgtttgacttgaatatatatcttatatttagacctagactacttgtaattgaatatatcaattcaaattcaaattcgatattttgcttattaattcaccgcaaaatttaacatcactggctgcattattattattattattattattattattattattattattattattattatccaattttattatgttcatcctttaaaacaaattttacgcgttgagagttttgataataataatagaaaattttacaatgtactaatctaaaaaatatatatattaatgcattcttatttgttttagtattaaaaaaaatattaatttaattaatgttacaattatatatgttatataatttatttaagatattaggtacaattttgataaatttttaaaaaaaaattaacacgctaaaaaattaggttcaaactgtcttttacgtgtgtaactcttttattttatatcggtataaaattaacaaattgattgttgtatagtataaattattttaaaatttttaaaattttacaagatatctaaaaaaatagactaaacaattatcataaatgccaaaacaaataacactacaaaaggaggaattagaaaatgggagacaattaattgataaaggagtaaattgtagaattatccaatagtaatttcttaagtgtcaacttccaaatgctcgcggattgttcacgtcctaataattaacattatttttggtgaaaataaatttagaagtaaaactaaatatattaccaaatgactaattcaatgaatattaagtagattgtaatgttcaacaaatatatgtaccattttttcttcaaccaaaagataaattgatcatgaccaatagaccataccatatacatagatatagaatatgtcaaaattaataaagaggaatgactgttctaacttccaagcggtatcaaatataatgttaaagttcacttttttatctccaatgttaccctgcagctattgtatactagtcacttcttcttattattattattattatcattacacttctatactttaaaacagttttttttttttacatttttacacaattaggcatagaaacgtctattgcaactagcgctgcaatttaaattgcaataaaaaatcgtacagaaacccctattgcaactagcgctgcaaccactttaaaaatcgaaactgtaaatttgaaaaaaatattaaaaaaaataatatatagagtaattccccttattattattatactatatttaataatatttaaatatatattatcatttatatgtttataaagtttggatttattttgtctgtgttaaaaaaaacaaattttgtgatttcaaagtgaatttgagattttcttttaaaaaaaaaccattaaaatagaaaattaccgtttaattggattatatattataattgtaagttttgatttactcttttaacaaaaatttattatcttcttttatttaaataattaattactatataatttgtcggtaacaattaattattatactttaaatagagtatataattacgaatttcgtaggaatattattatattatgattaagttggctagaatataagccaaatggcagtcttttttaatcatataagatttgctgttaaatttatgaaaataatataaatactatataatatttcaaaaaaaaaaaatgtaagagatataaatactttataattttctcaatttataaaatgtttattaagttttaattaaatatatacacataattaaactttccaacgtatttatttatttcatttttctgtttaatagaaaaagaaagaatatattataaagtaaatattattttagactttatgttttgtaaaagcaattaattagattttctattttgttaaataataaaatagaccatgtattttttaaaattaaatgaataggaccttgaactgattttttgtcaaaatataacttaataataattcgatctagagatattataacaaaattggtcacattttatctgttcgtctaaaaaattatcttaaagttggttatattaaaaaataaaatcgttaaaaattgagttcagggtcttatttttactattttggaaaatataaaatctattttgtcatttaacaaaacaggaagtctaattgataacttttgtaaaacacagggtccaaaataatatttactctatattatatctcctttttttaacaattttattatatttttaattgattgacttcttataattataaaataagatttttagaagaaaaacaatgaaaactacaggcagatatggaaaacttgaattgaacagaataagctgaaaatgttgttggacaaatcaaccaatccgagtaaagcctataatagtcaaatttcttatatttttccaattagtaaaaaatacttcttaaacaagaaataataaaaagaatttttcattaactttttgtagttacaaatttccatgacttttggtagttaacaaccagaagaacaagtgtactaacagtgacttttctttatgattagatatattttctttaatttttttaataattagctttttatattttaattttttacacttattatatcacttaagatatattgtttgtaaataataattgatagataaatataaattatatatttttcacattttttatgttaataaataattaaataaaagacttgtttttttttaataacaattcgtttttttatttttagtctttttatttattaaggtaaaaataatagaaaatatataatttttcatctatttattgactattatttatcgcggtcacttgaaaaaattgaatagaatacaataatataaaaactatattgtgatgaatattattttacaagttatatacattaaagatagaaaagtttaatagtataaaaaatataatggaaaaatactaattattatttttatataaagatttttttataa

SEQ ID NO: 224956 - DNA, 4080 bp, Cannabis indica
ttcctttgctatatccgcaggcctcatccaatcagaaacaacctatatgaaaaatagagattaagaaaatagattcaaagcacgaaaaatcgaaaaaggaaagcttttcggaaacttacctgtaacttttgagggggattaactggatctacaaataacgattgatcacttggagggaactcttgatcagtaaaatgtgtttcgcccctggcagtaagagcttctttcacagccaattcaaccgaaagcatgcgttgattaatctcttcttgtgtttccattcttggttttcgatacctcctggaaaatgaatccagatggaccatgtcaatcataacgccctcacgttcagaccttcgtttcctcccacttgaatattgtccatcccaatcaacatcatccctgtcatataggcctacatcggcagggtcactatcccaatcatcaacctacataaaacaaatcaaaatgaaattcaggtactatcgaaatttcctcataatcgtgttttctagtaacgaatatgtaaaagacatatacccgagctggagaatcagcccactgccaattatcttcttgataatcagccatactgtattcggctgaacctatggcaccatgtagagcagcaacctcatcttctgttaaacaccttccccataagaacacatccataatatgcatcttagattcagctccttcactatctgatctcccgaatgcatccatatcgataggtggtctaacaccgagccaaacttctgtcccttgttcccaaatactatcaccaatctgtaaaggtaatgcattttggtagccatcaaaaccaccatctaagtagcaagttgcctcgcctgattccgcatcaactgtcattgtcaccatatgccacctgaaatgtaaattaaaagaactaagtgaacaagaactagaatgtataaatagtataattaataggaaaaatgttcttaagaaggtaaaatgtaagaaccttccgtcggcaatacttgtggcactaatgctccattccttagcaactgtagtctgtctatcacctttggtgatcaaccgaagtccaacttgtccagcttcgataccttgctcggaaccagccactaagatttcccaacaaattttcttctgaaattcagtgcctagaaggcaaacaggtccagattcgggttgaatcatcacagcaattgaaaagctaacttttttagtttgacatatgctgggatcaatagggccgtaatgtcttccacttatggtcggttcatcatcaagaacacaaacagcatccgcaatacccgtctgtcaataattacaattaactctcagtagttgctcttaagtgtctaacacagcttttaacacttcaacatagagataataataaacaaacctgaagggctcgacgagctaactgagttgaacgtatccttcgagcaatgctagaaaccctctctcgagcaaacgaatcatcaagcacagaatcacctccaactgcacgaacagcagctgccatggctgcagcttccctgctcccggcattaggaatagaggaaataagagaagcttcaatctccttccatttacgttcttccttctccaagagagcctttcgtctttctttacctttcccttcctcttcacgtctctgcattaatagttcctcttccatctctttctctcttaaataactgcaaattcatacatacaaaagcatttaaaaacacacaatagtctcattcatatatcttaaaagaacgaaagagattaaagaagaaactaaacctctcttgaatgatctcaaactgcctacgatcctcgggcatccattttttaattttcttggcacttaggtctgaaaacccaatgctatcaaggaaaagtcttaagcgaacctcatcctatcacagacaagtacacaacctcgttaacaagaacacaacactcgcaactttgatcgcaataagaacacacaagtaatgataatcgaaagttagttacctgcactcgctctgcctttgcagtcaaaccaagtaaaagaagcaaataaccaccgaacttatcccacatataaacccactcggtatcaattgcctcttccaaagccaaaattcgtgcatgagcacacatttgtcttctgtgatccacatcaatagtgggctcaaatcgaaacccccttccagatctcagtttgccaaagaatgaccccgcaactaattcttcatttctcaacctatccctcaatttcatgacatctgctctgggaagcgcgaaatttcctcccctatcaagcgtaatagtagggtcgccaactaggagagcagctgaactagccgacctctggggagctgaatacgttccggataaagcatttcttgtctaaatggataacaacaaagttttcatgtaagattccaaacacagcaaaacatcactatatcgacaaattcaaggtaggtaaaaatacacacgcattcaaaatcaagaaattttctcttaccatcaaatacatatagtaattttagatcaaaatttcatcttacacgagtaaaagaaaatacaagaaagaaacggatcttgacagcgtacactaacaagaaattatgcccaacttaacaaaatgcaaaacgagtgcacatacataagcaaagacgaacagtttcttcaaaatattttcaaaagaaattacaacattattcatacctttgtggtcagatctagcaatagtttgaataatagtttccttactgagaaaagtgaactgcatcttccatcatctaaaaaaaatgacatatttaaacaaaccacaatcaaaaaatgtgtggatgtgcaaaaactgaaacgatagtagacagcccagttaataaattaatcatttttgctagtaaggcgaactattgccaatacgtcccacttggtgatatcttaagctttagaaattatgaacggtgggagcaaaccttgagagtcaagcagggacgagacacagcaaaaccaaacgaaacaacaagagtaactgctgatactgcagcaccagcaaacggaggataaattttcaaacttgcaacaacaccccagccttcggttgccaatgcaatcccatagagcatcagaaatgcaacactgttacggtattcaagtgagaaaacatcaataactaataatgtcacagcatgtgttaaacgtggtgatatgatcttttagttatacagcaattgcataggctatcgagacaaacctgacattctttccacaatcagcatgagaatcgtaaacatacacagggagaactcggggagagtaaacaacaataggtggtgaaagaagaacctgcacggaaacaatgcaaagagaatatactaagtaacaccgatcaagtgagagcaaacaaaaaatactgaacaaatgaaccgaaagtcacttacagacaatgctctcccggcaagtagaaacaagaaagaaaagtaaccaaccgatgctccaacaaatggtttctctgcaatgacagtgacattgccatgtttagcgaaaacaaccgagtcacaaattttgcaacatggttacaaaacccagcaaacataaatagatgacgaaactagtttttacctccgaaccatccaacaatgaatgctgccaaagctaaaagacaagcgaggaaacaaacaaagaatgtctgggtcctcgtcaaatagaaactgtttgatgcccaatggtgaatagcactaatagctagtacaatcatcagaagaactaaaagaagagaaactccaatctgttgcaaattcaaaagaagtctttaagaaaggtaagcacacgagaaaccgaaaaaagtaagaagggcttgttaagttatttctcaccgtccaaggtttaattacaactgtaacagctgctattgcaccaagcagaagaagaagaccgagtgtaacaaatatatataccactcgagagagtctccaattatcatctttcctgaaagcatattaaaacgatcccatggaaaagaaaagataaattttttcttataacatcgaatgtctaaagcagcacaattcaacgaaagatttagat

SEQ ID NO: 224957 - DNA, 6118 bp, Cannabis indica
atataaggttcattcttcatttttcctcattttacttcaccccctctctctcctttgtattctctctgaagaaaaagagaaaaaaaaaacttttcgtttcctttttcaaaattgacgccccaagcacctccattccttgtggtttttaattttttcgacgatccgattgttgctcgagtgtccacaatggtcttcctcagtggataagtcttcaaatcttactttttcattgtattcttgaatttgcaattgataactttaagctttttaaaattttttattctcacgctgtagtgtagtcatttttacattataattcgtttgatagttttaggatgtataatgtatgaatttctgattaaaaagattaaattttgaactctattttgattcttgactctttgagtcacgaagaacattgtttgaattttagaaaaataagattttgattttttttagcttctggtcagcacatagggtctgtttgtgaccctggccagtttgtggtctttacatgtaaccctagccaattagtggtttcagacagagaccttggccagttcatgattttagacccaaaaacctggctggtacgcagttttgcatcgcaagtttgcctagttctggctaatacttggtctttgtaaaaactctgtatggctttttgagcctatttcacccttgtctagtactcgattccataggaactctctacaggttgtcttaggtagaatctatcctagccaattaatggcctaaaactcaatgtttatttaattttttgaacttgaagtctatactttgccaatttacaactttgtacatcagggttgtcttgttactacccttaggttttggccagttgacctgtgctttgtctaagtctttttatttcatccggttgttcatctccctctgcctttttggacagatgaacctgcataacttttggggagttgacaactagattgaagaagacttgctcagtcttctttacaaagattattgtctagttcagacaactagttcttcttccgaggggttctttggatagttcctcttgtgatttcaaggtcagtagtggttctccagaacttgagatttagcaccaccactattctaagcgagtaggcagtgagctttatggtcggatcatctgggaactgaaccaggggtggaggcagttcctccccaagtcgtggacttatattgtctaagaaggtgtgcctgacacgttgcccactggacgggcaactcttatagttagaggtctttccactgttgaggctattgttatcatagctagatacttttagccatatcccaccatggctaggacgaagtaaatatgtcgtaggacacctcttgaggaccctcatatttccaagctgatggcaagaggaagggtttgacatgttgaggaggctaaacaacctcaagttgaacagcttgaggctggccaggctgaggagcctttggccgggcaacttgaggccagccaggatgaggaacccttggctggtcaagatgacaagttagaggctaagtagctcgaatctgcttccatgccaaactgctaggaggcagtataagacttttgtcgtgatccaatgtaatcctctagatacttatgatgagtttgaacaacctttaaatgctaggggttaactgtcaaaggttggagttaattatgttgaggatgagactctcgagccttggttcctcaagtacggagataagtagcactgtatatctcctccatcttccttgtaggttggcaagctctactaaatcaagggaaagggactcgtgggaagagtctaatgtgataggcccactagggttcaattggcacattgtcttccatccaactagatggcatggtcaaggccccatgccaagcaaggggcggtcttgcccttgcatccctattttagggacataaccaacttctttaggttgtgtctgactcagattacttcaaaaggcattaagtacctttcggcactcttcattctctgtgcagagttaagctggccgcatccctcaccttaggaggttagttactattttgagctaaaatccactccgaagcagggcaagtctggatacttttactttagccatctgggcaatcaatggcttggaggtaccaatgacaagggccatgtctaaaactgggaagtacgccaagagctacttcattgcttaggatgttaggtacgtccatcatctcttttaaagggtcctgacataccttcatccaatccccactctcaggctgagggatagaaccaatcatattctatctctccctactaaaaggtgtaacatctgcaagttagcttgtgagcaaaattttaagaagtatggcttgtaccttcctggacaaaataccgagggtgttagaagccctcctaaagatccagacgatactcttgcggtgaaggaggttatccaaaagaaaagacctgtgcccaagcaggaaaatggtaagtctgacgaggacatccctctggccaagattgcctgaatagtagccaggagggatgagcctttcagcagtgtttggcacggggaggcacagttgaggatgcccccatgttgattaggcctgaaagataagagtttgctaggcttgtccagccaccacctacgtccaaagacaaaggtatggatgcttcctctgagaacagttttgatgaaacctctttcaaggatgagaggtttccgaccccactcctgacgatagtaattttcttacttttacttgtatttagtacttataacttgtattctaactttgttattttcttttttgttcatatggcttccaggatgaaaaacctggtgaagaggtcctcaggtggctcttcttctggtcggtctcatgccaaggtggccaagactattgggtcttctgatgtgacccaaaatggcttgcctcctcctctttcaggtcttccaccgcccaactagctcgtggttatatatcttctttcgagcactgctcttcctcctcctccttaaagaccatcgggcaaggcagcccaaaagcacagtcgggcaacctgctcaactaagcgtgagaggatgaaagatattgcgcacaactatataggcaaatgcttgccaagtgttgatgagcaactccaggacttggatgttgacaccctgaattatctaacaaccaacactcttaaagatgttactccgtaagttgtttatttgtcttactgatatttttcatgtagtcctttcatacaccttttcttgtttattttttatttcagaccttgttgaagcttagccatgcccatgacatggctaagggctctactatagttttcaagaagaaacttgagagtaatgatgccaaactcaaggcaaaagaggctgagcttgtagaggtgcatgctgatctagatttgacatcgccccagctgaaggaggtctaggatcagtatgacggtgttggtcaactacttggtattcataaccaagaggagataaacatgacaattgataactccaaactaaagatggaattggagaaggagtgcagcaagaagcatatagccctcatagagaagcaagaggcccttgatgggtaataagcgatcagagacgagtatggagacttgtccatagaggtcctttatgaggtatttcttcataaccctgaggccaatctttcatacatggagttgtcccttcgtgagagctaacttgctcgagggagggtgttatatgagagtggtaaccgtcagaccaggccgcacagggtgatgaggtgctggctagccagacccttaatgcttctaccgaccagcctactagagcattagccagtcaggctatggatgagatgccatctggctagccttccattggccagactacagagtctacatcaaaagctcaatctgtcgagcgtttggttgacttgaaatcgcctacccctgtgattattcctgaagatgtctagagacttatgttttttttatgcttttattttgcatactttattttttgttcttgtatggcctataggccctttacttttgaacaatgttcgtgtatggcctttggaccttttactttcaaacaaatgactggatagacggtctttaatcccagctttaacttcttttgttagacatgtaggtgtctaggcttacatttttttatgtctaatctgaagtatgtcattcaaacttacttagctttcaattttttgcttatcaaagctttaaattttgcttaagtttaactgtgattgttcgatgttgtacggtgtgggtgcccctaagtgatcgagcagacttatggtctcttggtcatttataattcaccaagtactatagacctttgcctgtgtattttcttgtagggacttatttgtatgcatgtggaactaaaataatgaagattaactttaagaagttatcttgttagcaagttatttgacacaattttgaactgaaacaatgtttttattcattaattggtcttacatatgtgttgttgttgtgcaacatacattttttttattctaaaagcttacaaatctaaagtctgcttctaaactcatttttttggctattcttgcatgacataccaaacaggggccaccactaaatagtggtagaaacttagctctcttacactaattcttatacagtgagctatacgggaaccactattgaagagtagtgtttttacaagttgttcattggtagtactttctgagatgttctccattccactaccttggtagggaaactaattccatgttctcattatacctgccaagcttgtatgcacctttactcgttatttctgtaacttggtacgaacctttctagttttgtctgaacactccggatgcaagatctatggtattcaagaatactttcgaagcactaagtctcctacaaagaatttcttttccttgacttgtttattgaagtacctgataactttttgctggtaggcatgcagatttaggttggtttggtctcttctttcctttattttgtcgagggattctgatagcaaggtgtggtttgcttcttggtcataatggttccaattcaatgggcaacattgcttcatatccataggctaatgcaaagggtatctgactagtggctatcttctcggtggtcctgtgtgaccagagtacctctgggagtaagtcaggccaattgccttttgcctcttctagacgctttttcatagtgtctttgagggtcttatctacagcttctacttgcccatttgtttgaggatgcgtaactgcggagaaacttttaatgatgtcatgtctgttataaaagtcagtgaagatatcactgtcgaactatttcccattgtctgacacaatctgctgagagagtccaaatcgacatatgatgctcttgacaacaaagttgaggactatcttagaagttattgtcgccagtggctcagcttctgtccacttagtgaagtagtcgactacgaatacgacatattttacacccatttttcccttagagagttgaccaattaggtctattccccacacagcaaagggccaaggggactgcattagtgtgagctcgtttgttggagatcttgggatctttgagaatctttggcacttgtcacatttattgacatagtccattgaatcatagtatgtgaaaaatacccttgcctaagtatcttttcagaaattctttgcccgcagcatgattgttgcaaaagccttcatgcacttctactaagtgttgtggaatctgaagtggctctcttaagattataatatgagaattgggttggcaaatctcatatggcgtgtgagagagagaagagagagatgagtttcaaacttagagcttcagagcttagaactgagagcataagacttaggaaattagggttcaactaatgctctttatttagtagatcttacataattaatatcccttgaaaataggtaaataaagttatatttccataattaaataattgtaacaccctaactaacttaggcgtattacgtgatttttataaaaatatttacaaaaaggtttaactgtttaactattacatcaaaataaaagtcgtc

SEQ ID NO: 224958 - DNA, 4187 bp, Cannabis indica
cagtatagtacagtgcacgtaacgtcgggagaactatattgaaatatctcttaactcaacaaatggagctgatctactaaccaatccctacgtacattttgggttactttaaagacccccctctcccaaagacgagagttttccaatatcaaattctctttcctctctactgtcctcaattagaaagaacatattggaagtgaacctagaataacaatgtgatgagaatttaatacagtacacacatttcaagaaaactaaactgaaatagctcattatcagacatcctctgcaactccaactatattaactcaatctctttttctaagatttcaatactcctctccaccttcttgtaattatttgcccagaatagtggctgtaatgccacttactataaaaaaaacattatcttattaggttagcaggcctggaacaaaatgatttgtagtaccatttcagtggaacacataggttgaatatggcaaaaaccatacctagatacttgaagaccagtttaacctaatatagatcacactaacttaggagaaagttatagaaatagctatttattaagcgacgaatttggtctattgaccaagccctacatacactttgggttacttcgaaaagttgccactcccacagacaagagagatgtattaaataattctgcataattctctactggcctccctctttctttttatataatcaatcagtacaatcagtgtaacggatatcaactgagtgtaactaatattaactgactaaaagaacagcaagtccaaaatgtcgcaactatcccatatacacaagctgcctatcacaatatcaagttcctcagatatagcacatagtcaggagtgagaaagggatttgatcaagcatttcaaatatacctaaattccccgcagcctttcgaactgcattcacaagtccagatgtatatacagacatgtaatctactctctttactaatgcagaaactttctcctcagaagaagccattcctatctttaaatttactgtatatatctgcagcgcgttccaggatgtcctttatatcaggttttccaagccctccagcacttgtgaaaaatttgaatccattccggttgtatggaagatgacttgctgtcagaatcatttgactaattagccttaaaaaaatacagtaacaaaaaagacactaaagggtgtatgcccatttcctatgcagtgtaaaacatatctatgttataaatctaacaaaagagacaaagcacctgttatcattatggaaccgtcaactggacataagtaagcagcagaatctgtcagtgtgctattaaacattgctggtgtagatgctaatctgcataaaggaaaacaatacatgtcatgcatgacctgttaccgtcatgagtgacagaaagacagtagcttaaatgttcttaacgacaaaaatagacctcaatcaatacaaaactgtagacaaatagagcttaacatagaatataaccaatcaaaacatgacaaagcagcaaagcaattatcagccaaaccgtggtgttatctattgagtcaaatgtaaatataaaatttgtagataccaattgagcatggtgactggtgagtatctatttggtgtaccttatccaaagtattgagaaagtattaaaaaaaaacagaagaaagatttgggtatgatctttataaccagatgtgatatcaatgacctagctagaaaatataagcacttaaagtccaaagctagttgaatcaaaagtaagttatgcacgagtctatcaaatttgcaaatggcctactccaagtaattgttgacattaggagctcttcaagtatcaacaagaaatttacaccaattcgatcactaacccatattgaataacatccagtccagcaccagaaattcctcgagagattgcatcctgcaagttggatgatcaaactataattattaaatatatctttttattttattaaatagatataagaaatacacaagaccatctcagatctcgaatctctacaattacacaccccttggtcaaggaatgataaacccattcagcattcaaggaaacatacgtacctgtaatgtttgtgcagatatacgagagtcatgaccaatagaaacacttaaacgacgagagccatcaattttcttcttttccactaaccaagcagaaaaggcagctgctatagcttctgcaactggttcagtgagattgactggttctccctcaaccccaggaatggcaacacctcgaatatcactatgtaaacatcagcaaataagagtatttattaagttctgattacaggaaaaaaatattttatgaaggtagaagaggcaggagggagatgaagtaaagcaataacagaaaaacatatatgaattgggtacaagttgtcttctaagcagaaaattaaaaacagtgataaatcatatagcacataaagtttatggaaaactcatgtgttaccttccattttgaagctttagaaaatcaactttgtctagaggcgataatgcagtggtagatggagccgctgcacataagtgaaataaatacacataagtttcaaatgagtgtttttttttctttatagaactctaaccataaaaagcaattgagtgacaacataatgcaaaatggaatggggcatataatcatgacaacttgaaattttttttatcagttgtttcaattatcaattatgcacttgatatcaacctgtagcgagaatctagaacagaccattgcaatgaacagttctccggttagcaaaaccactctggtaatttgataagttgcgcaaatgcatggaagagatgtcagtcaatgttaccttccctccttgaaagggaaggcacttgcgcatataagggacaaaatggtccccttgaaattgggtgctggactgtctgttttgtgggtaccattgtgacacaaaaacattttggacaatcttccctgacattgctgcataaaaatttgccactttatcagattcattcttgtgtaacacacgttttggtggccttagattgtcaaacagacgctctaagattgacaattcatcgttcataagttcaaagaaacgattcactagttcaactacataaattgctgtgttaccttctttttttatgaaagaaaaagtaacgtaaagaaatacagaagcaatgagtgactattagctagagttttctgagtcatatatttaacaaagaaaactcagaaacccatataagttgaattcaagtgggagaagtctcattcacatattaagtatttccaacaacagacgcaggaaaggactgagaaggtaggcaccatccataacagataaaacgtcataagactaaagaggtgaaaaatcacgcacgcatagctaagtgcaccattttagcaccaaactccattaagaggagcttaaaacaaatctattgattaataatcaaaatccttcttatagcaaccgaaacgaaaagtaaggccgtggctaataataatcaagcattttaaaaacatgaaaacgtcagtggatagatatcagagtcgattgaattcattttcaatccggattcaatgtctgaaatgattttattttaaaaaaaaaacactttcaattgttccaattaccaataaatcacttgatttcctccatagctgagaaataaaccacaaaaatagataactaagaagagattgaaaaacttcacctgccatctgaactaaattcagaatttttggccgaatcccaatgaatatagtaacgagagaggaagacggagatatcgatagaaagcaagttgaaaaagagaaaagagtagtagtggagagtggttaggtgaaagaatctctcgtttttctaccccagctcagatgtgtttggcagcctcaaactcaaactccattgtatataactccttgacacgtgtcatgtaccttatagcatcttcgtagcatatgttaagaatgttaaaaatttgagaaatgctaaaaggaagtggtgttttgtgttaaactaagtatgaggtctcatatagtttaatataatagtttttagggaatatcgctaacgaatcgtaacacgacatatcgagaaagtgctaggcaccactgaggcctaatagctatgctttaaaattttatacatcatttaaaaatata

SEQ ID NO: 224959 - DNA, 8858 bp, Cannabis indica
cttttaataaatgagatcagaccaaaaatagatgttgggtttagggtaggatttattgggtttaaagatatctatcattgcttcagctgttagaatattttctttcttccttatagcttttcaaatctgatttatttttgaattggaaatttcggtgtttgaaagatttagtttgggaaactgtaaacaaaatgtttcacactacatcaagattgatcgtgttattgtttcatttcacactttctcttctttgtaatatagggtgaaacttttctattctttttgcctaatactgtttcttactctcccattcagattaaagatatgaccaaagagttagatatgcttctacaatctatagagcaaccaggtggtttcaaagatgcctgtacagtttcacataagagttcagttgaagcactggagcaaggaatacagactttgtctgacaaatgtagtttgtggaaggtgatgccgtgtgctaaattcacagcttgttattttatggctgaattgtttatttttgagaaatttgctattaaattgaagttgtctttggctttgtagagcattatggatgaacgagtcggagaggtgcagaatcttcttgataaaacagtacaaggtagtattttctctatcagcaaacataacacgacacaaacttaaaacacagttgttccctttgggctcctttaatattgttaactacacatattgatgattcaactgatttttagtgttggcaaggaaggcatatatggaaggcattgtcaaacaagcatccgatagtcaatattgggacctttggaatcgtcaaaaattgagttctgaacttgagctaaagcggcgtcatatactaaaattgaatgaggtagttcaagatctgtgttaccggcaatgtgttagttcaacctattatttttctcttcttattcattattctttgtatttcaggaattgactaatcagttgattgaacttgagaagcattttaataacattgaactaaacaaatttgacgaaaatggtggacttcatgcgggcaagagatctactcagagcagatatggaccttcaaggtatgttagacttagatgtactatcccttgaaatacttccatgtcactttagcattgttttctttttaattcattgtgatatatatacttttcggagaccaattgcgaccaattttctttgactcgttgagaagaaacttgttggcattttgatttttctcaacttttattatgtctttgcaggcaggttcaatcctaccatattttacataacacaatgagctcacaattagctgctgctgagaaactttctgagtgtctttcgaaacaaatggcaactctgaatatagaatcaccttcttcaaagaaaaagaatgtcaaaaaagagttgtttgagtccatagggattccttatgatgcctccttcagttctccgagttccacaaaaagaagcagtatccattcaaatagtaaagtcttactttctggttctactgctgctaaagtcaatacaaatggaaaatcaagcgtcttgaaaagttatggacaggaaactgcaaggaggagaagagactctctggaccgggtaatgtttctacgaagtacgaactgtttctgcattttttcttttgttctgttttgaattgtccaagtaatttaaatgtctacgaatgtatgaatatgatctagggtctctgacttgattcagtcagttaaaaaattagggtttaatttcttatttgcttagacaaacatttcttttttttctttcatattgatcagagttgggccagttttgatcctccaaaagcaactgtaaaaagactgcttttgcaagagagcaagccaagtgtgcctacagataagcgaacagttaactctcacacactggagagaacagcactagctcgctcgagggaacgcgtctcttcaactttctctctttcacaaaacagaggtgaaccatgacaaacttttccataaaaagttatttcatttacattcatcaaatttaattattcttttcgcctgaaaaatggttagctgaatatttctttcacatgaatatgaccagctggaaatctaggtgaacccatgaaacaggctgatcaagaaagtccatttggaagtgatcgtccgcagttaaaatttgcagtgacaaagtctcctacattgcaaagaaaccatatgtcaccagcgtctcagtcggttcctgtagcaggccaacagttcatgagagattctagcaataaaactgctgaaaaactaggtagtggcgtgactattattgagaagtccgatgcagtttcagtgaaggagaacaaaactgtaccgaaatctgataccaatctgaatccaaaaccatcagtgcctgcaatgttctccggtcagtcaccagtgtttgtaaagaaaactagcgaagaattaaattctagtaaagagaccacatctagttggatgacagacagtgcaaagaattctccattctctattacacctttttcgggagtacagagtataccaaaaaaagttgtacagcctgattctgcactgggcaaaactcaacctagtgaaaaagttctatcccctccaacctcctcggtatcgctttcagctccaatgtctcccttgttttcaacatcgttagctccttcgtcttcattatctcttacatcttcaaccgatcaaacttcaccattttctcttacatcttcaaccgatcaaacttcaccattttccattagcaaatcgtggaccaattctaacaccaaagcaaatgcaagtcaagctatctcaacatcttcgacagtagcttttgcttctccggttcaaccttcgggttcttttgaggctcccaagccactaccacccccatctttaacaccatcaaccgtatcctcgaattccgagtctcgcaagatagaattgaagggttcttcaaaagctgatactgacactcctactcaagcaccagctgtgcagcaaggtgagccagacacaaagcctaaaccttcagtgtcatctagccaagtaccagccatcttgcctgatccttccaagggtcaattcgatttgaatattacacctttagcatcaaccacccctaaaagttgaaactgcagcagtatcaaccacagccactcctaaaattgaaactgcaatgacaccagcaccagcagcaacaccagcaccagcatctgtgagccaaccgaatttcagtagtgttgttagtcttgcacctaatacgacattgaagaatgtggcagaacagccggcttctctgcctactatgttccaagcacaaactccaacgtctgggattgtcagcactgctaatgctaacaataatgaagatgacatggacgaggaggctccagagttgagcaatgctgctcaacttagtttgggaggctttggtgggttcggtcttggctcttctcctactccctctgctcctaaacctaataatccatttggtgcttcattcggtaacacaacaacaaacgttgcaagttctcctttctccatgaatgttcctagtggagagctttttcgccctgcctcatttagctttcaatctccacaacctgcacaagcatctccgcctgctaactcaggtgcattctctggtggtggatttggcagcgggacaactgctcaacctcccgcaagtgggtttggacaggcatctcaaatcggacaagggcagcaagcattgggatcagttcttggctctttcgggcagtcaagacagattaacactggcttaccaggagctagctttggatccccaagtggtcttggtggtggatttgctgcagctgctggttcttctggtgggttctcaagtgctgttagtggcggtgggtttgctaatatctctcctgctgctggtggatttgctaatttggcttcaagtggtagcgggttttctagcttggcttcaggtgctagcggaggatttggcaatgcagtagcttcgggaggtggtggatttgctgctgcagcttctgctggtaggggattttccccggcagctacaccaagtgttggttttggaggagcacctccaagcggtaggcttcctacgctgatttgttgattaaataatttcttgtttttgcttcggcctaatagtatttgctgatattccccggtacaaatgttgtattttatgtgttaggtggcggatttggagctttcggcaacaaacaaacaagtggtttttcggcttttggtaacaatgcagcagcagctactggaaaaccccctgagcttttcacacaaatgagaaaataaattgctatttaaactcaattttgagcatttcacccaaatgagaaagtaaattgtagttagttagctagttcataacaatcatatttagattgaattttgtttaatctaatatatatattaatagaggtgattatttctccccaatttccaggccttgttaatttctctttattctttaaatgaataatcataagaataatgttggtactttttaatggtaaagcttaactaaaaccactcatgtttagctaaaataaacagaatagtaatgatgtgtgcactcagcaaattacacttacaataatgttgtgtctttttttacttcaaatacaatatgagcatctctattagagtgctatgtagcgtatattttgtatgttttttaaccctcgggtcacagattagggatgtatgattctcgaattacgaaccaaaatagaagaacttgtctttattttacctttagcacatttagaatacaattataaaatttggatcaaatgtaatattaacatattttcgagttaaatttaacacaaaatttacactttaaaatcaatgttctctaatatgaataatttagtctatttggctttccatcaattttattacttcaacaaacaataatgttggtcatacagtcaacctgttcttttaagttgaaacaattactactttccacatttaatcaatcaaagaaaatatgagtaacctcaatattattaagctaacaaatgctgaaatatctcattccatctttgctttataaaaattgtttaagatattcgtatttttttttttaatttgaactctcatagctcaagttgtataacttggcaacttgcaagaaaatccttcaaacatttcatttattgagcagtctctaattcctcatcacactgaaactcccaagtcagaaatcttcatgatccgtttgtttaggtcggttctctgccttcttaaatgcgacaacatagacgcaacctaattcaaaaagaagaagaaaaaagttacaccacccttacaaactcattcacaactagaaggaaaacgaagataaagctcgacttgcctctgctcgaagtcttaaagcctccctaccaggagtttcccgcaggccatccattaaatctaccgaaaggataacatggttgcattaatcactatacggcagagtgtaacatattgtattcggatacattactacatacctgcagcttgagtctcaaccttgtaaacagatttcgctagacgttgaatatgatttccagcattcctacattattaacaacaaggattttaatcagatataattaaatcttacaataggatatagctataaaagtaaaaggagttctcgagtcaaatctacgtaagctcggtgtgcccatatttcatgtccttctcagcaagagccgctctctcaagtagtttcctactttcatttttcatcacatcgaccgaaaggctcaactccttcacattcttctcagctttaacaaatttcgcctgagtgaattttttttgcgggaatgagagcaaagttgaagacatattaatataaatgatttcatttcttagctttccataattgtttcagtatgcaaaatcacatcttcttttctccaaagtaaatgaatagacttacaaatggttttacagtcagttaataacatcaagatgtttcaaaatcatatagaactactacctcctcacttcgcagtcggcccaatgtatgacgaaacaagaaccttctaggtcctgccaagcgttgacaacaaaaacattttagccagtagcaaaatggtacaagtatgaagaagaagaagggataagaattttccatcccaactcagaataaacttgtatggaaggttaaacttatagttagccggtatgatgcttaacacaatgatctaagaaacaagaatagaataaaagcttcaaatggacactgaaattgaacaaaaagagaaaatggccggaccactcttctatttctgaaatcgtttagcttagtaacaatgagtcaaagaacgttgtgatgggcgttgaaggatcatttttagtttcataagatcttttcttatagttagcatattcataggttttccctcgaaataaaactcaaacatcaaaagtacaaaacaaaacaacaccaagtattcaagagatttgttggttctctaccaaagaccgagaactctaacgttacaaaattctccgttaccttttccctagacaattcctatgcttatatgccccttaggatcatattctatagaccttgttaaccaactctaacaatctgaaaattacccatattgtcttggtgccaaatgagcactcactgtctatcatcctcagccaaatatcgaaagagaatgcactaactaagactagtgttttcacatttgcaaattaaaattcactctacattgatatgatattcttagagaataaaagtatctatccaaattggtacacggaattataaaatccctcaaagaaaatctctttattaatgatgaaataaaagaataatctagttttcgagatgctagtagctccaattacaacctttcgagagggctgctctctccaagagtctattctcttctatttccaacctccccacaaatgaattcctcccccttatttataggcactagataacataaaatagtgttaactaggaagtactaaaaataagacaaaacaaccctttaaaataaaagccaactaaataaaaataaaagccatctatcctagcttatgtgtccttctattatatccaaaatgtataggaggaggcttatcatacattccttatgcagattgtaataagaaaatgaatttccatgctttccattgcaatttcttaccattagaacttaaacatagaaaagaaatttactgtgtatttataataaatttacaaagaaatatatgtagttaaatctatgcaaacaaacaatgtgatactaaagaatagtttttccatcaatgcattgtgtaagtctagctaccctaccccaaaggaggcagctcaaatgctcaatcaaccatgaaatgtttcttaatccccaaatagtgttgcctagtttagttgttaagtcaaaaatctaatagttttcccaaccaatctattacataagaagttgagcatcataataagtgtacaagtgactgcaagaaaaatcacaaaaggattgaattttgaagagagaacacatagatatatatacctgggagaagaaagagggcagctgcaaggccaaccccaacagtagcagctgggtattccctagtactcttcaactcttctggaaaaaacaaacaaagaaagacccaattggccctaatttccagaaattgaagaaatgaatgaatcatgaagagttaataataaaaactacaaacgttgaattgtgttgaagaacttgtcttcataagctgtgtagttggatttggcatcagctactaattcctgctaatcaatcaaagaatgaatgaaaattacaaaaagaaaacaactttgagagtaaaaagaaagagttagtgcctggagattggtccaatgagaagaagagttatgttggagataacgaatagctgaatgggtggagctcagaaccattgatggtattgaggttgaagatgaaccattattcttcttctccatggattgaccttcgccggcggctgcaggaggagacgaggattccgattccgattccatcgccatttttgattttccttgtttactctttcccctcttatcaattattattattattattattatttatttccccttaaaatattatatatttaagcctaattgtgaatctttcccctaaactttttattaaaattgttgggttcaatcatttttgtaccaaattatctctttcgaatttttgtatacatcacacgctccttaataaaattaagcaaaaatcatccaacaatctcaaaaatttgaaaacttttaacgatacagaaaattagagagcattatttttcttataaatttaatcacatgccaattattcaattactaaaatgagttatgacttggtagttactttgtgtaagttagagaacatttttttttttttttagtggggaaaaaatgagatgagttatgacttggtagttatgagatattcaattagtaaaatgagttatgatactcatgggtaaattttaatcttcttttgttttgacagagacaatagtgtaatttttatattttacactttttattcaagtcgagtccgcatataattgagttgtccattttttgttgataaattgaatatgctagtgtcgagtcatataaatattagttttatttaagtttcagtaaatttttcattttagaatttagtaactaattttgaattattatttgaacaatcaacttgttttggaataatttagtgctcaaataatttagaactataaactgatgaaattagaacagtcagtattattaaatacaggaatactcatcgttctttgaagagc

SEQ ID NO: 224960 - DNA, 2794 bp, Cannabis indica
gatcattcttaagaggtttttcattaatttgagacaacacagaatttaaaacacgactggatggatggcctaatctcctatgccatttatccttgattgaattgaaagacttcacagcagtatgctgagttacattggatttagataaactagaaacaccagtaaagggagtaacactatgactgaatggactgctatgacagagattgacagatgcattcggtgagctgaagtgataaaggccatctttaagcttcccctgaagaaccaccttctttgtttccttgtccttcacataacaaaattcagatgtaaactcaacatcaacattattatctctggttagtttcgaaatgctaattaagttctttgtaatatcggccacatgtaacatttcttttaaattagaggtcctctatcaatagcatacaacaaccagtaccaacatgattgatttttagctttgtaccatcacctactgtcagagattccttacccgagtacttggttttctggttcaagttgttaacatctgcagtagtatggttactcgcgcccgtatcagcataccaggaatcattctccaccatttcaggtgtggcaacaaacgcagaagcatgttgctgattgttgggcttgtttgcaccagtcgcaccagcaggaacagagcccatataggtctcatcgaacctattgtaacagtgtgctgcagaatggccatacttgccacagacttggcaagttggtcgtggtcctgcagatcttcctcctcttcctctagtgccaaaccttcctctattgttgttgttatgtcctcctcttcgaccaccattgtgacccgagtcaccatgatttcctgagtacccttgactccctcctgagtgtggagtcttgttggcatagttagcattaggagctgctgaactgttggagtgtttgttaacaccagaaatagcactcagcctttctatcttattgtcaaaactaagtaagatatcctgcaaaactggccaggttgttgaagctctagcctcaacttgcaaaacaataggtagataatccagatctagaccagacaaaacattagagataagcaaagattcaggatatgggtcacctgccaaggcaagaacatcagcccattgccttttttgtttcaagtagtcgaccatgctgagagagcccttccttgctgtctgaatttttgttctgtattcatccattttggctttggaatgtgctccatataaggcttcaagagcttgccaaagtgctgctgaagaatcacaccccataacttcagtagctatgctctctgtcatggaaccatagagccatcccataaggagttggtcatgaacaatccattgttcaaattctgggttaacttccagatctgcactctgctgtccatcttcagtagcagcagtggtgatgaactcggctggtctgggctttgtgcctttgaggtatccatcaagacgatgccctctaacaatggcagataccattgttttccatagagaaaagttgtttctgtccaacttaagtgcaaagggctgatttagagtgcttccaaactgtggtacgattactccatggcttgtgtttactgttgtagtggaggaatggttgataccattgtttcctgcaggagctgaacggtttgttggtgtttcaggggtggagttatcgcctgtcgacattctgtcagtggcggctctgataccaagtaaggaaatgcagagagaatattttgcaaaatgttcagctcaatgagcttgaattcattcattccttttatagatttacaagatcattctagaaatattacacctcagcaatttactaacaataaagggaatattctgtaaaaagggcaataacagaaacgtgcagaaaatcatgaggcaatgatggatccaatgatgagctgtcagactgagaaagaggcagagtaggaccacaacggctagtagagaaaacagaggaaatggttactggttactggtgtttactagtcactggtttgtgcatttttctcaacagtcatattagacgagatgctaattatgttgctcatggtttagcgatcgaaacatattttagcggaggataataattatatttgacttgaggaatctcccttggctatcctttctgatgtggtaaacgactctatataatttataataacatatctttttttaaaaaaatgtaaaataatatttacgtaaatatttatgtttttaatttagggcagatatatagaccagaaaatgggagaaaaagtttacagttacagttatttttattatttattttttgaactacgtcacatctgaacacatcatgagacacggactgagcagtgtgtggattgtgtgaataaattaatggcatattttgattggaggagaatacaagtgaatgaatgtagactaataatataatctcctaattctaccctttctcacctcacattcacggaaaaacttactcttacttcttttcttttcaccctttttctttctttctttattattatgattattatttactattgagatttgttaaatgacaattatagtgtttagtatatttgtgatgttacttattttattttaataaatattttaaaagattattaaaatattttatagtggtgtattaacatatgtgtattagaaaagtgagtacacaaacaaacctgtgtgtattaacatgttatttgttccatgcattaaaaaatacatataatttatatgttgaatttttacacttgaacttttat

SEQ ID NO: 224961 - DNA, 4924 bp, Cannabis indica
aagtattgtgactaaaaatacatttagtcacaacatattataatttttgtgactaatacctttagccacagatcttttaatcacaatattagaatgataatttataattagtcacaaatattttactttcagtagcaaattttgttgtgactaattgtaaaatttttaatagtatttagtgccatttttattatgctagctgctaatccaaatttacatgtccaaacaaagtatatcgaaatagacctctattttgttcgagataaagttctaaataaggaaatcaatgtcaaccatatttttactaagcatcaacttgctgactgtctaactaaaccaatctccagtaattaatatgctcattttaggaccaaactcaagcaccctgaatttgaaggcatttgataaggaggcttaattagttatgatggttagtattagttaaacaactattttgttaacgagctttgtaactattttctgttataattgtttgctgctcttttctctcgtgtatataataaacacatatgtaatagtttcataatatggctgaataatagaattgttctctttgaatatttttttttcttctctctctctctatctctatctttctacttgtgaaaaatttttgttactaatggagttgtttcatctactcgagcatactttagttaatggaatgatcctcaaatcaattttattgatgctagggaagtttttgttttccctagtattagtatggagcattggaagttaccaaatattgatatgattaaaatcaatgtagatgctcctattattagcacaaatgattactttgtagttggaaccataggggagcaattatcctcgcctttttgacgttgctaccaagtcatgttcaactgaatctcgttgaatctgcatgggtgaaggaagcactcagttggatcaagcaacaacgactttcaaaggttaccatatagtctgattgtcaggtggttgtcaatgtgatttttagttcttttgatatgcaatctccatcgaaatacttatttctattgtcgttctctttgtatttctttaaataatattattattgtctttattaaatgatatgcaaacaagaccaccaattatttagcaagagttgcttgttcttactcagatcgttgctacaataaggagcttgtctctactaacgtgcaagctattttaatggctgattagttagtttaatataacaccaagtttttattgaaaaaaacatattgagataagtaaaccacataacctaattttatctttatttcaattaatgtaaattctcaagtttaagatttatatttcttccttaaagacaaaactattgagaaaattaaaaattttaaactcctatatttttttttgtctgaaatttcaaactcttgtattggtaaaataaaagtcccatataagttagtttaggtcattgatggactcaaaatttttcttaattattataaaaaatatttattctactttaataaatttatggagacctttttactattttacacgacaattattaaatttattagaaaatattttattttttaaatataatttttttagagatttttttaaaaaagtaaacttaagggttttgctaaaaaaaaaaataagaaggttaagtatataaaaattaaaatataaaaaggttttggcactaaaacaagataaaaagattaaatatataaaaattaaaatataaaaaatttccccgtaaattactaaaaaaaaatctacaatttaacaaattaataaaaaaataaaaagctttgttaaaaaaataataaataataaaacaaataaaaagctcatcaagggagcgtgaccctatgagtgagggactttgggtttaagggttattaggaggaatattccaaaattccaatcttttaatttaaacttaagaacaagcaatcttcccgatttttttcacgcggtataataacgcgtgcgatgcactcgcgaaatctaagcctggtatttagcaactcactttctcctactttgggctctcgtttccaagttcgttagtgtatcattgttgaatccatcaccgttaaattgtggttaggtttgtttgatcaaattcaaaactcaatctcacccgttcatatactgtcttctctctttcggtttcgctaaatttcactattttctccgttgaagcctctctgttccaccttgtattctctttctccacctaaaccctttttccctcattcaatttctctgttttctgatttaattttttccggccatttattaatttgggtaagtttcttctgcgttattttagctgttatggtttttgcttcgctgaattttgtttttgttaatctgatttgtattccgttgtgtttttcttttaaaaattggttctttattatacccttaaaactggttcatcttgattgtattttaatgtttagctttctgtttggttactgggaaattaaaatataaaaacaataatgaaattttaacactttttcaacattcgatctgcataacttcgaccctgtattatttttcgttattttattgcttataatgttgcaaattcttaattttttttattatcttttgctaatcccatgaaaaattaataatgtttttctttttaattattattgtattaaagcttttgttctagttaagcacgtatgaaaactagtcaacgtttgtaaaatattaggactaataagtactttattttactaattaattttgcatggatttctttctttttttttttttggaattgggattttgaatttgcaaggttaagatggttttgataataaattgtagtgaaggagcttagctaagcggcacaaccttcttcttcctcctctttaaatgggctgttttcattctaagggaagaaggcaatttcctggttatgaggacccagtcgtccttgcttcacaaacagcttgtaagttcttattctttgatctttgaatgagttatacagatcatcttgtatatctatatatgtatgtgcatgaactttttgacttctgatgactaaactgaatttgggtcctcaagttttgatgattatgaatatcaaaaatgaaaaagcagtgtttgagaagctcttcaatcaaaataaactgcttattaagttttctactcctttctcatgttgattttaagcattatcttgtgttaattttcattctccagttagtgttagcgaagttgaagcattgtttgagctttacaagagtattagcagctccgttattgatgatgggttgataaacaaggtattgttggagccaaggtctcttacctttggcattttgatctgtcatatggctttagttaaatttgagtttagctgagtttttttgttaaaaatttgatgcattttttaccaaagattcctgttctttttcatgttaagtttagatttttcattgaaagattagacacatggctaagtactgaacaacatttgcatatgttatttccatttttaatagaatccttttgtttcatatgcaggaagagttccagttggcacttttcaaaaacaggaagaaagaaaatctctttgcaaatcgggtaagtactgcatttttcgaatctgttgcttgttgccaatttgcaaaatgatatttgtctgtagattttatatcagatggtgttcaagcaatgaatttgtttgaaggagatacagtttattgcttgcaattgtttgaataacatacgtttatcgagtagaacgtttgtggactaatttttcttcaaactctaggtatacattctgatttctgagtgaattttgcttgcagatctttgatatgtttgatgtcaatcgaaagggatacattgatttcggtgactttgtaagatcgctaaattttttccatcccaatgctccacaggacgacaagattgactgtaagttgaaatgacatgatataatagcaatagcttcagcctacacggttttgtagatttgtgctggtattatttagttgatgtgttgacattttttattgttttgcagtttcattcaagctttacgatttggataatacaggctttattgagcgccaagaggtattttgatgctctttaaatttgctataccaattttttttgttacgttctggtttgtatgtgcatggagtcatggtatggcctggcatagatattgctccaacatgtctctagtattttgatgaagtttataaacttggttttatagaacatgaatgatcctctgttgtttctgtgatgatctcacaaccttttcctcttgtttacttcatatgatcaaagttggaattttctctaaattcgctcatttttgagttgtttctatggatttcaatttgttgggattttggattttgttgtttggacctatacgtacatgtagcttcttaatacttgttcttgtcttcggaatctttttggagtaatcagtgagatatcattaaggtattttgcgaaactgttgaatcgcagatcaacctttaagcagttactatttgtcctctgctcccctgttacttctaagacacattgtattaaatgttcttatgtgaataataagctccacacatgatcctttcctcttattctgttttccaaaagttagtaaggtgtttttccatggcatattattcttttactctggtttttatacactattcaaacaactttgtcaacaaggctgcctatctgttttcgcctattcacttttattgcatggtttttattcttattttagagggaaaagaaaaattatgtggcgatttcgttctttctgaattaaactgttgtgtgcaatgtgcaggtcaagcaaatgttgattgcacttctttgtgaatccgaaatgaagctggcagatgataccatcgaaaca

SEQ ID NO: 224962 - DNA, 2521 bp, Cannabis indica
tgacacctttctcaaaatgtagttagggtatttatagcctcataaagatagtgaaaaaattaccactgtgttaattttagcattatttgcataagctcctgaatttggataatagggcatgtttgtctgtttggtaggcaacacataggctttccctagatgttaggtgagataggtccttgcccttggtgattgatgtgattcttcattatacagctgtcatgaggaacatggggcagtgcataatcagagagtaatgggtttaaagcccttgacacatattttccagaccacttgcagacgtcttctccatgccccatttatatagcggcatggagaaaacatgacttgagctcctatatatttcatcttgctcctcgaggtgggcttgattccctaagctagtgaaacatgacttgagctcctagaagagcttcctaaatgtgtccaatgagtttccgagagttttcttaaggatttaatgtaatcactcctggtgcttagtctttcatgccacatggcttactcctgacttgccatgtgttttgggagaaattctaacaatgataataatgtatttgtgtcaacaaatgctacttttcttgcacatgactatatgaaaagtcacaagccacaaagtctagtggttatcgaagaaatcagaaatgagatttctgaaccagcaattttagcactattagttgaacgaccgacagtggtaccacatttcctaaaattaaaaccccagtacttatcgtagtgggaggattgtgagataacatgtccgctatgaacgtgaaacacatattcttgtttttgaaatagaaaaggacgatccattgatttacaaagaagcaatggattatcctgaatcagataagtggaataatgacatgaatcatgaaatggattccatgcgcatcaacaaggtctaggaatatgaaactccacctgaggacattaaaaccatgaagtgtaagtggattttcaagaagaagagaaatgttgaagggaaggtaagctttaaagataacttctagccgaagcctaaacatagtgagcaagcgtcgactatgataaaactttctcttccatgggaatgcttaaatctatgcgcaatttaatttccatacctgcctatgagatatagtgaatagacattaataccgattttctaagtggggatcttgatgaaaccattgatatggaacaaccagaagggtatgtattaccacgggaagatcaaaatgtgtgcaagttgcttaaatccatttatggattgaagcaagcctctagatttttgaatatctagtaagagtattaaatattatggcttcgaacaaaatgaagaagaagattgtgcatactaatacattaaaggtaatgttgtggtaatccatttatgttaatggcattctacttattagaaacgatgtagaaaagttaataaatacaaagaagtggttagctgataaattccaaatgaaagatttgagaaaagcaaggtatgttcttaggataaaaaaatctatagagatataaagaagagaacgttagcactttctcaagaaacttgtatcaataaggtgctagaaagattctcaatggagaattcgaagaaagaatagttaccgtctagacatagaattactctatgcaaggatcagtttccaaacaccccgcaagaggaagaggacatgagaaagtatccttatgcattagcagttaggagcttgatgtatgtaatattgtgtacaaggcctaacatattgtacgctgtaaggattgttagttgttatcaacctagtctaggtttggaatactaaagtacattctcaagtatcttagaagaacgagagatctcatgcttgtatattttggtggagaggtaaatctcactaaatatagtgattctaattttaattcgaacaaagatagtcaaaagttgaaatttggatcaatatttactcttattggaggagttgtagtctgaagaagtataaagcaaaccaatcttgtagattcaaccatggaagtcaaatttatagcagcttgtgaagcagctaaggaagatgtttggttgaataaattctacactgatctggaagtagtttcaaaagtagaaaaaccactagtgtgtactgtgacaacggtggagcggtggccaactccaaagaactaagaagccacaagaaagacaagcatattcagagaaattgcaatctactacgagatatagtagagagaggtgatgtggcaatcttggatatcatgtcaaaccataacctggaagatccattcacaaagacgctacaagcaaaatcttttatgggtcatataaactaagggagattcctagtttgtgtttagtgaaagtgagagattgttggggtttatgccctgaaaaatcttataaggacatttctgattattaataaagagttgaactttttgatatatgctttatatttaaataattaagatttattattgaatagtttatattaaatatcgaaaaatt

SEQ ID NO: 224963 - DNA, 4570 bp, Cannabis indica
actgatgaaacaaggacttagtcttaggattatttatatcctaacagatcagaatatgtgtgcaaattagagaaaactctctatcacctgtaataagcacctcaagcttggtttgacaagctcaaaacaacagtggtgaagtgggatttctagcactccaaagctgatacaccacttcatatacaggacacctcaagttatcatcatggctcttgtatatgtagatgatattatcattagaggaaacgacaatgcagaactttagaaattcatcacaaagctcaatcaagccttctcactcaaagatctaggagctctgaactatcacaacaaaaatatgttgcagagctactaagcaagttcaacatgaagaatctcaaaccctatccttcacctacggttggagaaaaatccctatcattactagaaggaaaaaaacttgaaaattcaacttaataaatgagcttgattcgtgctttacaatatcttttccacatcagacaagacattacttatgtagtgaataaattaagttaatttcaaaagtgtctgacaaaaaatcactacagtgcaaccaagagaattctaaaatacttgaaagggacacaaattcacgacattcatattcaataaattgacagtttgaatctagtttgtaattcagatgcagactaggggtgttttcttgataatagaaaagcaataggtggttactgtgtttactttggagacactcttgtctcatggtcatcaaagaaacaatctttagtgtcaaggtcaagtacaaaatcagagtatagagctttagctcatgtgactgtagacataatgtggatagtcactattgagtgaaatcaagtcccctccagcttcaacatctgtagtatggtgtgacaactaaactgctagtgcacgagcatccagtcctgtctatcatgctcgaacaaagcatatataattggatttgcatttcataaaagatagagtcctacaaaagaagcttgacatcacatatgttccttcctctgacaaaattgaagattgtttaaccaagggtctttcacactcaaggttccaacttctcaatgacaagcttagagtgaaagaatcttcctctcgcttgaggggtggtgttaagaaccttgctgcttactaatccttcactaaattatctttgtaatgtgttggttaaagtctgccttagcttaatgtgatccctagtgtatatgtacaaattttgtaattagttttcctttgcttgtggtcctgtggcgtgtgtgccagtgacaagtgtccatcattgtaattgtattgcttcaccttttgctatttaaagaaaacacagtacctcagcataattgagttgagtttttcattatctgtaaaagtgcacttttcttattacgtatgcttcattgtatattaagttttatattttaatttataaatattttatttaaattaaaaataaaaattatttaatgtagagtgataagagaagaaaatataattgtgattgaaaaaaattaagtaaaataatgtataaagtttgatgaaataaaaattaaacgtaaaattgtagtaaaatatattaaaagtaataatagtgaagtaatgaaattaaaactaaaataatttttaaagttttgatgattgataaaaaaacatagtgtgtaattttgataattaaaagtcattaaaaattgaaagaaatcattgtatgattttcttaaaagtaaaggaaaaaagagtactacgtacataaagtttaaagaaaggataaaaaggaaaaaaaaaaaaacaatttgctatattaatatcattcactgccctttttaaatgggttgtttaatatttagtcagctaatgagtaaaaacatgaaatagagagctctggtttatggggacaattactttaaacttcccataatatgttacaaatgtattgtaaatttaatttctcaaaaatttcatcagatatggaaccacaagatagttatcatttgtagtcagtggtttccaatatgttgattcttgtgcagatataacagcatagctaatgtgagagaagcataaaattaaatgagtattaggtttgaaataaaattaaatagatggatgatgaatgaaagatttataaaattgattgttcttcaaatttgacaacgaacactttggatacaatacatgatatgaaaatgtaagaaaaataaaatttaaagacaatagtcgaaaacttcgaacctcaccttttgaaggaaacatcaccattgatgcacaccaccccattgaagaacataagcaccaacattttcaacccaaaatctctcatcgactctattgggatgatgatctctagtatattcaccttaatttgatggaataaaaattgcatcaatcttgttaactcgactaactgatgattaataaaaaaaataatactaaattttttacgtggttagagagttaacaagtcttagtccacgagtcaatattattacgataagactagaaaagccttataatttacacaagtatttgaaccctagattttgcctgagcaatttagcaatgagattctaaaaatttgctgactacttctctggacgctctaaatgatctcttctagattctcgctatgctggaggagtatctaacatggacgagttgtccatccgtcagctggaagagctgacttcgctagtggatctagcccattatcttggttgggcgttctattgggcatgaagtgactgagttgtaacttgctttgagaattccaagtgtcctcatctagaaacacgaataatatttatctctaaccttccgaaactctaggggttatgcaaagttgcacccttcctctcgaatgatatgaggaaaagtggaggctaggtcaaacctttttaaattccaatcaaaattgtttgtggttgacaacattttttttaaatgaagaaaaacattgcattgtgtctttggctcttggatatttcttttattaatgtggtgtgtgcaacaggtcttggtgaaataattgttgattgcgtcagcacgcatcttgagaagaatataatcatgttgatatcttgtttccaagcattgcattaaatgcataactaaaagttttcctcgaccgtcggatttatcttgtgttttcttggacgtaatcctagccattgatctggagtcacacaaatcaccacctttatgtatgttgactcagaaatcttgactgggattcctaagacatacacgctcgctagatatgcgataatgaaatatttgttatgtacttataagagagacacaacaaatttatagtagttcactccctctattgcgacagtaatggagttacgtctactttgagtttttatttctcacgagacagtaattatagaaataggctaagtgtttcaagctctagtttctagagagagaaactaaagagagaagttctaaccttgaggtagctttttgaatgtgaaaaatgaactaagtgagctctccttttataggtgaaggagccccacagacataggaaaaaataattcaaagtatgaaaaaatctaaattggctaatcttgaccataaaaagtcaaaattaacttctgaggtagatagtcatttttagagcctggcaggacccactgtaggtaatttggagcttatttttatccctcttgggggtgtaatttgaggtcgataacctaaatattgcgattgaagtgtcacaaatgacttgataaacattgaaataacttcaaaaatcaagttgatcagttagatcaatattgagtgagttaaggtcattttactgaaggtttttcatgacccagtgcccaagttgacatctagcgcctaggttgacctcccaccacccatgttgacatatgacgtcaatcgagatgctaggtaagtgaagaaacgtcttaagggatgtactttgtgatgcctaagtaatattttgacatcacttagtctatttttgtgctctggcaaagctggtcaccaattcttagaaatgttgttgttttgaggaaatgagagactcgaaactcttcatttcagagtgagttcccatgttggaaatgagaaatgcgatgttgtgaattttatttctatgacttcaaggatcatagtcattgtgaaaaactagatagacggtaaaaaagaattagaattagataagcaaaatccagcgcaccaggtcatttgttaacttgaggactaggtacttcatttttgagctctctagttgtcgttttgatacttcaaaggtttttaaacttgaggacaaggtcttcaaccccattttggaccattttgtattccatggtcaaatcagatttggcattttagtgatcaaaaccagcgcactaggttgactatcaaccatgaaattgagcccaacaccaggtaaacctaggcactgggccctatttctagggtctcgagattgtagttttctccccatgttggctttaatcttcattattttttatgatagaaaaaatgcctagaacactttttcgagaacttgattggaaacagcccaagttgacaa

SEQ ID NO: 224964 - DNA, 15190 bp, Cannabis indica
tatcagagctccttttctctctctgatattttcttttccatcttcaagtttctcgatctttctttactgatcatcaatggcggctccagctacaactacgactcctgtcatcttttctcacaagctctctgtgaagcttgacaatcagaatttcctactctggcgacctcaagttcttgcagcagttcgtggtcatgatctgtttccttttctctcagcaacacctccgattccgacgaagttcctcactgaaaatgacgaaagatcaggtactatcaatccagcttatcttctttggatcaagcaagatcaattactctatgcctggttactctcatctatgtctgatacaattcttatgcgtattgttggctgtgacacttgttctgctgtttggaagattctcgatcaatatttgcctctcaatctgcagcaaaagtcgatcagtaccagactcaacttagaaatttcaagaaaggctccaaatcgattaatgactatctgcttggtgtcaagactctagtcgatcgtcttggatctgttggacaacctctcactgctaaagaacatgtttctgccattttcaatggattaccacaagattatgatatattcattatctcaattaactctcgacatgaggattatacagttgctgagattgaatcacttctgctagctcaagaacacagaatcgagaaacatagcaatgatcttgattctgctccctctgccaatcttgctcataatcgaaatgctttcaagaatcgttcttctttttctgatcacatcaatcaaggcaacaataatcaaaatagaggttctgttcctccctctgccagagctccatattggaatccctatgccactggccctcgcaacttacctcccaatacctctggacaaggttccacaatgccgtctaccaatcctagagctccctctcccaatcaatttgccaacaaacctgtgtgtcaactgtgtggcagaattggtcatgtttcttccaaatgctatcaaaggtttaatttggagtttccaggtcttggtgctggtcagaatgacaaatcctctccaatgcaagctatgcttgcgtctgcatcatctgtcaatgatccagcatggtatccagactctggagccacaaatcattgtacattcaatgaacaaaacctgatgcagaaacaagagtactatggcaatgatcaaatccatgttggtgatggtactgggcttcctatcagcaatgttggtaagactttatttcactctaatctcacttccagaacctttattcttcataaccttcttcatgtacctaatatcactcgaaaccttcttagtgtatctcagtttgctcatgataatcgagtttactttgaatttcaccctgagttttgccttgtgaaggatcaggtcacacaccaagttctgatggaaggcaaacttaagaatggcctctatgccttcaattcagccacagtgtctcctagtacaacaaattcttcattttctgcatgtactctgtcttctcaaaatttgtctctacctgtcaatgtaactggtttagattccaatatttctcttttctcattgtggcatggcagattgggtcatccatctgccaagactgtcaaaagtgtattgaatgcatgtaatgtccctaatgtcaataaaactgtctttgatttctgcactgcttgttgtaaaggtaaaattcacaaattaccttttcctaactcagaaacaaagtacactaaacctttgcaactcattcattctgacctttgggggccttccccaattctgtcatcatgtggttacaaatactatatacattttatagatgcattctctaggtacacttgggtgtttttattaaagtgcaagtctgatgccttggctacttttctcaatttcaaaaaccaagtggagaatgagtttgattgtaaaataaagtcactccaatctgattggggtggtgaatttcaagcttttgaacaaactcttcttacacatggtatctctcatagactttcatgccccaccactcatgaaaattgtggctgaaagaaagcataggcacctcattgagtcaggacttacacttcttgctcatgcctctctccctcttcagttttgggatgaagcagttcgagcatcagcctacctcattaacagaataccatctccagtcattggtaatatctccccatttcaagttttatacaatctcacaccagattatagcaaattgagagtctttggctgctcttgctttcctaatacccgaccatataacaaaaataaacttcagtttcgatctgaggaatgtacctttttagggtacagtatcaagcataaaggatataaatgcttagctaaatctggtaggatttatatctcccgtgatgttctgttcaatgagtatgctttcccctactcacatcaggtttctcacactacatcttccactcatacaacctcatctggtccttctgtacctatacctgtcctacataatcccacccccttctctctgaagaacctactggttcttcatcacaccatgattcccactccactcatcccactccaccatcctttcctatccctgagtcatctccacccatgtcctccacttctgcttccgcacacaacaccatacctgagtctattcaaccaacagctgcctcttctttggatcctccagtcactgtgaatcatcacagtatggtcactcgatccaaagttggggtctataaacccaaagtctacatagccactagagaacctcctactcttcaggaagctttaaaagatccaaattggttctcggctatgcaacaagaaaatacagccttacaaaagaatggtacatatgttcttgtgccattacctcctggaaagaaagctataggttgtaaatgggtttataaggaaaaagagaatgcagatggcagtgtcaacaagttcaaagcccgacttgttgctaagggattccttcaaacatatggttttgactaccatgagaccttcagccctgtggtgaaacacaccactatccgagtaattctcaccatagctttgtcaaggaactgggggttacatcaactagacattaataatgccttcttgaatggtgagttaaaagaggaagtgtacatggtccaaccacccgggtttgaagaccctactcaccctgagttagtttgcaagttgaaaaaggcaatttatggtctaaagcaagctccccgagcttggtatgataccctcagctctactctgtactcacttgggtttcacaatgccaaatcggatcactctctcttcattcgaaccactcctcaacacacaactttccttctggtttatgtagatgatatcatcatcacagggagttcctctactgttattacagatctcattcattgtcttcattccaagtttgctctaaaagaccttggtcttcttcattactttcttggtattgaagttcaatacacgaatggaggtatgattctctctcaaaggaagtacatcacagatcttctctacaagtctaaaatgcaatttgccaatccattaacaacaccaatgactggtggagagaagctgtcagctacagggagtgatcccatccaagatcctcatctctatcgaagtttggttggggcattgcaatatgtgtgtatcaccagaccagagattgctttctctgttaataaggtctcacaatttatgcagaatcccttacagtcgcattggaaaacagtgaagcgcttattgagatatctcaaagggactcttcatcatgggctgcacttacagagtaccccaaatcttgacctcacaggttattgtgatgctgattgggccaatgacccggatgatcgacgaagcacttctggctattgtgtatttttgggcacgaatttagtcacttggtcttccaaaaagcaaccgattgtctccagaagcagtactgaggctgaatatcgaagcttagctcatctcactgcagaaataacctggcttcaatcattgatttctgagttgagcatccctcagtcccgttcccccattgcctggtgtgacaacctcagcacagtccttatgtctgccaatccagttttacattcaaggacaaaacatattgaacttgatctcttctttgtaagggaaaaagttctcagcaaacaattgtctgtctatcacattcctggctgtgatcaaattgctgatatatttaccaagcctttaggttgttccaggtttaccttgcttcggtccaaacttagtgttcaaggttctacaacactaagtttgaggggggctgttagtgaagagaacagttagttagttagttagtttgttgtatttattagtttgttattttgtacagctgtaacttctaaccaactcgtgtatatatactcttctctgcctttagtgcagtaataagataattcattttcactcaaatcttttacttaacacttattaccaagtggaagaggaaaagaaaatgaaaaaggaaaacaaatggtcccctactatctttcttctagaagctctctcaatctcattccgaatctcgatcagacaaacacaaacctatagtgagtagataccctggctctatcatcacccggtgacttaaacaggtcaacatagtctttcttccaaattccaagaagcttagccttatagtacagatacataatattattttaataataaacaatcaaacagaatcaccaccaccgacagctacatcctttatcgttcttagccacacccttctcttgctctgtttttgctgtgttaataaggtttttgcaactttcagttcgctttttcttttatttcttttttcgttccataatctctctctgtttatttctcttttggtatctgttttgttattatgttgtttgttcttatctggcagtggtagcttagaattttcccaggtagcactaatcgtatatttactttttctggagttttgttaaagaaacatagtgtggtatctggtttgggttacttatgattatggatccaagtttcagcgacttctcagatttcacaaacagtttcgaaatagaaaactggaccagtatacccaattcgaatgactactcggtaatttcagacgaatacacagtaaaccaatactcttcagagtttgatttcgttgatgattacccaaacctttttactccacctgatcctgatcccggtaatttcatgccctccattaacttgccctctttagaagatccatcttttccctccacaacactgagcccagatggaaactcttatactcctcccttaagtgtgaaccccggaagtgactcccccaatgatgaaagtgagttctcaatatatgtactcaagttcataaaccagatcctcatggaagaaaacatggagcaggagaccaacacgctcaatgatccattgggtcttcaagtcactgagaaatcattctatgatgttcttggtgagagttatccttatccagccaatcagtctcctacagataaaaaagctgagaccccagatagcaatttttcagtaagctctagcgactatggcagtaatagtcatgatgctaacagccctcaattgcttagtgatctaggagaccataactcttcattgcagtcctttgttcctggtgaaaacaattttcagtttgatttggctacagctcagaaattttttagggacagtgattcagtctcccagtttcagagaggttttgaggaagcaagtaagttcctccctaaaggtaatcagctcatcattgatctggaaagcaatggattttcatcccaattgaagacagatgatgcagttgtaaaaattgagagtgaaagcccgcctaacgggttgcgggggaggaaaaatcatgagagggaagatgatgattcagaagaagagagaagtaacaagcagtctgcgcattatattgatgacagtgagttatcagagatgtttgataaagtgttgcttcaagttgaacctgtggacaatgaagcacgcaaggccttgcagcctgtggattctaatgccagtagcggaaaaggtcgtggcaagaagcaaaacaagaagagtgaaactgtggatttgagattccttttaatttcgtgcgcacaagctgtgtccagtgatgatagaaggactgcatatgagcttctaaagaagattaggcagcattcatctcctaatggagatggatcccagaggttggcctattattttgccaatggccttgatgcgcgtttggctggaactggaaatggaactggaactggagccgtgttatttggttctttacttgccagggtgaaagcttctgaccttttgaaagcattccaccttaatctttcttacctgccctttcaagaaatttggcatgttctttgcaaacaagatgttcctgcaggtggctgagaaagcaacaacacttcacatcgttgattttggcatcctatatggttttcagtggccaatcttcatccagcatctctcaagaagagacggtgggcctcctaatctgcgcattacagggatagagttccctcaaaatggttttcggccaaaagagagaattgaagagacagggcggcgcttagccaagtactgcgaacggtttggtgtgcctttcaggtacaatgccatagtagtaacgaaatgggagaccatccgcgttgaggacataaagattgaaagcaacgaagttgttgctgtgaattgtttgttgcggttaaaaaacgtactagaagaaactgttgaaaactgcccaagagatgctgttctgagactaatcaggaagttgaatccagccatttttgttcataacattgtcaatggatcgtacaatgctccattttttgtcactcgttttcgtgaagcgctcttccatttctctgccttgtttgacatgttggataccattatagcccgccaaaacgaagagaggttgctgtatgaaagaaaattatttggccaggagattttgaatgtgatagcatgtgaagaagaaaagagaatggagaggcctgagacgtacaagcagtggcaagttcggtgcttgagagccggttttcggtcactccctctcagcaaagagttaatgagtaaatttaaagagaagttgagaacatggtaccacaaggattttgaaattgatgaagatagcaactggatgcttcagggatggaaaggaaggattgtttttgctacttcatgttgggtctcggcggagggaccttactcaaattaacattttctgttcaaacactactcattactcattagtattgaatagatgtaatagattagacatgagagtttaacaattaagttttgatgtactcatttcttctgttttgaactactgatgcagtagttgtaatataagcttgatcttctcagccgacaattgagagtttaaaggtggttcgagtttaacaatttgtggaaaccaattctcgatttgttcacttttagactgtatttgtagtactgctactaaacattagaacgatccattggtgagtatctgttttagataaaggaaatattatattatatatattccaataaaatgtggtgttttctcagtgctggaaaaacaaataaatacagcaaattaattaaaactaattcacttttcaatttaactatttctttttaattaaaaaaagaggtgctggcaataaagttgaagctatctgcactaacatatctgaaactatataaatcatcataaaactatcagagttagttagttggttaggtaattcgtctgttagtattgtcggttgtgttcttttatttttcaactgtatttcagctatataaatagcttttctcttgtatcacacttatacaattcactcaatcaataaagattgttcttcatttctctctgttttgttttgttctcactaatatggtatcaaatgctataatccaagaaccataaccatctcaagatttctctaccttcaacaatagtgcgtacgagagccaattcttctgacctccactgtcaatcaagtggacaatgctcttcggaatcctgctcctccagcatctcaaaactctgcagaccttcctcctcgagtccccgttccagctgcttcaaatcaccatgttcatggagatcgaccggcctatgaggatgtacaaagcccctactacctcagcaccgcaaatcacccaggactagcacttgttactccggtcttgacatataggaactttcaaccatggactcgagatttcaagctttccataggtgcacgtaacaaatcatcttttcttgatggtacgcttcccaaaccttctctaaatgatcctctatacagttcttggattggttataatcaaattgtccaatcttggatccttcactcggtttcacctgagataaagagcagtatcatgtatcttgatactgctacagacatgtggactgaacttaacaataggttcaatcaaggtaatggtccacgaattttcgaacttaatgaaaatctcacctttcttcatcaaggtgatgattctgtcagtacatattttactaaactgacttctatttgggatgggatcactcaacttcgcccaaaaataccatgcacatgtgttgctactgccaaaaatcaagaataccataaccatgatcaggtggtatagtttcttaaaggcctcaatgagtcttatcatgttgtaccagattaggtcttactccttgatccttgtccccttttaagaaaagtattttctatgattgttcatcaagaacgccaaagaactattggcaatagaaacactaattccattgcaactgctactttcacacccaaccctgcagcaacccctgattctgaccctgcagccaactttatctcaaaaaataagaaaatgagtcctacttgctccaagtgtcaaaaaccaaaccatcttatgagataaatgttactttctcactggctttccccttggttatggcaatagaagaaccgctgactctactgtcaaagacaaaagcaagtctgatactcgaacctttatcttatatgcctgcgacatgttttctaatatcctattaatcccctcagaccatccatccttcatagaatgaaaagttgtactatttttgctttagtatccatggttcataacaaccttctttaacccttaatatcattatcatagacatcaaatttaaaatttcataagattaaactattcattcaatataaaacttaatatacgtatttactgtataaattatctacactattaaataatataatggctcgctatatccaacatctattgctcggtcaaaatcatacaataccacaaccttacaaaatcttaatacataatccaatcgtagaattccttatttctagcaactaatatatactcatctcaataccttatcgatctttactcattcatacatttccctcttgataattcttagagcaacaactggtcgtacattctaatacgaatctttccagcgtaatttatccccacttacactctttttgagataacttcctagaagatttcttatcttgagattacttcaagttaagtacacttaactctaaataaaactcatggtgcatttgtgtcgttcctaattgtaattcctacttttatctctttcccaattggaatctgatttcaataattcctttcaatgaccctttacaattccttgtctgtattgtttacttaattttgaggagttcctatcttgatttcaacttgaaccttgtccatctcatcatatttcaacctgtatcaattcctcttaaactgacataacttttaaatttcccaatcattcacctataactaccagtataaaggtaactgactcaaagtatataatagggataatattactcatactaagtacccatagctaatttggaaatgtcattttcctgatttctcagctgataataattaaccaaagatcattccttgatcataaagtctctttctttcttttggtagtgatcatgataacttttcgaattcatcgaaaaaaatgtatttcatctacactctcggttgcattgataatcacttggtataaactaccatactaacttaaatgagtctctcattaccggtgctaatgaatcagaatatgagattcttatatttttctcctataattaccacttgaaattcattgtatgattcttacattacctctactctttcccagtcaacgccacctttatacttagccaactactctcaatctcaaaccacattcaattatacaatttattgtttaataaaaaaatcatctctctaatttaataagttaaccaacactcaccaaccacttgaataatgcctgataaattgaatctcaatttataagctcctccactttctgcgtgagcattacatttcttaggatttcagtggtcacttcgtatactagattgaccacccggtcaaatttaaaagtatttcccaccatcaccgtattactatgggtaatatagataatcttctctactttatcgacactactactctcctggacattctgttatacgttactaccctaattatatcctaaattctaaggtttgactcatgcccctcagtctctgccctccctggtagtagatagatcaactgacgtaattgtcatctgtaatttacctaagattttggacaatactcataagtcatcccaccttcactaacactagatcatctctaggaaagaagattctattctctgaatcaattagagatgtatgtctttaatagctactcatcaacaaccatcttattgttttgtcatttctctaatctatttgccatgtcaaataatctaccgtaaaataacatacattacacaaaccattcagattctcaatgactctacttgaacatacaatgtcttacatcaaaatcagttagtatagcaaaaataataccacccataaaaatctaacttaaaatgtttgaaagaacagtacccatatctactagattcagaacaaacacttgagtaggaaccatagacaataattcttctctgacatcaatcatccataattgcgggaaacttctttttggatgacccactaccccacaataaaaataggatttggttctacattggcccaaatggcatctttttcatctttgacactcatgatagactcgccattttttattctcactttgaccaataacatggtccacctagaaccttttgttctgcctcataactggtgttttttttttttttgcttcctaaactgctcataagtcggcttcatatgttttactacatccagtgacacactagggaatgtcggtggtacagaattaggtgctaagcgagcctattattctctcaggtctcaaatttattccccttgttgtctaatcgtatcttgcatagtagccattacttgttccaaatattgatgtggtagaggattctcttccttaccatctacccaaagcctagatgactcattattcagtttgtttgattgccctagctgcataatttaacacacttatagtccacatcttgcatcattttagagcctcaatcaaataccaatactaataagaatttctcacatggaaacacgtcataattattacaatattaattttttatcatacttcacaacaagtagtcaagtaatcaaataataacaaaatacataacacttactataccataagtcgacttgtctttgcatcaaatgattcaacaagtcttcaagatctttaaaaccatggttgctctaataccaagatgtaatgtaacgccctaactcctagggatgccacgtgtgtgtgtgtgtgttttttttgaaacatagtttagtattaatagataaaatatttaatcaaattcgtgagaatagtaagaactttaccaatattaaaccataacaatgaacatgatgacatcactaaaaatttatttcggggatccctgttacaaagttttaaaaaaaggctatataaaaaagtaagtcaaaatacacatcaagtacaacccaaaaaaactcctaacaagtcgacgacaaaagttgtagaagtcagtaagtacatttgcccgagaagacagtcatctcatggcttccctagttattcccttgcccttacctgcaccacaaagcactagtgagtaacaagactcaacaagaaaagaaataacaataatcatataattgatcacacaaataccaacaagtaaactaactaattagaatcaaacaattgtacattactcatatacataaatctaggtcagtatggatatgcaaatacaatgaataataacataaaaaaaatacaactacacacaattaccagtctaatagtaataaccatagttgttacttcataaagtaattattctcaccattttcctagaaaaataattctaatgcctaacctagcatactaaagtctttgtcattgtttaataaaacaacccttatacctaaaaatggtatctgaatgtcactattgtcactgaaccaggcaataggaatacacaatccctagtatccaagtgttactgccgttgtcaaacaagacaacttgaataccattcacatgtattcatgtcactgccgctacctaaacatgatcaccgacaaggaagaaacctaaaaatggtttcatttcaaatgttgttgtcgttatctcatgatataatcgacaagtaggaaacctaacaacggtttcaatttaaatttcattgtggttatctcatgagataatcgacaagtaggaaacctaaaaatagtttcagttcaaatgtcattctcgttatcttatgagataaccgacaagtaggaaacctaacaatagttttagttcaaatttcattgtcattatctcatgagataaccgaaaagtaagaaaactaacaacggtttcaatttaaatttcacagttgctatctcatgagaacaacagttttagttcaaatgtcactatcattatctcatgagataaccgacaagtaagaaacctaacaacggttttaattcaaacgtcactgtcgttatctcatgagataattggcaagtaggaaacgtaacaacagttttagttcaaatgtcactgtcattatctcatgagataacaggaaagtacgaaacctaacacggttttagttcaaatgtcaatgtcattatctcatgagataaccagcaagtaggaaacctaacaatgattttagttcaaatgtcattgtcattatctcatgagattaccgataattaggaaacctaacaacgatttcagttcaaatgtcactgtcattatctcatgagataatagtaagtaggaaacctaaaagcaattttagtttaagtgtcattgtcgatatctcatgagataaccgagaagtaggaaatctaacaaaggtttcagtttagagtcattcttctttcataatagtcatgaccacttcttcactttcataacggtagtgaccgtctctttacttcgtaacggtaatgacagttttttacttttctatataaaccgattcacagacgatcatgaatgtatcttgacatgctatgtggtacaaatgtacttgttttttacattgcatttcaatttaggggtgtcaacccaactaaatggagaaagatcaatgatctcgtgacttatgtcacaacaacaaaaagaacgattattcacttgacctaacttattctaggtccttaattcatcaccgtaagttctcctatcaatcaatagggtaccaataccctgaacattgaaaaaacatgaaaaatgggggttccaaacaccactaaaatggtaagccatttagaaaacaacaagccgttttcagggtttcttggcagggaaaattgtagaccttttttccaaaaacggtctgtcattttctataggaaacatgaaaccccaagttttaacttctcaaaatcccaccaaaacctaaccaattgattccaaacttcacagaacaatcatacaacaatatataacaatccctacgtgatagaattcaaaatcatgccctaaaacaaaagtttccatgagagctcaagctttgagcattaaactcaaacttgactctcacctcccacagcaagaaaacctatcatatgagcatcgaaaacacttcaaatccacccaaaaactaaaaccaagaacttactttaaccttggcaactacaaaacaaaaattctactttcaaaacctataattttttatgaagaaaaggatccaagtcatacctttagcttcctctccaaccttggctaatcctagatgctaccaataatggattgaggaactgattggacagaaagtcattcaaaaatattttggttcttggttcgctttgtgtttgctcaagagaaggaacaaagaagagaagggaatggtttgtgtttttctggttttctctaaagttatcaatatgtatatatcagctaaaaaataggtaagaaggaaaaataaattataaaataataataatataattagtttaattaagaaaatgattattttaacatttcttagccactatgaaatctctcaccatagggcatttggtcaatcccgagtaccctaaaatacctcggtaattcaaaaactgacttatctcaatagtcccattaaaattattaactaaactcattgtgatacttttggcctccgatcgggtctccaagatcaccaaacctgaaaaatatttttattctacaattaatttacattatacccacacattctaaataaatcttcgtacttaataaattacgcttatttatccacttatgataaagtttcataattcatgctgaattagattagtagaatcataatccttctcattgcaccctaattaatacatatttatattctatatcccttaaccccttcagggtagcctagaaacatgtatctcaaagccctaggctacaacttatcttgtctatcattcacaaatgcagtaaatccaaatactttcaagtgatataagtttggaggcttatgtccataactgatcttgtgggtgttgggttttatgccctaaataaaactccatttcaatgtaatctattttattcaacatcaataaag

SEQ ID NO: 224965 - DNA, 2936 bp, Cannabis indica
gcgttatgggcacaatgaaaatttcatattatttaaaaaagactatataaaccgtacaatatttttgtaatatctaccgtgtgatagtataataaaatgtcaaaaatacagtatatcatttaaaaactcctaaaaaaactatatttatatatatgttaaaatttacacaaaatttagcaaaaaactatttttctaaaaaaatgttaattataacactatttctaatatctaatagctagagacatttcaattatactatgttttttgttcaattattggtcaataatttcaagtaaaaaaaaattattggtcaataatttatattaagatcgaacaataatagataataactactatttgatcgattaattcaaccatatatttggattttaccaatacacatacatataggatgtgttttcgtgtttgatatttttttttttcatggaacgtgtttgattagaatagactattttatataatcgaccatatatatatcgaaatcaagcttgtgagatttaaaagtagtattaattttttttttttagaagaaagtatgttattaaatcaattcaaatcagttgttacaggagcactaataaatttaggacacgcatctgtccacaaatgaacccttatagaactagtaacagacttagccagtgcgtgggctacaccattcgcatcacgcgaaatggcataacaagaaccaccaccaacagcagctaaaagagaaataatctcctcaacaataggtttaaacataagaatactatccggacaattaatccaagaactcacaacagaagagtcagtctccacgcgcactaatgaataccccaaccttgtagcccaaagaaggcccagacgaacagctagaagctccgccaccgccacttgaaagtcaccaatagcccccacagcccaaaccgcccatacctcccccgcatggcctcgaataacccctccaaaccccgcaaaatccctccgcggagtgacagccgcgtccacagacaacacgaactccccctccacaggtggccaccaccgtacccccctcggaccaccactcccccgccgtgacaccccctgcccatccccaccacccccagcaccccacccaaccgcatccacccccgaggcacccaaaaccctccccaccgaactcacccccaccccacaaaactcctcccaagcctcccaagctaacacatcaagcacaattccaacctcgattgcttcttcccaaacaaaactgaattcatatcataccacagccaccaccaaaccatagccaacatagcaaaagcattctgatcaagcacctcaaaaagataaacaagcaattccgctaatgacccaaacctcccacgattgagcaccctccaaaggcgaagcttagaccacaaaggccacaatgaagaacaaaagactaacgcatgttccagagtctccgtttcctcaccacatctgtgacaaagtggctgaaccggaagcttacgcgtaataagttgggaattagtcggaagagcctgatgatacatacgccaaagaaaaattttgaccttttgtggtaccctcaaattccacatcccattccaccaatgagcctggtccccagatgaactcccattcctctcactaaccatatcaagagcaaccgcataactacttttcacagtatagcacccatttgaagtataatgccaacaccatcgatcttcacatcgtccacccctcaaaggaatgccaaggataacatcaacatccaatctcagaaaacactgtgacaaagtctgaatgtcccaacccgtccgaaccaatcaagtcactcaccataataccatcagtaggagcgggcgaaataggccgaaacgatctaggcctgggaacccacagatctcgaaacgcatcaacactgaggccatcccctaccactttcctcatccccgacttcaacaacctcaacccccatatcaaacttgaccatagatgagacgaaccttggcggtctttagcatccaaaatagacgtattgggaaaatatttgtgtttcaagacacggcccgccaacgaattcggtgattgcattagtcgccaaacttgttttgcaaccatagcttgattaaagagcacaagatccttaaatcctaagccccccttcgattttggttgacaaacattttcccacttcacccgcaatcttccttttatcattcttagtaccccaccaaaattgtaatataatggaacgcagtttatcacaagtcgccacagggagctggaacatactcatcagatagtttggcactgcctgcagaatggccttgattagaatctcgcgaccaccagcagaaaagaaactccttttccaccctcggacccgcttctggaccttgtcacaaatactcgcaaaagtttgcttcttgtttcacccaataacagttggtagccccaagtacttatcgtgagtagcaactgatcccaagcctaatatacccaatacacttgcacgatccgcaagtaaaacattcggactgaatgtgatagcagatttatcaaaattgacttgctgaccagaggcatactcataacattgcaaaatccgacgaatagactccgcctccctcctgttggcgcgaccaaaaattaaactgtcatccgcaaagaaaagatgagacactctaggcccaaaccttgagcaccgaaatcccatcaactcaccactcacttcagcttgacgaagcagggaagacaacgcctcagcacaaaaaaggaacaaataaggcgagagtggacatccttgccgcagccccctcgtcggcaccacactcccacgtggccttccattcaccaaaaaaccatactccgccgtagttacacaatccataatgagatccacccatcgaccagggaagccaaacttacacataata

SEQ ID NO: 224966 - DNA, 3034 bp, Cannabis indica
aatcacacacactggagtatagtatatagtaaactgtactcggtaattccatattaaagatctcttactttaatacactaccgacttgtttattcatattatataatcttaattctcttgtatgaccgtacaagattatactaactctatatgaataaggaatttttagatatttaataattatacttctataattaatgtatttatttatcttataattgcattttatatattctgtaatatattatccattaaatacttgattttagggcgtaaatcccaacaacattgaggatatggacttaggccgagatgctgaggagcccaagctacgggtagctagtgtcaaaataatgccaacctggatatatactttttgataagaagtaatcaatgttcatgtttgaatgttagcattgtaccagtacgaaatactgatttagggggtaaatgtctacccaaaaagttggcttgacaacatggcactattcttgacacatatcacaagggaaataacactgagggccctgcatctcaagatagggcagtgctaccttcacactaagggcaccaagtaagcaccaagatttaacaaagtcatttatgagtgttatccttcaacaacaagtcaccatgaccctaaaatgatgagccatgaagctaaggagtcaagtggacatcccagggcttaacctgggaccaacatcagtgttgggtgcccaagttgacatcatatgcatcgtctcacatcagttttggttcccaacaacttcctatgggaaatatacttagccattgtcctaggatacatgtgagacatgccccaactaagtatcagattttggagacaagtctacaagaaatggaacccgagtactatgatgtcctaataggagcccaagttgacattcagtcgatctaggtgcaccacaactagggtctacgtttctagggacatattgggaccccaattcctctaatccatcatggaacaatgccaggacatgatatttcatcaacgatatcccgaaggagcccattccaaactatggttgcccaagttgacattttaacatgggcaccgattttgtttcatctggtgacgcccatgcaaatttgacgaaactaaaattcgtggagtacttttaaccaaaaagaagattaaacatcaaatagatttcagagatgttgccccttacctgggtgcccaatgcaggcccccatgccactatgggcacctaggttgacgtatttcaacctaaggcactccagtacacctttatggagaagtttcctgggaattttccttattttatcccacaatgaagatacaagtgctttcaagaagcaaacaaagatgcccaacacaccaagggttgatgctttaggtgcccaggttgacatgagcagactattcatggttccccatcaattcaattatgattctgtcttgggatttattcttgtttgctcccaaaacaagatacgtgacttagaatcaggataaaatatcatcccagtggtcgtttagtccgtaggcatcaccatgcataacactaggcgcttaggttgacatttggcctagggctcatcggtcttattttgcccctaaagtaagatttagatacttccgcaagtcaatatctcatgtacatgtgtcacgcgtaagtccaccgacaatcttgtgcactagagatcacctcggtcgtcacctagtcgtcactagtgattcaatgggtatcacccgtgcacatcgagtaaaattgccaagagatcttcaccagagtcaaataatgatgtaagaatagctatcacatcattcatctcaaaatatgcaaaaaagcaaaacccaaaaagggcaagttttgggtgccaagttgacatttgcagcaatctggtcgccgacaagatagtttgccaaattttcaacaatgcacatccctcagtaatatgaccataacttaatcaaagtttatccaaacgatgcagttcaagtggcatatgaaagctcttttcaagatgcatctaagtgtgtctcacacccttgccacaattttgagcttttggacaccaaaatgccctcacactctcaaccacgaattgcaggaatttcctcgcgagttttgtgcacattttctattattttattgtaatttaataggatctacttccctatacaaggagagctccccttggggttgcacatggattgggttggacaagttgaggctattttagcaacccaacccaactagatcggcctataaaattttaacctattcacattatttttattatacaaaccaacccaacccaacccaaatattacgggttgggttgggttaaaacccttatttcacataaaaaaaaataggtgtcaatataatcaaatacatacatttcataagcaaaatcacccaaaagttacaacattaaactcatccaaatttcaaaattcaaatataagtcttcaaagtcatttaaatttgtcataacaaacttaaaataaaattaaaaatttctataaagtaaattaatcaacaatgtctattgtcttctcttttggtggggatccttgatcatagatttattatctacaattaaaaaaaaatatcagtagcaatatatatatataaaagtagcaatatatagccaaaaaattcagcagcaataaatttattttttgacataactaaactaaaaaattagtagcaataaacagccaaaaaaatcagtagcaacttatttttttgacataaatataaaaattagtaacaaaattagcaaaatttttactcatcacacacaatatcaagacaacaaaaagttataaaacaaaaaatactacgaagtaaaggaatttgaaaaaaaaattaattttaataaccaatataataatataaccgcaataatacattcatatatattcaaatactataagaaatcaacaaaaatattcataataaatttaataaactcgtaacgatatttgaaattagaaaaaaaaaataacaaatatacaatacattcacta

SEQ ID NO: 224967 - DNA, 4984 bp, Cannabis indica
cttcttcttcttctctctctcccgtgcctatcttttcttttggcctttttcgaactcacatgcatcctcttaatctatcatcacgtacctttcttattttctatctttctcttttcctattttgcccttcccaacgcctattatatttaagtttatgctttttcttttgaaaaactaaaaataaaaatgatacaacttttatattactttaagagtttaatcaatagactttaagaagtcataggtgctttgtgtaactcattcttaaaaacctaattaatttctcatatacatctaggggttaggtcaaaaacagaattaactttctaatgcaaaaacattaatccctaaattggctaaactatctaggaattaggtgcaaatataattgaatcgattatcaaagattttataataaaagattttgtccttaaggggcctaacctaagggtagatgcccacctcttgagccgacacagtcgacacttattaagacaagttaataatttaacataggatacaatattgtggttgagttaaatgaacccaagttagagatgaatgaatgaagtaccaaccaaggtaaaaaagagggttattgtaatttgagtaacataattgagtgtaaaaaagattttaaagaaaataagggttggagagatatggtccaaaaataatggggcaaccccactagtaaatagtacaataagctcaaaaaacaaaggtgggggatggggagttattgagaaaagatgtgaaataaaattgatgacaatgtactagcaacctagtaatttataactaaacatgaatagtatttgcatcaatttggagatgaaaaaagaaaaaaccatttaataaattgaaaaaagactctaaagagtaaaaagtaaaaaaaaaaagaagcatcatttaaaggaagaaaaagggatgagggttattgggaaggggcaaaaaaaataatagaaagaatatataagtgaaaatatgacaaagaaaataaaataatgcacattaaataaaggaaagggtattttggtaaaatgatggatcgaacagtgtgaagaaacggtcgttgggagtcgatgtcgtagtcaggagccttttctggcgaatcgcgccaattatataaaattaataaaataaaaactaaaaatataaaataaataagcttcttcttcttcgatgcaacgttcacatccacacttcttcttctgagattacttctctctctaggctcagctgaatcagtgaagaaagaaactgcatttcacagattctctgcaactgcctgcgatggctgctaagccctccgaggaggtaccaactctgtgttctgtgcttttggctcattttagttctcaattgagctattttgtatgtatttgacagattttctgaagatttgttgttctgatttcatttgcatttgaaggttttagcttttatgttgaaaacccacttgctttgtagcaagaagagaaaattttgaatccaatttatgaacttcattgaccttgtcgcggattatataaggggtggatataaaagaaagtacaaaatcttctggctctttcgagttttgatccaattgtcgttaatttctaggttgaacaatgggaagaatatattttaaaatctttttttttctttctttctagacacctaccaaaaacttctagatttgcatgctattcagtcttgtataataactggggatttatagtatttttctttcttaatttttttgtgcatgtttgtcgtgtttgtcttgcatgattttatggttcagtctcatggcagtaacaatttcatagagttaattactcagattattgcacatcttagcaattaagagtgtaagctgtaagtactagcttgcttaagtgatgtttaataggagtggatcaataaatatagccttctaacattaatggtttgcttgaatgtctattaacatgtagagattcttaaatgttcaactccataaaccctcttccccttccccatccatcttaaaaaggaataaattagttatagtccagttactgtgtgataaaaaagctcaggattctagaactaagagcaggacagaaaaagtaagcatttaaaagtgacagatagtatattccttttactttaacttgagaccagcttgttgaatcttgtaatggtgagtaagtgtaagcatttctgcataattgtcagataccaagtttgtgagacatgattcttgggatgcaaatcacatatttcgtcaagtaactttattttgtagttagttttttttgtttggtaaagagtttccccacgtaagagtgagagaggcttgttgtgctcttttaatttgaatcgtcagcgttctctttcaggagtagtttcccattgcagttttggcatttggtgtatgtgctaaaatgttttgcaaaagttgcaggcaaatccattggttgagggaactgtggatggaagctgtaacctacctgtcagctattcaggtttccaaatgctgaagtcaggttttgattcaggtaatttcccccttcttgttgaagaggcttcgtgtgcaggaagtttagaactcccctcggatggctcacatgtaagtgccttgttgtattgcctatggtacatctttaagtggctgttgttggttttctttgttgatacctctttgtaagacatgcttgctataatgcaccatttcattgctaatcgtacatggcttgatgtcccaaggttctgaacttaattttctttttcttctttttctctcttcattcctgcaggtccaagatctctttagcatttctgtcttgccccaagagagcaatgatctacattgttcttctcatttggctttcttaagatttctagaagttactaatcctaagaacgatcaggtctacatggaagcaaaactgaactcccagaacagcactgatttaaaaatgaacagtacacagaccttttcttcttgtgttgttgacatagatgttgaaaagatgtccttgaaagtgcctgaatctaatgagaaagctgtggaaagtttgaaaagcgagagtgttttgctagtaagttttcacttcttcatcttcatgtagtatagcgttaagttaattaaggaaacatattttttctgggtctctaatgtttctgttgcttatagtacttgcagagggttttgtggaggcaagcaagtgtaactgttggtgctaaactgatccaacttctcatgaattacggaacttccagaggtacataaacatttttatacaattcgtagcaatactcgctcaaaagtttgtctagtaaccatactttgataattttcttcacaagtgctcttcttatgtaaaatcttcccttattcttaaaaaagtcatctaaagacagttcaaggctgccatagttagacaggcatgctggtctgaatacttgcacacttttaccatttcaagtatacaaggcgtggatataatttacttaatttcaaattgctttcttcactagaaaaatgattatatttagcttatcacttgtactttccccttctctaaaaaactgtcttaaagtgggatctcattatcacattctcaatagataaaacaggggttgagagggttcacgaaacaccaaataaccaatggagaaggtacaaacgagctgcctcgttcgattcaagaaaagtggttcttctgttctcaatcttgtaagttctaaatggtattgtaaatatgatacaaaacaagtttacttccaaagaattctgtgcacccatatatatgcagtacatcttttcagtaaaggtctaaaatcttcataagtagcaagcaacaaccgagattgttgtcttcagcttttattttccctagccttgttttgggtaattttgatttgtctctattagtaattcaacaaccgctctttcttttccaggtcaattttgggcacattaattttgatatttctcacgctcaaagtcaggcagagtgctgatagcattgttcatgtctgaagatcgtgtgtctctctcggctacttgtttcacacgcatcacctttgtttttttattttttctgagttgtctcctgataactagagttaaaaaggatcccttcagattgtatatattgatattggtatagtgtctagagttgcagagtgatgatggcttttattataatatttaggtttaatgaatttttatttgttttcctcagatgcatgcttttttgagctctcttctagaaattaatgttgaacgaaccttttttttatgatgtaaatattcatgattcttggttaggctttctatgtaaattggtgcttttgttcacatgtttagcagatccatatgagcacccattaaaatttatttcaaatcctaaacttttattttagataaaacccataaagcatcacggattgcaagtaacttttccttttgttccctgattcttcgagcttaacagtgtttgtgggcatcttacgtatcttttgatatgtaatgaataaatttatattgtaaaatataactaaagtaaaaggttaaagttccaagacaatgcatctaaaacaaaataaatacatcaaaaattgtaactctgattttgttagaacttgagtaatgtgttttatgcgctgagaaaacgaataacttagtaagaaacaaaaggaaaaaagtttatatccagctgagagatatgttgaaccaattttcatagtatttttcttcggaagagagaatgaagaggctagcatgagcaacctcctccttgctgttccatctgtgatgagttaactgtcggcttaaggtttacgtcgaccatgtcttcctgttttgtggaagaaagtgtctccatcccaggcaaggcagccgcgattttacggaaaagaggctgcaaaggcaattcgacaaaaagaagaaatgcttgaatcagatggctcagccctcaggacatgtcaaacgaatcacaaccat

SEQ ID NO: 224968 - DNA, 4844 bp, Cannabis indica
cgacattgagaaaacgacatcatctgtaaaacgacaatatttacataaaacgacaatctatgagaccagcgacatgaattgagaatacgacattgataaaaacgacaatatttaccgaaaacgacaatttatgagagaaacgacatcaatccagaacacaacattgaaaaaaacgacatcatttataaaacgacaatttatgagaaaaacgacatgatattaaaaacgacaatttatgatccaaacgacatcaatctagttagttatgttcccattgcattagtttgtgtcaaattgtcctactcgtttttgtttcacatacaaaacaatattatggttttggtaagatcaaggtgataaagatcctatttctattttcaccaacaataaaaagaaaaaaacaaaaataataataaaaaccccttacctcaaaaaaataaaataaaataacacaaaagggtacaaacgacactgcgtgaaaaagcagatcgaacaatcctcgtctagatctaaaacaataccaaattgctatgagtatggaggatatttgtcgttttccagtctcacatttgggttttgggaccctctatctctctcctctgtatttacgttagatctcaatcatctgatatagatatatatatatacatacacatatattacatctctgatctaatatctcactatctgtctcaaatctgaacaaggtatgtactttctgtactcgacattgatgattgttttgagcccccatttgttttctccacatccattttcttaaattccaataaagattgaaactttttcaaaaccccatttttgtattactaagatccatacacaaagtttcgattttgaaactcaattcacatttctaaaccaaaccccagttccaatttcagtaagcaatgccctttttaatggttattttcattagttgggtctcatcatcaatatattcaatatagttatagctttgaaaaggtgagtcatttatagctggcaactgtcggtgcttggcgtgtctttaacacttatttttcgttttccctttttgccctcactccctttcacaccttgctcttccatttataccatatggttagagaatagatgccatttataaacatagctctactactctctactttccaattcttaatcttcttcaatccaactaatcttgggtcttcattccattttcatacttgggtatgatttagttttttgtttatatatatgtcattttcatacagttaattgattgtcatgaatttctatacatactttcttctgttgttatgatttggtggatagatattgcagtgtgtaataaattcatattttgaattgttgcagtgtgttgactctgtggaacttttgatttatactctttcaattggattagttagaatcagttcaaacaagtggttgtttgaacttgaaggagtgttagtgttggatctcattttggattgtgtgactaagaagttctttgatctctgaatgttctagtcaaagtagaaaaaaatgtctaggggaagagctgatgggagccaaaataaaaggctaattggctcaatcttagttttggtgttaatttgtggtctgttgtatgtgtattctgggaggagtggttcatctgcattggaatatggtggtaaatcattaagaaaatttagctcttatttgggttctgaagaagatgttgaggagtcttccccgattcttggtgaagatggagatgtcggttttgtaccaaagagttttcctgtgagttctcattccatacacttttaacaaatgttgttgctttgttctttgactcacattaatgtttgtgttgtgttgaaggtttgtgatgatcgccattcagagttgattccttgcttagatagaaaccttatttaccaatcgaggttgaagctggatctttctttgatggaacattatgaaagacattgcccacttccagaaaggcgattcaattgtttaatccctccaccaccgggatataaggtgagcggtttttagtttgtaacaatcgcgaaaatgagtgaacttgctgttgttgttgtggtgttgttgaatactgattgagctagtgttggaattggaaataggttcctgttaagtggcctaaaagccgagatgaggtatggaaagcgaatattccacatactcatcttgcaaccgagaagtctgatcagaattggatggttgtgaaaggcgagaagattgttttccccggtggaggaactcacttccactatggagctgacaagtacattgcatcaattgctaatgtaagtagaatggttttttaaataggggttggtaggatccaaactaatttgatcacaccgaactaatccaatccaaaataaaactctaattcttgtattgaaatccaatttaaaaaaccgatacaatccaatcactaatttggttggatttttttttatgcttgtttggattgtattggatcggattagaagaaaaatattggattagatcggatgttcacccttatttttaatacagatggcaaaaagagaactttctaatgtagatgattcgtttttttctttttgtcatgactgttttatgacttgttggccttgcagatgcttaactttcccaataataacattaacaatggaggaaagattcgaacggtccttgatgttggttgtggagtagctagttttggagcataccttctttcttcggatgttattgccatgtccttagcacccaatgatgttcaccaaaaccagattcagtttgccttagagagaggtattccagcatatctcggtgtcttagggacaaagagactcccttacccgagtagatctttcgagtttgcacattgttctcgttgtaggattgattggcttcaaagggatggcatccttctccttgaactagatagggtactaaaaccgggaggttattttgtctactcatctcccgaagcctatgcacaggacgaagaagatctaagaatatggaaagagatgagcaccctcgtggagcgcatgtgttggaaaatagcttcgaaaaaaaaccaaactgttatttgggaaaagcctttgactaacgattgttacaaggaaagaaagcccggtactcttccaccactatgcaaatccaccgacgatcctgatgctgtctggggcgtgaatatggaggcttgcatcacaccatactccgatcgtaagcaaccttctgtccactttgttttcttgttaatttgaatgagtagcattagataaagttagaacactataaccgaaaaatcttcctaatttacagaaatcgatagagcaggaggaagtggtttggctccatggcccgccagactgaccactccacctccccgcctagctgattttggctactcgagccatatgtttgaaaaggactcggtaattactcatcttaacaacttgtctggcattataatacttccatgttttactaaaacttagctaatgacaatctaatgtggtacacaggaagtttggcaacaaagagttgaggattactggaatctattgaagccaaaaattgagtccaataccttaaggaacatcatggatatgaaggcacacatcggttctttcgctgcagctttgaaagacaaagatgtgtgggtcatgaatgttgttcccgaggaaggaccgaacaaactcaaaattatatacgaccgaggtcttataggcaccgttcacagctggtatgtttgaaaaaacttctgtttagagcaatacttttcgggtttttacactagagatttgtcaaatgatgatgaagtaaaagtagagatttttaaaaccgataagctataatatacatgcccttttgatccctaaaagcgaatttggctcgggagaagaagaaagcattatttgattttttttcttctttgtgtttgttgtaaatatggcaggtgtgaagccttctcaacctacccaagaacatatgatttgcttcatgcttggactgtcttttccgacatggaaaggaagaaatgcagtgctgtggatctgatgatcgaaatggacaggattctaaggccgaaaggcttcatcatcattcgtgataaaccgaggattgtggagtttgtcaagacctacttgaaaacactacattgggaaatagtagctacagctgaagcatcacaagactcggaacaacaaggcgaagatgaaacggtagttgtcattcaaaagaagatgtggcgcacgagcgagagcgtgagggactccgaatagagagaagcaaagcaaagtgttcccttttaagggatcccttaaaatgatttgtttaggtggttattttatatgatatgattttgtagcattttggctctcttttagttaatttttttggctttatttatttgagtctctcaacaaagagctcacccaaatagcttattcaaatttcaatgtgttcattattgatttggtaactgtaagaaaatcactttatacctcatattggcataaagtagaacatgttccaaataaggatatttttggcaatatgatttatatttcaaagggatattctcttgttctaaacttggttcattcaatcatgaagatgcgtggttttggcattatactaatcatggtaattattctgtaggcagtggatataacactgcgatgactttggataagtcattaccctcatcagctagtgatgtgttctcaacatggtggaagcaattctggggattaaaaatacccaggaaaattttacattttgcgtggaggggtttccatgaaatcttgccaacgcgtattggattggaaaaaagaaaaata

SEQ ID NO: 224969 - DNA, 3266 bp, Cannabis indica
agtagacaaaatccagagtttctttcccgccaccaccaaccaaccattttcactctcatctcatttcatttctcaatcatgaaatcactattgtgtacttctccaatcacatgtacaattacacccttccaaccctctaatcccaattccaaatcatccactacgtttgctattgcttctccttcccctaatttcttcctctcctcgctgcaatttcgggctctaaacaaaaccctaaaccaacatttgtacaaagctctgacctctcattctgctccggaggaagaagaaccagacgcccaagtcgaagaccttagggttccagaccagtggttgcccccttccagggccttggaggtatttcattcaattgttcaatctgagtttattctggatctcactaatgaattatcactcagtttttgtaatttgcgacataaacgagagtttttcatccctcaatagtcaatatacaaccatcatcctttgtcgaaaagtttatctcaattagttcaattcttaatattttgtgatagtatatctataagttaacatgtttttccttaattattaatttaaataataacaataaaaattaaacttaatataattcaattatgttttttaaatatataaaatttaggcatatgattttgtcctgtgattgtactttcacggaatacattccgtgatctagggcagccgtcagatgagggagttatttgatctcacggctgagattgatctagggataattaaagttaaaaagttacttagatactcatttaatgtatcttgagacccatctaataatgtagcacgaaatacattccgtgaaagtacatcacggaacaaaatcgtaatcaaattttaaatttatttataagaaaatacccttaattaattttattaaacaataaaataaataaataaaaatgttaaactaactatttttattagataatcaatatatattgacaaaataagctacttcacagtttcaaactaattaaaaaaataaataaggcatttatagaaattataaaaatgtgtgtaacaaatgggtttttttttttttcagaaaaggtctcttgctttgttattataaatttaatgagtcaaagaaaatagtaccaagtgcagaggtagttgatgttgttgggtctgttggaggtctttgtctttgtttgaaggttgggcttgaaattgagattgttcgctctgatctatttgtgattatgggcaaattctcgaatgttctaaaaggcgtggttatggtttgattaaggaacaattggatagagtgattggtaactcggattagaccattctcttcgatagagatcaatttcataaactttttcttgtttttcaaagagtcaatacatcgttttttttttttaagcgtatctaataatattttactatctaataatattttacgatcaattaataatttgtagcttaaaggttaaacccatgacctcttccttttccgatccctccttcaagaattgcagcaggttgtggcattgtattatggttatgaaaatttcacaaataagctactgctttagcataaacttcagcaggtttctgagctttgccatgaatgatattattcctgtcacaccaaatagtccataatgcaaattatccattccaaatcagatttggtatgtaattctgacagacgaaacaaaaaatcactaccttaaacaaatagttaccaacttaaaatttttagttataaattttattttaaaaaattatattgttacaaattcataaattttattttagaaaataaattctaaactcttacgtggcgtttagttagagagaatgaaatggaaatgaaacttttttttatttttctgtttagttttattttaaagtatttagaagagccccttttattctagtctatatttttcattctttccaactaaatgtcacttaatgaggtgtttgttatatgagtttgagttggagaaagtagaataggagggagtaaacgttagagcgaatatgaaactcatgcgtttgagatgattaacattactactatattaattaaaaagtcagacagacttacttgaaacacacaaatctctgttattatttaaattttacttttccattctcatgaagcttaaacttcataccaaatgccccattaggattatgtacctctgtatttttgtaaaacttttttctatactatttttagttttatttatttatttatttatttacaaaaatattaggcatttcctaaaattctcctttaacaaggaaaagtgaaaagaaatggaaatgaacaagaattaatcatatgtatatagcacatgaatctattctttgttatagtgcactgacaattattgttcatcatttttcttaattggaaaagcttacaagtatgaatcacattccctcattcaatgaccacagtcatatctaggcatataagtgttacgagacatgcattgttacagatttcatgagtaatttttgtgctgtttttggcattaagtatttgttgtgctgtttcattaactcattattataacaaacaacaacagctttatggattaccattagtgtttgatattgaatttgggtcttaatctgtttaggagtcagagtggctaagggttactttacacaaatggttggatgatgagtactgcccagaacccaccaatgtagaaataagcaaggttgcctcttactcctactacaaatgtttgatagagggacaaacagacctgggtgagattctgttgaagatggccagagaattggagaccatttcgtatcaagagagctttcatggagcattctcttcagccaatgcagcaatcaacttgattgctcaacggatagaccacccacacttgtcttaacttcttcaaaggtttctaacccaattgcctttctctctctctctctctctctcccacttggccatttctatacaaatcctctaattgtcttttgcatttttgtgacagttagtagtgcaggttaagataaggtggttaagaaaaactttgcagaagattgctctacttctattgaacttcgtgcccaaaagcgattttttctagtatttgtattttctgagtaactaatgtaatataagtatttgaaaattttgagagtatgggtgaccaatcctgtgcatccacatgactcgggcaaccaaataatgacattcatgatctgtggcaagcaaccagccccaaaccaaaatgtac

SEQ ID NO: 224970 - DNA, 8068 bp, Cannabis indica
gctgtggttgcggtggtggtggcggtgttggtggtggaggatccatacctatagcacaaattctaagaatgaaagtgaactaagaattctccaaatatggattaaattatcatttttgtttatacataaatatatcatcttgtctataagtcatatttcacctaccattcaaaatataaggcaattcaactaaaagtttaaagttccaactacccttttaattttttcttttttattagaaaaatgcattttaattgtattttttcacaaaaaatttaattctaagtaaatagacaaactcaagaggtatttggaaatgtaagtacctataaccaaatttataggtacaaacaattcccacatttgagcaaaattgaaaccaaattattgatatcttgtacaaaagactacaatgactataagggctgtttgaatttgtatgttctattttccttttctgtacatgaaataattaacaaaatgaaacaataaagatgataatcaccacatgatcacctaacatacaagctttttttttccactatttttgaaaggaaagaaattttccgactcgaaagctacatgtttttcccccttaatccatccaagcctagaggtttttatgggggactaatatttcccatacaaaatgattcaaaccgaggttcggttaagtcaactatttcgtcatctgatgcacgccagcttctagctttcgatgctaagagtaccaatcgctccatgtgctcggctgaaattttattttcttctatcttttcactgcaaagattgcgttcaacatcaagaggtagcgaacaacgatctgaccgttcacaggacacgactcgctttagctcctctacatcttgagaaccttccaaatgtgtgtttcttttgtaaatatgattctgatcaggtttctctatgccacatccagatgatctctgcatgaaagccaaaatcgaaaacaatttgttggatttgaaataggaataggagggtgatacaagataattaagcattctgttgtatatcataattttatataacattatgttaaattttacaatacaataataaaatgtaatacgatgtaccaaacgagctctaattagaacaatagtctcgtagtttgctaacaaaatactaacaagtattttgtagttaatggagaataaattacctgagaaaaattcacagaaatgcatgtccttctagacctttcgggtttgatagttgaaagaatttgaacaacctcacccatggttggtctggtgtcaggatccaaaagcagacattcctttgccaagtatgccataatctgcatctcttcttctggaaaattcccatttaaatgtggatcagccaactctgtaattattctcctactatcgcgtaaacgaggagtagcctgaaaaacaagacacgcaaacataagcacaaaggtgttagcataagtttgaaatcaatgtagagagtttttacccatatgacaaggctttcttctcctttgccatttcgtttatgaatgggcggtcgaccagtgataagctcgagaagaactaccccgaaactgaaaacatccgacttaagagaggctcgtccaacaatggcatactctggtgcaaaataaccgaaagttccttccatccttgctggagagtttgaagagctggatgatagaccttcagctatccagtgttttgccataccaaggtcagttatctgcacatattctaactcaattaaatgcagaaacaccgcgaaatacaatgacaatagtataacaaacaagaactcccaagacaatgagatgtatttaagttagtcctacattgctaatgtgtacaaataaaatgtcatatataagatgaatgagctactcctctcataaccaatcggttttgagatgtggtctcttaaaggtcgatcgtttaaatgtcatatataagatgaatgagctactcttctaatagtcaattactctggctaaattcttcaaaaaccgcactttctcatacctttgcttgcaactcttcatccaaaagaatgtttgttgattttacatctcggtgcagaattcttggagcagccgcttcatggagatactccaagcctcttgcagctccaattgcaatcgcaacacgagtaccccaatccatagttttctccaacgccccatctaaacaatctcgaagatttccattagggatgtattcaaacaccaataatctctcggcaagttttctatgggattcagagcagtagccaagcagaggcaccacatgacaatgatttagtcttgacaacagctcaatctaagtaaaaacaacagattgaaaattagaaaaaaaaaacacgaaaaacaaagttaagcaaactatattataacatatacctctgttaaaaacacagaatctgcatcaggccctttctgattctttaatcgcttaactgctacagttcttccatctttcagtttgcctcgataaacatagctacttcccccgactcctataagatttgaatttgcaaagttttcggtggcattttgcaattcagagtaggaaaactgcacaataactccatatatttttcctgtttcgttccctgataaacaactcatctgaaagcaatctacaattgaataatcaatcacattagttcaagtgaaaagtggagcttcaaatatattctcttaaagttaccacaaggccattgactaacctgtgatatgtttaatgggcaattgagaatccacaaaaactttagtttcgggcattgaataagtcctatggtttatcaaattggtggcactgttgcagctagtttctcggtctgaagagaacactgatggtttaatggcactcttgtctctttgataaaagtagcaagcgaccgacaatagaaatgcaagggtcgtgagtataacgcatagtaataaaataatgactatagctttgcttgacatgtgcttttttgaaggttgagcttcattgagagatcctgtcaagaagcaaccacaataccaagtaagcatagaaattctactagtagattcttcaacactaaaagaagcttcaaacaaacacgacacacccaacttttgaaaaggcattggcatgcagatgagtgagactagaggaaagtaccagatgtacaattgcatgctgcaaaacagttgttgtactggttatcagttgcaactttaggaagtccatcggcaggacatttacaagtccatacgtttccagcatctacaaagagatttgcagttagcttatccagacatcacaaaagcgtgtgtgaaaaatatataagaatgacggttgatataacattgccaaactcagacacaatacatttgaatgcagagattttagaaagctctagagggtaagcacttatgataattgatttactcattgataatcctaatgcttttagactcaaaaacacataacaaaagtttgcacactttaattcctaaaccttacagaagaataggttattatacaaatacaaatatgttgtgttttggtatgattttcatgtgggactatttttaacaaattagttcaaaagaaacataaaattgcatttcaaccgaaattcgctttgtcatcaagatcaacagctactatttgcttacactactatttgatatgcctatcgataacaagctaaccataagcaaatgtttacccgagaagcttaaggccaacaacaccgatagcaaaaaaagtttttgagtgtatcaaagtgaagcttgatgtgattattataccacaaaaattagcagcatacctcgactacaatcgcaggatgttgagcagttagatccaaccgtagtcgagctcctatttccttgatatgtagaggagcattcgcaactccaatcctttatgccagatgtactcgaaacttcatctgtccaattaagttacataaataatcttaacacttataattaagagatttctttctaaaatcgttttaaagattaatactcaccacaaagacttggctgaatcaagatgatgctcacaagacaagcaaagacaatctcgacttggaacttcatctaacccaacctgatgaacaaaacaaactttttgttgattttttttatagttaattactaccaaaagtgcttcaaccaaaatagtagatgaagaaaattagttattatagttattatttcccttatagacagtaacaatcacgtaatatcaattttcgggctcgtcctagttacttaagaaaactaaatcatctgcaacttcagttagctttttttatcttgaagtgaaaagcaagtttacaagttttgaaacactgaaaaagataaataatcattagttcaaatctcgttgccatgttttcgtcgaaacttaaagaaagattggtaaaatgatagacaacataacagagaagaagttgagttaccttcataagggacaataggttaactcttcttgaacttcattcaacttctccaaactacaatctgtgcatacacatgaataattaagtctaacttaatagaataagattaaaaaatctaatgcctaaaaccaaagaaccatttacagtgacagaccaggagatcaaatatagtaatatggatgcacaaacagatctgtaaacaaaaattcatggtctgattatctaattcaaccattttttttactccaaagaagcaaaccaattttggaaattaatatccactttaagtctttgttcataattagacacagaacattggtgcagtacaaacttctaattttatcattcaatcatagttggtcaacaaacttctagaaatttaatcattcaatacagcttagtgcaccaagtctctcatccaatgcacaaaatactaattagtcaataattaatagtcatttaagatttatcaagaatatgcaatgcaaaagatttatttttcatttttttattgtccaaattatgaattcatgaaatgctaacagtagcaccaggttatcacacttaattacatcattaattcaaattctcaaacttacttggcaccataatacttgccttgtaacaatgctcatttccatgtaaaaatgtaagaaaggaatttaattcactgattgtattaggaacagttaacactttaaaacatgaaataataacacaactgaaaacataaatgctaacagtgtaagctgtctagtctcataaatattgggctgtgagcaaagagaagcagccactgcatctgcatatgcatgtatcacattgaacccaatcccaacacacatcttccatttatttgcaattacattgcaactgcttccggtggctcccaataaagacaccagaattgctaaagggcaccatggtggtgcaattttttatcgggtcctactaattttactttaataaagattatagaaaactgctaactatttataagacgccaccttataatggtgctaggcacctagcgccccatagcacattgcccttcataaatatgaccattacttagtctagaaacatggggcatttcccaactaaattttaatttactgtgccaccatggtcagacactataaatttatagttgtttaacgactattatggtcgcacagtgtaatttttggttgtttgtgtgcaaccaaacatggttattttgttaataaaattttgactatttttacaaaacactctagaaacagttcctaaaacaaattattccaactaaagataaattcaaagttaaacccagaaaaaaatgttggtcctaagcacaagcttattattagttcacccacttaagaaaaatcataataagaaagagagaagttaattaaccacaccttaagaatgagtatacagacagctgagtcttgtgtgaaagtaattaccaaattcatgctcattctccaatcctcatcatgattactcagaaagattcaaaagaagactgaagaagagtagtagatatatatatattggcaaatgttaagaaatgaatatatgacaacagtagaggacagactaataatggggttcttgaaatgaataaagaaaaaaaaaaacacttaaaaaaagggaatttagtgaacccatcaaccacctcattgaaaatcactattttgccaatatgaaagagactctttacctcaccaacaccaatgatcaccatatctataatcctcaatataattgaaataacccattaaactattattataattttaatctaactccaatgtggttttgaaaacaatcaatgtaccctaaaaaaaaaaaattaattttagtttcattctggttaaatagttataacggctataattattacaataccaaatgaatacttggcttcaaagataaatagcatatacaacattggaagtccgtaaagcgacgtgtaatttgtaaattcagacactgggcccccactaaccagggcttgggttgtgggcctacactaacttgggcccaatacaaaacaaaaccaagcgtcggcatcattggcggtcagataatcctgaccgtcggattaagaatctgattcaaaatcaaacaagacaagaagaagaaaaaagatggaatcgttttgggttgtaaaaagtcaatgatgtgcattcctctaaatttggttttgttcataaaaaatgctcatagattaataacactcattactacaaaaaatgaaaagaaaagctgaatttcagagagtgtaaatgtacctaaagtgatgatctggttggttaaagagggtgaaacgagttcatccttttgagctgagctggtgagatgggtggttagtgatatcaaatcgaggtacagtagtatggagatctagcagttatgttttgggctatggagatttttgttaagacagaaaaagagaaagagaaagagaagagaaatgaattgaattgaaatgaagtgagttagagaagtgttctttggttggttcccaaggtggtcgtcgaaagtgggacccactcattcagctaacctttttaaattctactcaatttcgaggactaggaataggatcgtaggctctacttataaaattaagaatgtggtgtattactagtagagcattgctattgggtattattatgggacccgatatataattgtaccaataacgatattgacacgtaggagaatactaagcatcattagtaccttttagtatttctcattactagggaagtctttactcgtcttttccttatttagatcaagagttcgactcttgtcgactcttaattgtgagggattatatttgacctttgaaagcttacttgttgtgtggtgggctatctacatgtgctatgaattatcatcaatttagctttatcaaaaacaaaattgtcaaaatttaagctcggaatcctatttgtactattttaaaaaatacaacgttcattttatcatttagtaaaataaaaagttcaatcaataaatttttcaaaacacatcatctaaaatagtattaatcttatattttactatgaaaaataaaataaaaaaagagtattttattttaaaaacaattaattaccacattttttcttcaaaatttaatttctagtatagatttatgtgcattgttattattaagcatcgtgtgagttgaaaataaattaattgacatatctaacaccaaatataaaatcgagtcaaataaaatgtgatatataataggatgatacattttgtgatccttaaaaattagtgaaaaaaaaaaaagtgaggtggcggttgtcacgtgagagggtgaatagggttggggactcgagaggccaacgtggaataatgtaagatgctccaaatctgggtgcactttcgttttatttgctatattattggtcaatgtaatcgaggttaattaattttcttaattaaactatattagttaattagataaattttgtgatttgatgggattaatggtagatggagttggaggaggaataagtgttaatcattattgattttaacatcttacttttacttttgattttccaaccctactttttcttttgataaataaaaaaaaaaa

SEQ ID NO: 224971 - DNA, 2095 bp, Cannabis indica
tttttttgttattttttattgttgatacgatgttgtttggatattatttttatgtagttttcttattgttttcatgttacttttataaaacactgtaaaaatataaaatagtatctatgaacctaaaaatataaaaaatttacaaaaaatagtattttatgtaattatccaaaaataaaattcattaggttgaattaaagatcaaccttactccatatttatcaaaagaatgacaacattactagttcaaaacaaaaataaacatatgacatgcataaaaataaacacaattcttattttgtaacaatacaatattattttgacaaagattctatgccaatttctttgactttagatgttgaggaaacccttgtccttaagggattcaatagtgtctctcaaaatcacttccaatgaagtgaattcaatacccaaatttcttgccttctcctttgatatttgatagagaggtggaaaaggtttatcatcttcacacctaaaaataataaacaaagaacaataaacttcatagcacaacactttaaaacacaagaaaattgtaaaatataatagatatatttgtgacgaaacttcctaacacttacaattgttacacatatgatctttataagaaaaaagtggccacaaaattattttatcttacgattttgttgcagacgtatcattttttagtcattaagtgttaactcaaaaacacatgacaacatattattggactatttattaaataagctaaagaaatatattgtcacgtatttttgaattgacacttaacaactaaaacagggtacgactgcaataaactcgtaatataaaatactttcgtcattaattttttattaggatcatatatatgtgtaataattgtaaatgttaaagggctttcgacgcaaatatcctaatataatataacttacttttctggaatggttaaagttgggtaaagtcgttgcaaaatattcaaaacctcagaaacatgcacaacatgtccaactacacaatatctcccattagcattagcaacttcaaatgctcgaatatgtgccaatgcaacatctctaatatgtacaaatctatgaactgcattagggaaagtttgtgctgccacattcaaaagtaaattacaatgtttgttaaaattgttgcaaataaagttgaataaaaatcaggcttggccttagacataggttggttaggtctctgtctaagacccatttagtccaggatcccaagaaaaaaaatttgtcctttaaaattacatattttttttttctaaataagggccaattttttttcctaaggtccactaaatttcaaggtcgagtctaacaaaaacaaattaacagaggaaaacaatgacacacgctctacacggtaaacctcctaaaaataaactacaagcaacattttcataattaatattgaaaagtaaaacataattttcataattaatatttcactaaacaaatgctatactacatgttttttttttgatccggatcaaatataacttagaaacttagatgatgaggactcacaaacacaacaataataatacttaaagttgttttctatatctttagaacattctcaacaacttctttactttatcatttaaaatacattatcaaaattctatatttttaaaattttattatattttattcatttcaaatatataatattaatatatacacctatcttccatacagaaataattattaaaactcaaaacaattaataaaaaatatttcgagcaatgaatagtattctataaatgtagagcatgaataatttatttataagaaaattaaaatgaaagagtttagagcatttgttgtagcatgtttttagtacggtttttaaattttttaaaatttctttattttacagaaattattatgagtgctcttagtatataatgcgtaacaaaaaaagtaccatttattatgttgcgaacaaactccatagtgacattaagagttgggggtaacatgggaccgattgcaaacccaggattaatggagactaagtcgatcccattttcttctgcaaatttccaagcagcttcttc

SEQ ID NO: 224972 - DNA, 2680 bp, Cannabis indica
gaactttttaaactcatatcataaatctaaaatgtttatttgaatcacttgttccgtgaagtaatacaaaacagtaatttaacttttaatgataataataagattattatactacaaatacatatgattaataataaaaggtcatgttgacttgagctgatatctctagattaacagttttttttttttttttggttgaacaaaccctagataacatagtgagtctcaagaaaggatttcaatttgttcatcaactcttaatctacaaaatagtagaagatattaacacccctcttaagatggaaaatgagtaatttgtcctagtcaggtttctatataaattccatgcatgtacaattccacaaaattaataagctcctataaattccatgtacaattcccaagtgattagcaattgctacaactaacactattatcccatataggaaaatacaatactatcccttaagaccatctagtgaatcagatacagtattatattatcccataaaggaaaatacatactgttttttctaattttgttaaatcatgtgatatagtattttcatgtattttatcatattatgttggtatgtatgatctttgtatactgatcattctctatgtatttttacatataatatatacatatatttaagtgggtccaacccaaattgagaatgttaactgtattatgatatggccaaacacagccagtgaaatcccaatacggctttcttatatttgcttttattattgggaatatgtaaatattccttattagttcttcccctatttcattatttctaaataattaattcatgtgtaataggtaaccattttatatttggctgactaaaacgacaaagtagggaaaaaaaactgtcaaatcctatttttcttttgccagatcaaatctggaagacctatttttttttttcaataaaaaagtaataaaaattctggaatacttaattgataaagattaaaattaattttttgtagagtaattgaccatattttaatttaaataacattaatgtaaggaagagaaattggggtgataaaatgcaatgatacacgcttccccttttagaagataaaatgcatgcttaaaaactcatatgcacttctctaataacaataataaaaaaaattctagaaaaaaaaaacaataataaaaattttggtcttaaattaagtgaaaaatgaaaaaaaaatattaatacctttattagtcttttttttaatatataaataatagctgtattagttagtatacatattatttgcagtaagattaaaaaaaaataatagaattaatattttatttagcttttgggcaatatttgactaattgcattataatttataatacatgtgaacattgtctaaatgattttttttaacatttgatgaaaatcattaataacaatatccatttgtaaaatattaaggtaataggggttataggtacaaaaaaaaagtaacaaaaaatatatttagaagtggtcattgtcttctttgtaatctcttctcacaaagagagaaagttccaaattcaaactacaacctagtccctcctacacaaaaagatttcaatttctcatgttctatttagttcatttttcattattaaaaatgtataaatttgtaaaattatttaaagattttttttggagaagtatctcatatactattttttaaattttttttttttttaaatttacggtttagattgtttcggttattgttctggtagtttctatatgagttgctatgtgagttttgattgcgatttaaggtggtctgctggttgctatgtgagtttctatgtaataaatttctgtgaaatataattaaaaaaaaaaaaaaccctttttttaagtgattatgcaaatatgagaatttatagatattcgttcatagagtcaagcacgtagtttaactttcttgttttaattcttacatattatataaatgcctatgtaacagaatttgttgtgcatgttaacagaatatgcttttttttctaacagaaactaacgtttaaatttaatatacccatttgaaaagttggcaatgcttgtaatgaaattgaaaaggcatgaaattgcggtcactcttgacaaattttctaaactgtgctttgattcatcaactaacctttctgttacgataaagtaaaccaacatctaaaagatgaaaacgtgcaaacttgcaaaccttcaagtataaacatatgaattttgtacttgttatactgttctgctatttgtagttatctttttccatctcttgatgtttttgtatttcatcaattagcattttattttatagtatagagcctacatgtaaaaataaactttcattttattttctagggtgactctaacaagaacaccctaattaattcattataaaaaaccaaagttgaatacaaaacaaaacacagcaaaggtcaccaggagataccaacaacacctaaagtaggaaacaagaaacaatggtgagccatcccatggcaaaaggcatatctccgatatattcattaaacaaaaacaaaccttcacagaactaataaaaaaaaatataatacaaaccatatatatagtgttgaccgaggttttcggcaaccaataaaataatagtagttgagagagctataagaaattaagag

SEQ ID NO: 224973 - DNA, 6232 bp, Cannabis indica
atatatatatataaatgtctaaaaattactttgtatatattaatcgtagttataaattactttgtatgctaatcgtagttttgataatgatattgcagtttttatatatattaatcgatcgagtaaattataatgaacaatcttgatcaagacaaggatttggtcccattggggtaagtattttcttcttccaagttataatgtgtatatatatactaattaattaaaacaccattttgctataattttatatagtaattaagtcaagtaagatctgtaatgtatctcaaaaaaaaaaaaaaaggaggaggaggaggatctgttatagcatttcaagaaaattagaaagaataagtgttatataacttataatataatttaaggtaaatacttttttagacttttgtatttttcaattaaataattttgtattttgtaaaaataaacataataatactctcatggattttggtaaaactttttcgtagttaggattagaaagaaaattgaatcattattagagatataaactagggtttgatcaccaacgatatatatatatttcgtaatagtgtttttggctggtcagctctcctaattattgtttcatttgcatttaactttttaagttaaaattttagcggaaaaactctccaaactattgaactactggtagaaagtttaacgtattattcagttaactgtcagcacttcttaggttgcccgagttaaatgatttggtttagtcaatattttgtacaccgcttgtagaaatgaccatatataataattttattctaatgacggtataagttttagttatatatataagtgtattcttaatgggtattacacccatgggtaatattatgaaaattttgagtttttttttttatctaattaaaaaaaatctcttgtttttatattatataagttgagattgttctatcggccgaaaaaaaaaattaagagtatgacttataaacgagagattacttagtcttataatatgttctctcacttcaaaaaatattagattagtgtggctataaaatgttgttattacttatgattagtttttgaatatataatgtatatatacacttaattttagggataataatattccaaagcaagaagatggaagacaagacaacttgaaagtggacaatatattgaatccatgggcagcagactctctactatggactaaaatattcttagcttcatgtgtgattggaatctcaattgatccattgttcctctacataccaattgtagatgatgatcgaaagtgcatcgaaaaagaccataatatggtgatcgtagcgcttgttttacgatctcttaccgatttttcatacgttttccatatctgttttcggcttcatactgcattgaaaatgtccaagaaacttcatcaatccattttcaaaaagtttccatggtcttatcttttcactgatcttttgtcaattcttcctcttcctcaggtaattaataagattgatgagtctacttaaagtactttattttaataaaattttgttgtatttaaaaataagaaattttttgtagtgttattaattgggccacatatatttaaaaagagtattgctgctaggcaccttgcacgtgtcgtcctataattagttaataattttctataatattacacttaggtatcatgagcggcctttaacatttctcttctctagtaattagccacctagctagttgggttcgggcacaaagtcgagccatatagcaatttccaatgcttactatataatttatatagctaatatgattaagaattgtgtttaattaggtgataattttaatgtacttctcgaagattactggatctaaatctttgacggcaagaaagttcatcaacttaatacttcttctccaatatgtgcctcgaatttttcgggtgtacttatcaaccaaagaattggcaaagaattttgacacactcactggacgtttatgggtcagaggtggcttcttgtttttcttctacattatttttggtcatgtaagtattatcattaatttctcctcatatatttttaatatagatcatagttcatttataaaataagtttttataaatatataaaaaatatcataagtaaacattttgaaaaattctttttaagatgttccaatataattaaatattttaaaaatcatttctcaaaaacttcgacatttttaggtgtttggagcgttttggtacttctattcaatttatcgcgagacagcttgttggcatcatgcttgtgaatattatgggccaaaagaatgtacacttggtccttttgactgtcatcttgggagtaatcatcctataaagaatttaacaaagctaaatcagttttgcccaattagtccaccaaatccagaaatcttcaatttcggaatattttctggagcaatcgagtctcggatagtcaacaaaacagattttccccagaaattcactcgtagcttttggtggggtttgaaaaatctaaggtttgtaaagaaaatgtttataatatttgatgacatttctaattattttttatatctcatgttttttttctttcttatttgtagttcttttggttccaaccttgacacaagtagcaatgtacaagaaaacttattcgccattctcatttctatcttgggtttacttttatttttatatcttattggaaatttgcaggtatgaactctttgtctttaattacttgatcaatgatctcatatctttatacatttttcccatacaatttattaagtaaggcgcctaataatactgtattgatgtgttgtgaagtgtcactaaataattttagagtcactcaatgtctatcactaaaacctatttttctagtagtgtcaattattaattatagaaaaagaaatgtattctttattgaatgtgtctaaatctatacaagagttagttctatacctttacaagattgctacttatagctttaggctagaaccggtacatgcactttggtaaagttagcagtcttaactaaattaactgacactaacagctaagactacaacttctaactgctattaggactaggttcaataacagacataataaaaaagagggagaaaggattagggattacacatttctaaccataatccttgtaactttggtattcaggatccatgatcagtagttaaagagtagtcatgagtgtccacagagagaagcttgaggcagtaattgaacttgactgatggtaggggttttgtaagcttgagattttctctagctttaccttaccctttgctataacatctcttatatataaagtgcagcctaacatcaatatgtttgtgctctcatgggatacttggttttttcttaagtgcaatgcactttggctgtcactaaaagcagtgatagaactcaggtttacaccaagttcttttgttaatccttttagccaaagtgtctctttaataacttctttacaacccatatattcagcctcagcggtggacaaaaccacttttggttgaagttttgctttccagtcactgatttcggaatataaaacgagtttaagaccttttagtatccaaatctcctacatagtccaagtgtacataccctaagacttctggtttcttagtgttagagcaataaactactccaagttttgagttttccttcaggtacctcagcatccatttgacagtctcccagtgttcctttcctggcctgctcatgtacctgccgatcgcactcattccatggcaccaataacagatcataatgtacataatgttgtccaccacactgttgatagagagcttaaaatgatgagctattgaagtcgtttggcattgtcaaaaccaaacctctttagcaccttagagatgtaacaaccttgagaaattagcaaccttctccgttttctatctctatgttagtgttggaagcttttctcaccattgatacagagtatcaagaacaacaaacagaaagagagaaagaacaaagaacagagagaaagagaaggaaaagattggaaaggctgaaaaggttacttgcattaatgagctagaaagtttatatacagatcaaaacagaaataacagaaagtaatgagagagaaacattactaacaaactctaaccaactataacagaattaactgcctttacactccccctcaaacttggaattggtactgggaccaatgccaagtttgttcctgaacaacacaaatctggaagtggaagtagctttagtgaatccatctgcaatttggtccgaggcaggaacatgatgaactttgacaagcttttgagatagtttttctcgaacaaaatacaagtccagctctatgtgtttagtcctggcatgaagcacaggattagccgtgagtaagatcgtgcttaagttgtcacaccatatgacaggtgtacgaggaagctggacatgaatctctgtaaacagagagtgcatccacgtgatttcagacacaacttgagcaagacttctgtactcggcttcagtgcttgatcgagaaactgtgtgttgctttttgcattgccaagcaaccaaattggagccaaaaaatatagagaaaccagaagttgatcttctgtcatcgggatcactcgcccaatctgcatcacaaaatgcagtgacatctagatcagatgacttttgcagagacaaaccatgagagaccgtgcctttaagatatctgagaatcctttttactgcattccagtgagtgtgagaggattggccatgaattggcaaactttattaacactatatgaaatctcaggacgagtgattgtcaaatattgcaaggctcctactatcgatctgtattgctgcggattgtccacagggtctccttggtaagcagagagttttaatccaccagtcatgggagtaggagcagacttagcatcctgcatttgagctctacacaacagatcttgaatgtatttgccctgagacagatgcagccctgtttctgtatgctcaacttcaatacccagaaaataatgcagattgccaaggttcttgagagaaaacttggtgtcaagagcatgaatgagatcattaacctgtttagcatcactacctgtgataataatgtcatccacatacactaataaaagaatcatgcaagtggatgaatgtttaataaacaagctgtgatctgacttagatgacacaaacccgaaagacaaaagagcttgatgcaatttgtcaaaccatgcccgtggggcctgctttaggccatagatggccttatttaatttgcaaaccaagtgaggagcatcaggcaactcaaagccagggggttgtatcatgtaaacctcctcttgcaaatccccattcaaaaaagcattattaatatcgagttgttgaatacaccaaccttttgctaaggctagagataacacaatccgaatggtcactggttttacaatagggctaaatgtctcagtaaagtcgaaatcaggttgttgatggaagcctttagcaaccaacctagctttgattttgtttatggtgccatctgcattaagctttatcttgaatacccacttgcatccaataggagttttaccatcaggcaaaggaacataagtccatgttacattttttcttaaggcccccatttcatcagacatggcatgtctccatttttcttgttgaatggcagttttcacactggttggctcttgaaaagtcagataaaccttaggcttgtatatcccagatttggctctgttttcatggaatgattattgacaacaggcagattagatgaaggaacagactgagagttcacaggttgagtttgcacatattgagtaggtacaggttgagtagacataagagaaggggggatggactgagatgacacagatggtgttgactcagttggattaagtgggacagagccaggctgagaacttgactgagaagaatcagtagagacatgagagatagaataaggtggaggctcaggaaaaatttcagggtgaaacacaggtgtttgagaatgagtggacaagctatctgtgggaaaaaggaattcagctgtgtacatttgagtggatatgggaatactagcagatggcatttgttctttagaactgggaaccacagggatagattgaatagtgtgtttctggtatgagaacttagtttcatcaaagatca

SEQ ID NO: 224974 - DNA, 2317 bp, Cannabis indica
aaaataaaaatttactattttactgaaactgaatgtccaaatcaacactaagctcaatgatgaactgtaatgggtcagattcagtggtgctttctcagttgggtgataaaaacatctaaaaacacacacccatctaaaatttgttaaaaatcaccctatatatcaattattgagtgtcaacactttttttcacctttaaacagagcaatacaacaacatcgatggtcagttgaagtcactatgcttccatactcaatagataaagtaacaaaagcatgaaagctatgcactgaccatgttaattagtttctggtaaggcgtatcagaagattcagaagagagagatgccatgtctctcaaggtggaaccaatctcaagtagtacatcatagcctgctttccttacatcttcttccttggcctacacattattacaaaatccatttcatatgtcacaattgtctaaaataaaattttcagatgatacaaaacaaataaatatacataaaagaaattaaactagtggtaataaaatattaacaagtaagagtgttgaaaacaataccatacaaaaaaaaataaaaataaaagtatctaatccctccacaaccacaagtctataataccaaattggcaatgtgcaacccaatatttaaattcttaaatgaagaattatggttacaaaaatgaaaagaaaaaaaaaaatgcaacagaaacattaagaagctcgtaactcttcatacaaacactggaaatgtaaatggcataagaagaaatgaaaagaacaattgtaaccataaatttaaagtgaaaaaataaacaaatacaaaacagtgaattaaaaaaattcttaaaacggttcttacatcctttagtgtaattataatctcattgacaataagaaaagcctttgcattttcttcctccgagtctacctgcaggaccagtacaaaatattcagtcatccaaaatttagatataaggttgcattttcagaaaaatgcggcacaaataataataataacaatggcaagactaaacaaagagtaagactactacgtctttaaaaggattctacataatattaaaaaaaaataataaagtttcgagagacatctatatacaaaaccagagcaaagatatacaatgacacaaaaaataaataaaaagttggtcctatatatttatgcctgaccttcaatgtgtaaaccattaaaggatgaaaacaagcaaagcgactccttagagtagcaacatcagttggagatttaaagcctagtaagaaatcaatcagctcagaaaatcgagatgaacaaaaccaagcatgctcctgcaccatgtcaagtaatgagaagataattcaattcatttgtgtgtgagaaagagaaacagagagagagagaggggttagagctatgaatatgtacagacccgcaaaattctgctcagagtgtgataggcttgatgatgaccaatgtcactgatgacctaaatatcaagtatccatgcaaaatttcagcttaaatatagcagttacagcgagcataaaatcaagcacaataaatcatcacatgtagctatcggaactttgattacctgaaagctgctcttaataaagttatagattaaatcaataaggtcctcttgggctccttcaacaaaacaagatgcaagctctagaataaaacatctgaaaaaacccaaacagaagagtttcaaacactattattattgcatttagacatttctttactaaacagagccaagtcatctgtaagattctatttctatgatataatggtgttatattagaggaatacactttggaatgcacaaaaacaggtgacatttacttagttctaaacccctagtgtataatatgatgatttaatcatcaagtattattcaactatcactcaggcaagggaaaacaccaactttgcatatttttcttttcagaatttccttctggtacaagtatatatctacacggtacatcttaagtatagttttcaaagaagcctccagatattaatatctactcgcttagttgccaaagttgtgtttttaacctaatgcctatatctacaacataaaacagaaaaattctccttttacctttgagcatctttctccatggcgtttgtattccctggttctttgtcagccaatttgctttcattctccgacactggttttccaaactcgccactttcatcaatgaacccaaactgctcaaggaatgacttgaaaatctttttggttacagaaggatcagtaatagaggtcaagcatccaatagcgtcctgaaaataagc

SEQ ID NO: 224975 - DNA, 3953 bp, Cannabis indica
aaaaaaaaaaatcatctcaaacaaacatccaagtagatagtgaatcgctaaagttttaatggaatttcaatacaaaacaatagttatttatcataatatttttgccaaaaaaattaaattttcttgatgccatcacataacaattatcaaagtattattttaccgttgattttggtcgaaattaaaatttcatggtctaaaattaaattttaaaatgataagcaacaatgattttcaatggaatttaatgaaaattctgctgatgcattactattcactcaaatgtcagtttgagagaattttatctgtttgacataatattattctagatgaaataatttaaattttgtattttatacactccaaattatgagtttaacgtgttcaaatttatttttttaccaaaattaaaataaacacaaattcatcaagcatccaagtaaatacttatgcatcgccaatttttttttaaaatatttcattgcaaaactatagttaaacatcgttttaccatcctatttttgccaaaaaagaaaaaaatgtttttgtggcggcatgcaaaacaatcattaaagcatagttttactatcaattttggttgaaaattaaattttcatggtacctgttatccatgattccaaataggtgacacatgaactctcacggtggcccaccacatgtatcgagcccattacttggccaaagtagttcaaccaatcgacccacctattgagaataggcaaaactggacgggtggtctggatctcatacctttatttagtaatgaattcggacagtcgatcgcggataggaacttcatacctgatatgcaaaccatatttaaatccaagaaggatgccttcatgggtcatctgggaacgagatacgaaaaggcatttgggatagcttactatcccggaggtcgcctacgtggcacccctctaacatgatccttaatctggtgacctatcccctctattaagacttagaaaagcacatgacaaaaataatatcatttttttaggcggacacccactacactgacatttctctctcccaacggcagctcacacctcatttgtcactgtcaatagtactatcatgtacgacatgcaactcacccaaattgggcaactcctagccgacccaatagctcaaaatataatgctaaataatgtattttacccaattagtgagttttattgtacaaaatcctaatggggcttgaaatcgtccggcccattcaacatatgttcttataaatatgacactatcttttcacgcaaagggttcgattctcttggttcacaaccagaaaaatacagtaaagaatcgtaaaatctttatagccaagagcttataaaactgcctcgtggactaaggttcattaatgccccaaccacataaaaattgtgtttcattttctttttcatattactttatttatgttaaatcttttattataatcgatttttaaaaaattcggtaaatattttggtgctttcattgagagatgaaaaaagattctgactattctttgtcatctaccaaaacggtggctactagaaacatagtagcatgcccaaccgaccaagtgggtccaaataatggtgaagacctagttgttgatgttttaaaccctcctcctttagtggatgcgaagaagcatcgacagtgggcggagatcctccccaaaacggtaattggctagaggacccgtacgaagaagacccagtcaaagaagaaggctaggaagagtactatgaggatgaacataggacgattatgacaaagaggaggaagaagaagactacactcccactaaagacccagaagtttctcgtttgaagcaactagttctagactaggaagctaagatggcagaacaagatgaagttactcaccaaatacaagaaacgttgtttcagttgtagacgttgatcataaaaaggggcctcaacctggaggttccacccacaaaccaaaatcaagctctcaggatttagttcaacaccaggttagcagtagctatggaaaagttcaaccatccctgtgccaaaacatctaagtcgctaatgaaaaaggaaaagccaaagtggttgatccccaaagaaaaatcattccaccaaggtctatgcgagtcaatatcaaccttcgaaatcgaagggatgaccaaaccctaaggctaagtcatccgaccaatctataaaggagtttcctacagggtaacaagacctgtactcagacattgggacctaatgcccaaggaagaaggattctcaccagttcctttgttaaacataaggatgatattaaggacttagatcctaaagaaagcaattcatagggacaacatgaatgcgcggagggaaaaagtgcaacgtggaagagttaggcctcaaagaggtgatttacgaaacaacatcaatgattgatttcggggatgaaaggtactagatgataatacaagaaggctaaaagactagataacaaccttgaaaaaggtgacagatcgactggtcagatgcaaagtggagatagatcagatcccgaagatgaatgtaacgccctaatccttagggacgccacatgtgtgcgtatataaactagtttataacaataaactagcagtttagataaattatgattagtaaaaactttaccaacttaatttaaattataaaatcatggcatagttcctttttacgattggggatttcctatttaaaatattacaagacatgttattacatattattataaaatacatttaaagttcagaatatttgaaatatagttcctgataactcaacaccacttgctggataagctgatatgtacatttgctggagaagattcttgactcatggttgtccaaatgtctctacttattacctgcaccacataacgctcgtgagtcatagggactcaacaagaaaagtaatatcagtaatcatataatttattattcaaatattatcagttagattcagacaatcaggacccaataattacatattactcataagataaaatccaaatcactactaacatcagtcgcaaataaatatcggtataaaaatattcggtaatacaaaatcgttgtgctaataatataagtcattttcatttcttgataaagtgttcataatcaacattcgtacattactcccatgcataagtccaagtcaatactgacattcattcaaaatcaacatcagtataaatatttaatgatataccaatactcatttaataatataattatgttacctcataaagtaacaatttcccgtagttgcctaatcagacaaacttgatgctctaaccctacttccacatatgtttcattgcctaatcaggcaacgcagatgccctaacctagcatctatatatctctttcattgtctaatcaaataatcaacaagtaggaaacttaacaatggttcctatttatagtcatgacgtttgatacctaacccttcggtatccaattatcgttgcctaattagacaatcttttcatcattatctaatcagacaatcttcacatcattgcctaataaaacaactttttcatcacataacggtaataaccttgttttaatctcaatattactcaattctcaacaataataattgcattataacatatcatgctatgtggtacaatgtacttttcttacctttaatctggattcatgcatgtcggccaacccaagtggagaaacactcccgatgatctcgaccttatgtcacaacaacggtaaactaataagtgtttatctccaaaatacttcattatattcgtataagacaatagggttttctactaaataccgtggtataaataccttaaaataaaacttatattttggctgtaaaatatataccttattgtagagctcgttgcaagcttcacaacagcatgtagaacgtctaaaatggacaccc

SEQ ID NO: 224976 - DNA, 7786 bp, Cannabis indica
aaaaaaataatatgtagtaaaatgtatttttaattaatttttattagctaatttattatatttggctattttctcaattttttctttaaaatggacatttactaacttaatttttaaatttaggatcattttacatctcagccctttaagcaatccaagactattaggcccagaaaccagtatttttgtttcaatttaaaatatggatcttatacaacactaacaaaacttgtatggacaaaactattttagaggaaattacaattttattaatattgggtacttttcaacacgtgacacatttatattgatacacctaaattattatttaaaatttttaatatttttttattttgtaaatattttattttctatttttataattttatttaattttcaaataataatattaggtgtactaatataaacatgtcacatgtagaagagtatacgcataaataatttacggtgacaattaaccagataacacattaaatttgctaacaatttaatagtttaaaaacttttaccaccaaaatttaaactttgaaggatcaagtgcaagtaaaatgattgtgaaaagaattgaaccaccaaaaactctaatgtaattatccagtaaaacctgtatttattagaataaacctttgaaagatttttgaccttataataaaagcacaaaactccatatttcatagtcactagctgctggagtgcattttctccttcctcctcacacttatcaacatctggtttggtgatggtctagcattttcaattggataatatacgagtacatttgtgtatatattgattgttgagtattgttgaaatataacaataaataagttcaatcatactgtacaatttaaataacacaccagcagcagcagcataaatcacacataaatgtatcccaaattaaatgacactcatctaagaagtgtaagacacaaaattgaaaaagaataatttaaatatgaagggtaagctgtaatttcggcctattgggttgaggctccacaacctccaaatgaatattaacagcctgcagaacactgaatgaaagggtaccatccatcttttttatcttctgctcctgctcatctacgaaccactctcctcctcccttctcgcttttctggttcaagtacaccggcccttctatcccatacctaatgtcaaaatatcaaaataacaaaatttatcctcaaaatcctataatacaacaaaccaaatacaaaacttttaactatgacaacaacatacttgggaacaaatacgataaatccatttgctcttattttcactattctagcctctgcatccgtgggcctgcgtgcatgccaccaaacaccgttacatacacagatcatgtgagcaacacaaacataaaacagataacaaagaaataatagcatggtacataccgttttctgaagaaaatgacagtgtgaagctctactgaggcccgacttgccatctgagcgtttctgtgtcggtaatttaaatctgatggaaattcaagagaaccaaagacatttttaagctcaatattcatagaaaacaagtttagaaagtcagctatttgggtaatattataataaatgataagtagcagcaaaaagttgagtgaaagatggcccatactgtcagcaatactagttagttgcggtctgtcttggaatactgtgggaagcttgtatatcccaagtgaggcagcaagcaacctgtgtactataacatctgcaggagaggaatgtttaacattcaaagttcaaacaatgcaacgctcatgatcaagcatgtaaaaggtatggcaatagaattgttactagcctgcatatcttctgataggagatgtaaaatgagtatatagaggtgatgcgagcccgtaatgaagatattccggagggctaagatctccactacagaaatataccgcctgcatatgataatccagaggaaagcaacacagtacttaattagcaaaaaacactctagggaggaaattcaaggttgcttccaaatcaactggtatatatattacctgtgtcatgcatctggtagcaagtatgcgaatcagcttgttgaagtatggatcattgccctgaaaatcatttaaagtaattagtcaaaagcttaaactacagtgtacacatgtgtgagtgtggtgggaggaattattgcatatggagataagacttgccacagcagaatcaagtgaatcagccagagcttttgaggacgaaacatccaagttgagtccaacagcagcagcagtacgcagcaaaggttcaagcatctctcttgttggagtaggatgccgcctacacacgcacgaccaatatcagcgaagaacatataagattaatgaaataagaacaacttaagccaacatgtcacaaattcttatttaaccagaggaatgactgaaaagaacacagttctgaacaatccgagcaatgaaaaataatctttcacacaacgtttaaaaatttaaacttaaacctactgtgtctcatcgtagaaatctcaatgagcaagttaataaaccagtttaccttaatagagagcacaaaggaaattctttaagtatcttttctgcaacagagacattagcagcaagcataaactcctcaaccatttgattcgcttctcgaatttggtacatgcctacaaaaatgattcacaacagatgagaaatttaccaaaacaagaaaatcttagctatttttacaagtaaccacatagtcaattgccatacattaaacttaccaatatcaagagggtcgtgagtctcggtgtcaatttgaaatttgacttcggcagaagcaagtgttaaggctcctcgttcaatacgtctctgtctcattatctgcagcattacaaaagcataaatattagcagatatccaaatgcaaatcacactcatttacctcgtaaatctgattaaatatcatctcaatatgtgcataccttggctaaaacattcatgtttcttaaatctgtagttaatgggtccatcaatcgactgcaagatgattgagagcactcaagagttatatatattaataaaaaatagaactgttgagaaggaaataaacaatgtttctaagcatgaaatggatcagaaccactagaagaaggacatttttatgataactacattacatatgtcagaacagaaaatcacctatcatccatccttgcttgagcttcaatataagataatgctgcagacgatttaatgacactttttgtgtatcttgttgaaataatatctgcttcaggtgtcatctcctgaaatttatgccattaatattaagagcatgtagagatattttaattttttaagcaccacctgatgataagtcaaggtctatccaccatccatcacacataattatgtatttagttttaataattagaaaaataagtagttgattagaaaccttgaaaaaaacatgactacataggccagcagttgagaccatgggaaaatactattattaatcatatattaaaataaatctagaactgcaaaacgcacaaaattcaacttcatataaaaaaaaataaaaatacataatttacatcacattatattaaaatgaaaaggaaataaaattcacagatataaaagagtaactaaataagttggacatacccatatgacagagaaagctagcctttccacatcagctcgaagagaacatatatctgcaaaatagatggacatctgtgtgaggtttaggtaagaaataagtcctcataatggtcagtcttttatagcacgctgcaatttattatcaatatgtcgttattcggtatcattaatagaggtacttgtatttctccgtccttgtattcactatcaaggtatttctctgtccttaatagggatactatcatgtttaagtttaaacacatatgtttaaattttgtatcatcatattaaaactcatgacataaataaacaagtaaataccttctgtcagaggtttaggaagcatgtcaattcgtcgttcaacaaggtagacagatgtacccctttgtgaagcctcgtcatcaagtggggtgcccgggtgcacaaaattagtgacatcagcaatatctagaggacatcattaagggttaacttcacaaaataagcacaacttcatttcagttcagtaggaattggcaggtaacacaacataaaggattagcatgtggtttctagccaaaaaaaaatggtgagtaaagtcaagaatttgtgctgtctttgaattgcatgaaataagaacaacagttcagtaagctaacacaaacactatcaatatcaacaagtcaaaggatacggacaccaacttcaaaatttccatttggaagagctgtacaatgcagtgtatcatcaatatccttacatcctgcacaaccaaagtatgtcattaaatatgtggtgctaatctctgaaaataccttaatattcacccaggttggcatacctggagggtcaacactaaatacacgtaaatgtcgaagatcctgccgaataggatttgacaagtcttcaggagacaccgaccatggcaaaggtggcaagcatgcaagaacttgagaggaaaatggtcgtgagttaatatcattttcaatcaagacaacctgcataatccaacaaagtaaagtggtttgattacatctaaaattgtcatccttgtggtctcaaaagacaatgtgatctctaataagtgaaaaaacataagtaaattaagtgccttctcaaataaatatatggaacccttacaacatacctcagtttcagtatctctatcaccaatttccccaatggtccgtacataatgtccagaagggtatctagatagacagtcccaagaatcaactgccacaattattctcttgtccagaaggttctcaagctgtcgtgtttggattcgaattttaggaaccctgcggtcttttgagacaaacaaggcatgggcaacacctccactacctgcaggcaagggcattggctccaaagatccacaataactgcacaaaatttaaataatattacactaaatctagcataaccagcatgcaatgtgtggataaatgggtaaaacatcttaagtttataattgagaaataaacaccaccacttttaaaaaacgtcagagaagccaaatagcagctataaccaaaaccacattcaaaagctagccaatgctatggattaaagtcaacttacgaatgccaattcctctttataacacctatgacacgaccagatggacgagatgaggctagtgttgtttcactttcacattgagaagtagttctaggagcatcatcagcactacctggaactaggtgaacaccttcttcttcatcatcctctgtgtagaagtaaaatttaaatgcaacaaccaagtatcaccgattgaaactcttctatgtttattgtatgtaaataatgtttacatatcaaagaataattatgatagctttatcatcggcaccttctagaagtcaccaatttttcatttattacttatttttgcaatgagcgtaccttcttcggctatagccaatgatttctcctcatgccactgatctttaggcaagagttccacagccactatatccccatcaaaggctctattcatgtttgagcgcccataaataataatttcatcaccaatactctcgcttccaacatacgcttcaaaagggttgtaacgattcacacgaagttttccttgatgatatataccacggtgcaagccagaagtaatctcagacatgggtttgtgctagagatagtgacaaagattattattagaaagaacaattttcatttcatggagcttacaaactataaatgtaaagaggcagggaatgcagcatataaacaaacctccgaatatatgattttcctttttgatggcctcaaatcttcaacctcctccatgtttacatcttcagtcgaaggatgcacaagttggtcaagcaaatcaggtcgacccagtgatttcacataagattcaactgaaagaaaggtaaatattagagaagtgagctctgtatacagaataaagcaacaaagttttcatgtgataatcagacgtggtataggatgatgcaaatgctaaatcaaaaagaaggtaggtgcatacttgtttccgcacaaatgccctcttcaacggcctttctcttattctctctatcattagtaatcagtaaaactctagctgcgccactgagatgagtttgataccactgagcagccactcgaattgctgttacaagggtctttccatgttaaatccggaatttgaaaccaaaacttaaaaaaaaatgataatcactgcaaaggcaaagcaaacctctatcatttcgatcatttttagtctctccttccatttgcttaacatatgtatctctgcagatttagtagaaaagtaaaagttactatataacatgaagaaaagataaggacagagaaagaagaaattactcacttgtgatgttcattagagaaaacaaagaattttttagaagaattgcaaagggctctaagtctgttgtaaatgctcaagttcttattcttaacttcttctagcacaatggatagcaaaacgacatcctcaatggctgggttctcaagtaaatcgatctataatgtaatgcaaaacaagttgttgttctcaaattcaatttaataataaagtaatgacattgtcaaagaaaaaggagtatagcaaaagaagaagaagaagaaaaacctgattgagaacgacattagtgtcaataacgagaataggagaagcatgggaagcagtcaagcgagcatctttagaatcgcagagtttacaatctgaagctccacaatagatatcatcacgaagataatgctctctcaccacctggagacgaagaagaagattctagttagggtttattcgaaatataaacacataaacacgcacacacatacatatatatagagagagttgtacagaaaactgaccttggtgattttgccggcgcggcttttcttgacgaaagacttggtgtgcaacatgattgtaagtaaaaattgaaactttaaagctaaagccctctcttactctgtcggagtccgtagatttctgagagcccccaaaacagaggcggactagtgttcttatatgaatatgaatgaactatgaagtagagacaaagaaaagaacttcttagtttagtttaagccctccagtatcattaaaaaaaaaaaattcttttcttttagcgattttaaataataatttttttccttaaaatttaaatatgctcattttttttttaaatcatttaatataatgaattgaaaaaagataattttcaaaaaaaaaaaattactttgttattatttttgctatttatcgaattaggaaactctatcttggttaaaattaataaataaaaaatctcataaaactcaaacttaccataaaatatctcacaaaattcaaaaaaaaaaatattataaaaatgagataataatgtgatattattacttttgctattacattgttcaataataaagtgtaattatattaaaatgaattttaaagccactaaggctagcttagtggtgagggagggatgggaaaagggagaggtcatgggttcgaacccaagacttttaagttataagctattagttgattgtaagaatactattacgctacactcaaaaaaaaaaactactaaaatgaattttacttatacttaagtataattttttaagctcaaa

SEQ ID NO: 224977 - DNA, 3926 bp, Cannabis indica
aaaaaaaataaaaatgaattttacagaacacacttttgttttctgtttttaaaattgaaaaacaaaagttgttacagaacttatttttgtttttcaaaaataaattttttaaaaataaaaattttactttcactttgtgattaaaaaattgaaaaacaaaagtgttatcaaacaacactttaataatctcaagtgacattaactcaattattagatgaaatgaaaaaacttagaatattgtagtttctatatgattgtccgaaaatcaattaatttttttttatttgatattaggggagagagattcaaacttgaacctcttcttagtttgaaatcaccacttattcctatgaccatatttttttccttttgttgattttggtaaattttttttttataaaaaaaaagattatatatatgttcaaaatataagaaaaagattaaattaatgaatttaaaatatatttataatgtttattgagaataattaccgaaattggtaggaaagtatatgtaatataaaccaattcatcttctattagctattgatacaaatatttaaacaaatagggaattatgttttttctttttatatatctatagggaatatttaagttggcgtcaagagaaaccatcaatatagttacttgcatattattttatgtaaatgtatagttgttgacttgaccaacaccaatacatgacaaaaaacactgcgagaatgaagattacaaaataaataaatacttggttcaacctacataaaagtggcgtacacatccaatgcaaattacaccttagtccaaaccacatgcactggctagctagtgcaattgacagtgaatacactcaaatctttagcaactgaaatcaaaaaccccaattttagatccttacatcactcaaataaagtttcacagtacataactctagaaagctttagagagaacataacaagtaataatatatatgagcttttgattgtcccaaaggcctagccttttaccggctctaatcctagaaagacttcaagaattagttgtaaaacatattggtaactaactaaattatatttaatccttgataagatcacatatacacaacacaattatgcaagaataataagattaccaacaaaaaaaaaaaaaaccaaaaattaagttagcttcatatcgaaggtagctgttacactaggaaaatgacatatagacttattagtaatttattagtgttttcttaattttgtattttcattttagtataaatatgtaatgggatttgacttaatgattatgaatgcgaattaagagttttcatattggagattgatactgtattgtatcactggtggcctccagagagcggcgtgttgcctaagttgagagagtcagaggtgcctcagccgatgtgcgatagcgtattagagttagttccacattattaatctgtatcatatataagatgaatgaaccactcctcccgctgttaattggttttaagatgaaacctcatattcacctatctcaaattttaacataacgctcaaacacatctaatttctccatttgaacattgaaatgatgttggagatgcaactccatcgcctttaacatatcagcaaaatctttgttcttcatggcaactccatcgcctttaacatatcagcaaaaggtcctctttcaatgaaatctctcaccaaaacactctcaacaaaatcactaatgatagatgaaacacactcttcaaaaccgtactcatttccaatagaaaaatacctagatgacgtttgattagaggtaatggaatggaatggaatgaaaatgaaacaattttcatttcattcctttgtttagtttcattttactaaaggggaatgaaaatcaattgtatgggattgattcccattcatttgtttactaaattttgaaatggaagaaactaatggaatccacgcaaattaaggagaaaacaaagggaaatgttcttccccaattttcataaggaatacttttccttttccttaacttattttatattaattaaaaataaaaaagagaaatatgcccttcaaaaatatataaataaaaaagaattacatgttccaacaatggcaatttagtcaaattaagtcattccgattacctatcctgattatgtaaacagaataaaatgattatgattttctttccggtcaaacaaaataaaatattatttccatttattttatattttaatccgattgatttcttccattgattattctgattccaattacagtttaacaaacgtgccattaaattaatggaatgtcattccaatggaatggcctttccaccattttggtagaatgactattccattttgaaatagaaggaaagattattccaatgcatgatgagaaaaaatttaataatttttttttaattaattttttaatcaatttttttaatgcattttaaattttattccattcctatacttattcccaattctattcctatattttcattcctcccaaccaaacgcaacattctcatccatttcattcatagtgcttaagtcaaataacactacatatttatactaattaagctaggcaatgaaggtacaaagataagaaaaactaacaaattactgataagcttatatacggccatgttcctagtgtaacataactagagaaaaaaacaaaagtggtgtctatctttgctaattcaaatgatgctttgtattcttaaaatatcagtcaacagagatgaaaaattgtgatgtgattggaggtttttgtgtaaccttagttgaatccactcaagtgtttaaccagtggactcacagttactaatttactacctcccaaaatcaagaacaaagtttcactcaatcctaaactttagagaaaacataaaaaacaagtattatgagcttataattagttattagagaaaatctagcctagtataagctcgacttcgagaattggttataacaaatttgtttaaactaacttagtaaaggtttaactcttaaccccaatagtaatcatcacattatttgggtcatatattacaacaatagtggaatattgttcaacgaacataattgttttcaaagatcttacacatgggttcttttgaaggggattaagttccatttcaaaaagttatttgttagagaattacatattgctcatgcgtcgaaaataatacatatatatgatacataaattaattacttttcttattgccaattaattttaaaataaaaccataccatacactcaccttcatcctaaattctataatccgatccacaaattaaaaatgttcgagaaaaagtagagccaccaaaagaatctaaaggatagtcagccaaaaaaaactgtttgtgattaagctgtcgattggtgagaaaaaaaaatagctaccatcttgaagggatattagaaaattatctcacattgctaatgtgtgaaaaaataataccatatataagatacatagaatactcatctcaatctcatcaattagtgttgaaatggaacccattcatcttaccctataccaaacatcatcatacttactccacaccaaacttccgcattctaccattattgaatggtatggtattatagtatacttttagtcacaacaaaacttgtgactaaaattgaaaaaagtgactaattataaattattatttatatgttgtgactaaaatgtctatggctaaaaatattagtcataaaaaaattacaatttgttgtgactaaatgtttttttagtcacaatacttgttgtgactaaaactaaattagtgacaacttataactaaatactatgttttagtcataagtaacattttgctgtgactaaaagacacatttaatcacaaaaaaattatgttgtgactaaaatgttatcactaaa

SEQ ID NO: 224978 - DNA, 5903 bp, Cannabis indica
ttagattgtgatccaataacgaataatgaaagagaatataaattttatacttaattaggtacttaataaaaaaaatattaaaaaatatcactttttacactatatcaaaaatatgtttatatacaaaatacttaagccaaactttaacgttttttttttgttgaaaaacttttgttcttaagttttttttttttcaaccgatggaacaaccccaacttatattatataaatattatataaaagtgggagatttttttaattagatagaaaacttaagtataaaaacttaaatttttataatattacccatatccattaagagtgattttacttattaagtccaaaattgtatattgttttttctgttaaatatacaacatattgctcttgcatagcagacccaaaatattaattaacttttctttgactgcatattcgtttttttttttttttttgtttatttaaaggtgagctcatagtaaataaattgaagagaatgagggcattcttttaaatttgtagaatgaggacatctattttttttttttttttgtctgaatttaccattttcttagcaactaatcagtgtcatctgaattttaattttttttttatcttcttttagtcgttggtcaaattgtttattcgtgcttgatcgtttatttattttttaatcaagtttttgtgtttttgtttgtttgtttttttaattcgaatgatttgcaattttgcatgtgtatgttatgcaatttttattctcgtttaggtttttttaaacacgatttacaatttttattgcatttggctctttgattatgttccgttaatatacttgtaggtgattctttaggtcttgtttggcttgttggacttcattcgtctatggtgtttggaaaatcttttatttttgttttccatttatatataactgctacatgttttggatatgtaggattaatcttaagtgtgttcatgagatggataatgaaggacattatcgcaagaagtttcctaacatgaaatcccaacgggtgagattttattctctcaaatttttgtatgttgtacattcggctttaattttcacctttttcatttttacatgcgaaaatcgtttggttactagatgtttgaatgagaggtttaggttcatgatcatatttttgtctgtggtatggttatttggtgttgaatccaaagacttgggatgacatctagtgtcagggttgagagggtagggttatggataaagtaagggcgagagttaccaaataacaaagttttcaaagttgtctagttaatgcaaaatagaatctatgttcttttagtttcagttattagatttaagggtcctgccaatgctgttaagaattccacattgaatagaagtgagaacactaccatgagttactctttagctaattggaattggttgaggtagaatcttgtgggtcttaacttgttataccctaaatatggtccttacagttttcaatgttctgattgtatctgtagttggttattgctagtgtaggaagtgttcgttgaatgttctgatcgttatctcatccattgttcttctgttatgataggtcaaggctgaagaatcttttgctcctgcattagaagatgaaacagtggatcatttgcttgcagaacctaaaattgagaatgtttctgtagatggtgttttacattttggtgaggaaaatgggggaaaatgcttcggatttgaagaattttcacgatacgaatatttttctgatacatatagaggtatcctttcaaacaaacactactgtttctcttgtgggacttgcaagcatattatgaatgaatgcatgcatatatatatgtacttcataggccacacaatttttttcttcctatttgcatttttattggaagtagaatttacaaatagaagtgagaacatattgcatttgttcattattaattcctggatatgctcgtgtagagtacttgtgcctgaggttgtgagattacattgcacggcattcttgtgagatgtgtagttgaagggtcatttactatttgatgcctttgtgtttagctgctgctgtttctctcttttccttcctattacaggtcactaaacatctatgtacagtcactctaatgctgttctacttggttgttttcttcttattgtctaataaggtgggttgcattctaatgctgctcagcaaggagaagatgagttagaatttggagtatgtatctttttcaaacattgtattatcttgcccaagttatttatttttcaggaatattttctctgtgaaacctacttttctttctttgaatatgttacagcatgttgatctgtggccctttttgagggtttgtggttctgcatgtgatattgtgatatttctatttattttttgatgagattttgatttagtagcttgaggggttgctggatgaagttgaagaaattgaggatcttcatgcagcagatggtcttgccagtccaagtgaagattttcttctgggtaccttttttaaacttggttttttttttttttttttcagatttcagcgaccattttgttttaattgtaacaatgcacttccttcttgtactggaggattcctttgtattccgtgttatcacttctaaaacttgaattctataacagctgcatccgtttctccttctccctgttacttacgcttatttgttattgacagagattggtttcactggaaaaccttctggaatggattatggtcctccctgctggggatcactaacaagaaatgtaagtcctgcgagtcagtctccaggattaagcggaagtagtaatagtgctgttgggatgtctgaatcatcatctgtaacgattcaagaatcggactttaagaatgactactctcttctcaagtcagaaaatcacgagttaccagctctcaagtacaggagaaggtgtgaaaagcctgtttcacttgagtttcggaatcctaatctgtcagatgaggacgacgatgaagatcctttattaagttccatgttattaaataaaaatgggaggaagttaggtgacacaagtaaaagtggtgctcctcgtagagagaaaagattgcgtaagcctactcagaggtacattgaagaattttcagataagaagtctaaacatctcaagggacaaggaaaattttctgctgttacaaagaacagacaattgaagattagatctcctgatgaacttcatctggtgactggaacattgtcatcagttcctgaggaggaattgcctagtgaaactacaattcaggtggtccctgaggttcgggctcgcagaggacgtccaaagaaacaggtttcagttttggtaggaaattacgactcttttgtgtttgttcatccactgttaattttattcatcagctttataccacctttaatcccaaaaaaaaaatagtctctttctttatgcataatcgaacttgatttaaatgatttgcttgttcatcagattggttaatttgtgtagtgataaaaaaaaaagtagaattgcagatgctccttttgtcttttttgattccttgaaatcattgggaatatctatttatttcttcctgagggtgacttaattacatgttctcctgtattgagcgagcttgagcttgtttaacattataatttccataattgtgttcaacatgtccaattaatcattacttccgatgtaggtaaccaaaccaaaggaagaagtctttacatccgactctgatgatgatcgggtgaagaaaaagaaaagatctgaaaagcatgatcgtaggaagcatcaaaggatgtggactattacagaggtaaccaagttggtagatggtattgctgaatatggagttggacgatggaccgacatcaaaagatttctttttacaacttctgtgtatcgcacacccatagatctcagggtatgactccagttcccacattttaaatacggtgcttctttcctaacatagtctaaagttgttgatacttgtttttctctgcaggacaaatggcgaaatcttctgagagccagctctgtgcagaaactgaagaagaaagaggtatcattttatttatatacattttcagttctctggttaggcatcatttggaagatttaggaaaattgttcttataatatggttgatacaggctgaagaaaagcagttgcatgctttgcgtccattgccgaagtctctgatacgcagagttcgtgaactggcgaaaattcatccttatccaagggaacgtggtcagaaatcctaaacaaaattagaacacctttacttgaagcaagcagatttgcatactggcagggcggactaggcagttagtgggatgtatttaaatttagttgtaaaaaaaaaaaaatcagtgttcttaattgagtatcttattaacatcaaagttcttggataattccaaatcaaatgttacagaatgagttctaaaattcaaattgtaatagggatggggatggttaactgagttttaagcaaaaatagtattaagtcatttgttatagcagcagcccttgcttatccttatctttgttcttgatgaattttctctaacgattgcatgtgtatacctgcagtttatgccttaaggtgaataaatatgtgacttttaaacaaaaaaaggttacattgcgtaaggtcaactcaccaccctttaaaggtaatatatcctttttcagatctcggaacccatggttattctttcctcggagccttcttatttttttttctttcaaaatgactataggtaaatgcctattggtaaattaaattttcaaaattttataaattttatggggtcgaaaataaaattaaaataattatttattatgtgaattaatcaacatgttataaaatattaaatttttttattgggattgtaaattgaaagttgaaacatataggatgtgtaccaaaataatcattttgaatgtgttgcagattttttgtatatttgattttataatctcattctaggggatccaatttttagttcttaaaacaaaaacatatttgaaattctagaacttctattattgtaagcttgaacaattttaatatagtaactcgtagattaaaacacccccaatttctataaaaaaatttaaaagttgtttggcttcttaacatcaaaaactattttctgttttttaaaactgaaaataatttttaaaaactaatagtcatttgacaaaattgtttaaaaacagttttttaaaaattgagttttgaaaaagtaaaaacagataatatcaatatgttgttttcaattttcaaaaatatattttttttttgtctatattatattttatatttttgctcacatactcggatcttagacccaaaactaaatccgaacccggacatggatagatttatgtcatggtatggtgttaaaatattaatttttttagtaagaaaaaatctaaaaaatagttttaaaaaatttatgccaaacaccattaaatttttataatgaaaaaaaactattttctattctcatttttgaaaacacaattctaaaaattaaaaactgaaaacacggccaaacaagctcttaatctttaacttctttaaaaataaaactcccttttaacttctctaatattatttatttattagttgtcaaaaatgttagttaacaattataaaacactatttatatatacccaataaaaaaagaggaattacttcatatactattttttattttatttttttgaaatttacggtttgggttgctccggtaatttctatgtgagttgctatacggattttagttgcggtttaggtggctccgttagttgctataagggtttctttgtggaatttcataaaaaatcaaaaaaaaaaaa

SEQ ID NO: 224979 - DNA, 6826 bp, Cannabis indica
tgtatatagctgtaaaagaattagatatttagtagatatttagtagatatttagtctcctaactttgtatataaatatgtatattctatgaaatcaacacacaattcgaatcactattttctacaataatgaaagcaaaaatggaaaaggatgagaaggcttctaatgagccaagcattatgtgccaacactatcttgagattgagtaggaaactatttcatctattgtaaaacattgagactcagcaaatggtcttgccaatttattcctttaggctaaggatgattgccattcatttaattacatgctttgttgctgatggggttgtaggcctgtcttcatgtgttgtgtttagcatacatgttgaaatgtgagtgatatttggattgtagaggttggtagggtggctttatttatgttagttgcccttttcctctatggttgtttggtcaggagaattggtggaaggagaggggtgagggaattacttaatggatttgatgtaggatggttatttggcaggaaggatgggaaggagagtggacaaattctcagttttaaccaatttttaattcttctaaaatggagaggttttaggagactagtaacttgttgagtagaatttgattgcatttacaaacttacaaaagtgaaaaaaaaaaacatagtatagtaattgtacatatatggcaaaaagaataaaaagtaactctacgaatatactttctttacttccacctctcttttctaccaagaaaatggagaaggttttgattttgtctcctcctctcataccaaacaggagagatgaatgtttttcttcttctcttccttccctaagaaaaagaactttcatttcttcattaactatcttctctctttcctcccacaggttgtcttaaattactgttttggtggtgtggtgtaaatcttactttttgacttgtgatgattgtatgttttctccactctcttccattgccttccatcctttccctaggatggaagacttagaagagggagatgaatgtttttcttcctctattcctcccctaagaaaaataactttcattctttcattaatatctgctctttcctcccacactgtctttaattactgttttggtggtgtggtgtaaatcgtacttgttgacttgggatgattgtattttctctccactttcttccattgccttccatcctttcccaagtctactaagtacttatacccagcttacatatttaatgtaaaagatgaagctaatagaatttatttgatttgatttctatatgtctggagacattaatgccataattgacctaactcgtaataatgcctcattgaagtcacacacaacctacatttttgatacgactaaaatgttgaacattaaaaaaggctaaagggtgcttggaagttttggtgtattgtgacttgtttaagatgttgctatgtgtttccatatgttataaagatatgttcccaagaagcaatcctcaacctatagcattaaaagcataacttgcaagctttctttagcctcttttcttttatcgtcctctatcattaattcaagctcaatcttttgactaaaaaaataatataaaaatgattacaagaaacaacaacttatgctttgcttcaaagggtagtttcattgaagaaaatttgaaatctaggatgaaaatgaccatgatatcatggccaattaatttcaaataaagtattttgggtttaccattgacatggataattgaggttacatacatatgttccctgttgtccataagaattttggaaatgtcaacaaatatcgtgtgtcctctttgtgaaattttgatattgtgcaaggattattttgatatatttctttttgtagtctactataatttgtactgtagtaatttagtttgaattacctttcactggtgctctaggccctagtttagatgatacgacatcatcttttttgaatacattttttgttctgtaaaagaaaagcattttgctagtatgttataacttgtcaccaatggatttgtgtataaccagtagcatcaaaatttgaatgttttaatagatatttaccaattctagtattcattgcttaaagtcaagtgtctcttctaaccctcatatttgctatgtctcttgtcattctcatatttgctatgtcttatttcattgtcatatagtattaaattaaatatttctctttttatttcatttggaggtatatggtgtttgtgctgaattgtattcagtttgacaaaatgctgaattcttttttgctactggcttattggcgatcgataatttatttgtgttcatttttaatttgtttattgaagctgggccatggggatttttctgctgccaataccaaggtgttgcgtatggtgaatactctgaccgtcgataatgaagcaaaacaaactatagaagcattgcgaactgagctgcaaaagactaaagagaagttacaagcagttgaagagctgaaaagtcagtcaggtataaacactatttctcacacgacaaatcttgtatgtttacttatttctctacttttaagtgatgatgtaaaagaaatttttagaaagctcatgcatatgacctgataatatattctgtagttttgttcagggttgatggttgtttatatttagttttttgggggctttagatgttattgtaagttagtaatttttcaaaattttgtcctaacaaaaagcaatcttttaggttcactattatatcttctcaatcttatataatgaaaattgctgaaattccgttcgctttaaactgctgatgtaattttcttgacacaatgtacataccgtcaatatataatgttaggattccataaacttgaactacggttcattattctttttctctgcagtcctgtcataatattcacggggagaaaattgtgatattacatattctgcaaagtaggaattctttgagacttgaagcttcttttcttgtcccatcatgtattttggattttcttatctttcattgatatacaagagaaattgaatatgttctctagcaattgaatcagctgattggtttggggttttgatctcttgtggatagtttcataagcattctgttttaagtattgtatggtattctggtttgtcagaaaatttgaatgccaggcaactggaaatatagttataattgctttaggatgaaccttatagaatattcattccctttctcgaggatccattctggtgtcaattattaaaatgtagctgtcacttgaacagaatacaaggttggagatgacccttggttcaatggattacctcaactgtatactttaattgggctgaaggagccatatgatagaataacaactgtgtttggaaaagtaattgtctatacttgtcatatgctcagcaatcttttctctttttggtataaaatggggctcgtgatttggtgatcgaatggccacatcatttcaataaattattcttatattgataccaaagagctacgttgcctttttgtttcatgtacccccacacatgaaggaagagtacaatacaattgttgatccatatttttgaagttaatttttgaatttcgtttaaacgtaacaggtgattctgggaaactagtagactcgtacatatctgggaagataatgcagtttaaagaacaaattgcaacgttagaaaagcgtgaagaaaggttacttgctgaaaatgagattcattcttattgtgtcttagtcatctttataatgtaaaagcatgagttatattgtttgaaacattttaattttcttgtccaacagatacaaaactgttttcgctgatagaatttcagtgttcagaagggcctgttgtgaacttttcggttataaggtatgacaaagtgtttgtagttgtgttttaacacatttcaaatgctatggggttcatgtagacaggctttgatagtcttcagcttggcttgtaatgagtctcggaaagttgttgattgtcagtatgctacatttacaagagagtctacgcttcgcttcattaatctaacatttttctcagattgtaatggatgagcaacagcgtcctaatggaattccagtaacacaatttgcactccaatccatttatgctcaaagtgatgaagaaaagcttgaatttgaatatgaatcagggaatacaaatattttggtaagattggatcacactgtataggaatttatgtatttatgtgatagaagtgttatcggtaaaagataaataggcctatttatcttttccagttgatttgaagaaatatattattatgtgctaaaatcctttttccaacaggtaaatggttacacctctcagcctgagatatcgcgtcaggtatggatttcatatattatatacttgttatagctgctaggtaaataaatcttcatcctacatgtacactgcgaatcctcaccagggctgtaaagggtgttcaaaatatttgactaacttttctataacattttatgacatggtgttgaaaacatccattaatcttaaaagtttattttctaccaaatactatctttttagtagcgggagaaatgtggcatgtttggataattaggttatagtaaatgcatcccagtgcacttgctattctgttttcttgtattggaaatgtatttttaaaaggttgtcattttgtcttggatttttccaactttttttttttttaaaaaaaaaaaagtagacagtggacctctacacagcttttctactgagaaggactctgcaaggaggtatttcacaaataacagcacacacacacacacacgagatacacagcacacggatttctcgagtaaattcggatctattattgtttatcatctaattagtacaaagctttgtcttacccttttttagaatatacccacttgattgtggttttgcagatttattatattgatgttcttagtgcttataatttttgtagacttgaatatcatttaaattgctagcaacttcagttttaggtggttgtttatgcctaaacttgaattaactggtttgaacgctgcactgcatcttacaggttgagatctttgttaaaaagatgaattcaattccagctttcactgccaacttgacagtggaatctttcaacagacgaacattgtcctaaatgtctcaacttgcccaaattatgtataaatcttatattgtctctactctagtacagatgaaccaagattgtgggttacttgcatctttatcatcctagaaccctctgatcctcatttacacacttttgacttgggtgtaacactcgtgctagatatccaattccctttacttcttgggaactggattctcactaaatgatggtttgtgatttttctttcaaaatttacagcacaatgtaagccaccaaacattgtaaagctactatactaaagtctcaatcttactcgagcttgaaggtagaatacattgttaaatggaagtattatcttattatgactacattccatttcatgaaaaagtgagtgggtgattgtatggttcgccagtgggtttaacaattatgatgcagaggggctaagacactattattcatgcaatctattgatgaaacttatgattttagagactatattgcaaggtccagtcccaacaccacaacatgtccgagacatgtctcattagtaacagacatgatttgacaataaacaatagaaatcgtagaacagtctctgagtggatgtctttttggctgaagtggtggctttattccttcccttttgactttaatggcatatgtttcatcgagtttcattaaatctactggtagaagtaggcgcttgctacgtacgtagcctttattttatggtaacccttaaaggattacagttttacgtggttttccctacaggatgacaacttttaagctatgcacttataattaatcaataatcaacaatatacattggttggatccattgaatatccgatgtgagagtagacataaatctcctcagcatcctacaaccaactctttagtccttggggcccttaaaaagtgcttatattggaacatataccttagcaaatagtttggcctttacttttgaaggtgtggttgaagctttcatatttgcttacataggaataagatgattactcaactccatcaactctgagtagacttcattaatttatttattgtcataatggttgatagattatttgttacttttctctcgctgacataagttgtgtgtcacttgccaatcctctggatcatgcccggaagttctaagagaatatttctttgcaaataatctttaagcttaaatgcattttcagcaaaataacataattgacatttgagctcagatcttttgagagaaatgttaaatggcaccacactataatattgtattttttatcactcataaaaatatgtaatatcgagattgatttcataggcaaatatattgtgtattattataagtatagatctaaataaaatctttgttgattaaaagagaatgttaatttcatgtttgacttctttaatgtgacaaaaatattttataatttattaattaatttgagctgagttgtttatttggtttttatattttgtgtatttgacttttacatttttgtattaattatttgcagccactctaaaattctgaggacatgcaaaaaatgataatagatctcgtcattagttaatatttagttaataaataataaaatgaaatataaatgcttatcgtttattagtgaagaatgaaccttatgataaagaagaaa

SEQ ID NO: 224980 - DNA, 3846 bp, Cannabis indica
aaataactagttaaatttagtagaatggtggtttagcagcatctttctattctagtggtcataagtttgatcctaattcgaatcttatactttatttaattatttaataaataaaatatagatacacataagaaaaaataggcaaaaaaattaaaaacatggtgtctcatgtaaatttaaagtatcttaaccaagtgttctatttaattcctatgtatatatgaaaataataattgcatattaatatatttttaaatctcagagtgggctttagccgtccattcaacacccttccgcctatgagtatacttggagttcatataataatacaagtcaacaatgagctatagccctatggacctttagttgaaagttcactctccattgcaaaaattggaaaagaccctttagacaagcgactcatagatactcaatttcatggagaatttggaggccctcgggggactagatgcttgaaatatcacttacctctaggtgcccccaatatttctttcattaatgtataagtacaagagcatatatctttcgcagttaattggcgtgaaaatagaatcagaatatttaaataatattattttgtgagacatatttgaagtataaaattatcattgtatatttaattttaaaaataaaaataaaaataaataaaagtctttacacattctttggaaatttgttaggtaaatattcaatttcttttatcttttattaaatcaaattgtctcttttttaaggtgaagttctctctctttttaatgatagtaaacaaatataaaaacaacaatatataagaataactatattaccactaatttcttttatcctttatttacccattattattattattattattatttaataattagtactagattgtaactttattggtagccttaagaagaaaagagttacaaccctaacaaagttgcagtgattttgctgtcaaaattattacttaaaataagtaactaatcgaatgagatatgtaattatgccaaaaaaatttcatatataaatttgtaaagtgtaacttaaattcaattttttttttttttttttttttgtaataagtaaataaaatcaatgggaagtatggtatatagttatttattttggcttttcttttcttctgaaaactataaagattgctcattggaatttggaactgcgtaaatcaacatcaaaaaggatacttttccacttttatttttaccatctagggaaaactctcgtgtcagtgatatttacataagtgtgaaaatacaaatcaaaaacaaaaacaaaaaaaaaatagtacataattcctaaaaatctttaactgaaaagaaataaaaggaagagaagaaaaatatataacacaatggaaatggaatcatttcatttgttctcaacatttgttttgggcttcttcactatcaacactggacatttcacattctgggcacaatggttgctcacactaccaagaaaagccctgcaaattaatcccccaaaaacattcaatcctttttttaaaaaattcagttattcaaaaataaaaaagaatcaacatctttaatattaatgaattgagttatatatttaacattcaaattttttttaaaaaaaatgaacaaaatatttaagaagatgagatttataataatgaccttttaagaataccataaccatggcttcccatgaccaacacgtcagcaccaattttctccaccacctcgcaaatgacatcccttggatcaccacactctattcttgactctaccttaacctataccacaatccaaactcaatacaaaatttaaaatgatataaagaattgttaataggtaacattagtgctccacttataggatctccaatggtaggctttatatctctacatcatttaaaatataatattttattttatttttattccatattatttttggcacctttacttctaaaaacactctaatagtataatattttttaaatatgctataattatgatatcacacattattagatatataattttttttctttattaaactattatatatatattgcacttttaattttttattgtataaaaaaaatataacatcaatgccattgtgtagcatcaatgcaaattttaagaatatcattcttttatttccaatgctataacatccctatattttgctaagcattcttcaaaatattaccattggagatgcttttattgtgatattaatattagtgtaattaagtagcgaattttatataattttaaaatataaataacttttaaatacgtgcacctaataataatgattatagagagttttgttaattttattaggaaaaattggacaattaatttaagttaattttattttaataataagattagattagatgattggaaatgacatttttaaccctattataacaactcttaactaaactcacatcctgaagatctgtgcacgttctcttagctttctcgatgacgcagtctgccacgtcattgccgtatctagccatagcagccattatatcacttgaaaacaaataccctgtaaccatgcataaaattactaaaatgccactaaaccaacgatactatgaaattaccagactaaccctcctcctcacctgtgccgtctagagccgtataaacggttcgtgggggcttggcgtagagtaagataagggtatctttggaattatcagtgatcacgttcttcagacaccacgacagcgcgtacgcactctcctcaccttcatcgacggccaccaggatttttcgctccttcgttggtatttcagccattgatcttctctgatctctaatccgagggctacaatttttttgagaattattgttttcttttctgttgaagtaaatattaaatatgtaagaagaaatgttatgaaatgagtatttatagtgtgtgttgctggtaattggggttttggtgttttttcttttaatttgttttattgattatttttattatgattttctgttggcggttttgtgggttttgggctttcttgtttgatggttttccaagacagtgggcccattatttatcttattaatttttttttttttattaatttagatttttgtctttcaaattttaaattttgacaaatagtaaatgatattttttgaatttttaagatcgtcaaaaatattatctgaactattgagattattaaatttaagaattttaatataattttaataaaaaatttaatatggataaaaattcaggggcataatttagtatatgtcaaagttcgagagacataatttgataaatatcaaagtctggagaacatgatttagtacataaacaataactgaaatagtaaaattgaataaaattagacaaaatttcttataacaatttcaataattcaaggaaatttttaacggctcaaaaagttaaaaaaaaaaaacatgatttggttatctatgatattataataacactattatttcacaattatcttagagcttgtctcttctgccactgacacgtggcaccttcttatggtcgttgtgaatttacaattggcttttaataatttatccaaatttgcattctcttttgaaaagatgcgttatttatttgagaaaataatattatcttggtttattttattttatttatttttgctttattcttttccttattataatggaggaaattgacaagcactacttcatcataacgttaaaccatcttgatggtaaaaaatatactaaattttatatatatatatatattttgtaattatattctgataaaataatataaaaataattatcaaataaat

SEQ ID NO: 224981 - DNA, 3339 bp, Cannabis indica
atgcattcgatcgggaggataacttttggcagctgtacagcgactttttacctggcacagatgagtgcaccagtcttctcctagcttcagaggtatttaaacgaacaatttatgaaactgctgcaacatttgagattgtgatagttttctgatccctgtaatgggcttgcttaactttatagtaagaaatttcgatgtagtagttagatttcatgatacatgtcctttctttgaatacatatgcggtaaagagacaaacaaacagtttaatttgaagacatacatgcataaacaagcatatttgtgtatgtatatgtcacgtcatcaaatgcataactttacatgttatttatttaagctcgtatttggtgatattaggctcccagtagtataacattaatgtgatgttcttttaggcaaatgtaaggcctagcctttacattttaatttaacattggacattagaaccttgcattttttatgatatttgtggttgttatataacagttctttgaagagaagaaccattatttgctcaactgcttgtaattatagtcatctatgtgtaatatcataatcgactccattttaatcttgacagtttcaaatcatgtacttttcatttggcttggagggtgtttaaagtctaatcctccttttagtacttcatactttacattagttgggctgcacatgctaattgtatatacaaatacaatagtaaagttgttcagtagccttgatatttgtaatccatattgcccttcatttactacaggaggagcttttggagctgcaagatgctgatcttgcatcaactataagagagcagcaacgaagggctttagaattttgggaaaagaattgggtacttaaattaccctctattttctattaatggttacaggagtttgttttttttttctctttctctctctacataatagcactattgaacactgtaatgacatgttattttatgcatgttggacctcaattagcacaacggtgtaccccttaaaattaagcgacttgctagagaacatgagagattcatttgggctgtaagcattgcacaatcaagatgcataaacatgcaaatgaggattggggcactggttcaagatgcaaatatgctaataccatatgccggtaaagttttatcctcatagattttggcaattatattgactgattgtaattcaattatatgacattctactctttattgcatttgtcaccacaacttcataacttaatgaattaattattccataaagtgtttggtgcattaaatgatagaattctgtagcattttgataggttcaatagatactggcacacacacacaaacacccctaaacaattatctatcaaaaaattaacgttttacatctaggaatgacaaagacgactaccagcccaaactcgagggcaatagctctgaaacatatgcctctcaccaacttcgtgacagttctttagtttaccacctttctatcttgataatccaaactactgtcctaattacctattttctcattcatattctactatggatcattgattctagagcttctgatcatatgactttcgtttatccaattttcatacgtattcaccattttctaggtccaataaaattggaatctctaaattagcatgcaatcttttctttgcaagttaactagatttagtcaacctatctactatagctacctaatatagtaatattatgtatagcccaatttaatactgttttgaggacaactatatgcaagcatagctaagtgtaatggtattaatttcaatttttccacggatggagtgaggatcaatctctacattatgggattcttggcaatgctcatagcagcttcaatgtcacaaaatttattaataggactgtcataattagcactgagctctcttagtaacttttgtatccacatcccttctcatgtatcatgtgctagagttcatatgtacttagtgtgacaacaatttgcttcttacttcgccacatcactacttttctccattcaaaagaacaatatcttgaggtagacttgtgacttatacacttagatataggtccaataagcgtatatgaacatttcgattgctttcttagataataacctgaatagccatcctcttccttgatctcattttaaatacctcaagactcgatatatagctttaagatgttcctcatgtggatgtcacagactaactgataatacactaatagctaatatctgggtgagtgtcagcaagattgattaattttttctactagtcactaataactgcctttatctatagtcaaattgtcattcttcattcccattttagagttttgatccattggaatgacagcaagcttacagtcaagcatagcttattgaaattagaattcctttacttgacctagtcattgccatatgtcataggctcacaatttcaggcagcgaaatttccgtgcagcatcttgacttctctaagcgaaggtcagcctttcaaccatccgagtgacaatggactcatttttcgtgcgaccgtgcgcctcgtgcacacttctgtcccttgaacaactcccgtcgagttatgctcgcaagcatccatgagtgcattcatgcatcgaggctccctagccaagatactcgcattgtccataagttcgcactatggtaaagcaaatcccaacatcgtcgctcacctagtcactcatgaccaaggtaacctgtgtggccagatgtcaacaacaagctgacgtgccagcacctctagccatgactcattcgatactgtctgaacagtctccctcatggctcaaggactcccatacatccatggtccaatccttaaggcaccatgcctccacgcatgtcggcaggccctcgagacaagccaccaaaatcgtagcataagtcagacctctttctctttctagcatggtgcatctgtgccacgctcgtatgtaaactagcccacgaatgactaccaacgtcatctcgtgttgagacctgtgaccaaggcacaccacgaacatctttcgaaggtgttcacattgtattatatataccatttgtatatactaaaatagatattagaaaataaaaaatatttttcctcatttgcttcaccaagggttatgctcaaacctatggcgtggactattgtgataccttttctcctgttgctaaactctcgactgtgcatttccatggcagttactcatcattagcctttgcataagattgatattaaaatacttttctttatggagattttaaggaagaattgtatatgaagcaacctcctgggtttgttgct

SEQ ID NO: 224982 - DNA, 4679 bp, Cannabis indica
aaatgagtgtcaaggtacgtttttacttttcaactctaaatacccctagatcaatctcagccgtcagatcaaataagtacctcatctgacagctgccgtacatcacagaatgcattccgtgaaagtacaatcacgggacaaaatcatattcttatatttgtattctatagtaatactcttttgtcctggtggcagtagttgctcttgtttttgttttttctttactgtgaagaggtttcgagactattagaatgtggtggtaactttaaagaataggagatcaagtttacacggaggttgtagttgtagagctaggattggaactgcggtattatataatacatcttagttgttatatatattgtaatgattttgaagataaaaaatcccaaactaaagtgaatggtgaacttaatctaacaaccatattttagtttcactaaattagaaaattggattaacttaaaacatttaaaataaataaataaataatagaatatcccagaaaaagaaaagtgaagaaatagggaggcaggcccacaagtacaacccccacccactactatctcatctaattatgctacatacatacatgcaagggtttgtttggaatattttggcgtcacctccaattccaatccccgtcgcttgcggaggctccgaaacgcgtctccatttgttgtcgctggaccaccgaccccacccacatgaccttccaccgccacgtgactccacgaatattcttccccccttgttcgacggcgaatattccacgctggcctccacgtgtcacctctaatatgctccttctccttctcccatttccaaactccatgctactctcatctatatgtgaagttgtgaacctctcctccattgggtgggtgggtcccatgctgttgcctcagattcgtcgccgaggttctctctacatgttcctgcaactaaaatatgtacatcttgtctctaaataaagtcaaatcactaaaacaaaatttaactaaataataataataataataattgctttgtttatattattttcctcaatgaaacccaacaatgagcattaatgtttcgtcaactttgcctttttttcacgtctaagtgtcatgttttctggttttgtgttttttcttaaaagggaatctcaaatgttgtttggtgtgaattacacgtccttattccttttaggcctacagttttggggacccttcgaaaagaaaagctaaatgcatgcccagaagaatctaatcccaattccattcataagaaaaggttggattgattgatctatagactataggctagatactatactactagactatagagaacaacagcctctgtgtgttctgctctcctttctttgtttttcttgaagaattctgctctcctctgttaggctacctagaaagtttatttttgagtgggagaaacataatggagagaagttttgggtacgaaaacgggattgtgatgacaagagacccaaaaccgaggctgagatggacggctgatcttcatgatcgatttgttgacgccgttactaaacttggtggccctgaaagtatgtatcacaactaaccactgctttccgttcttttttttctcctccaagaattgtataacttcctaaaagttcttgctctagtttgtttgattaactgaattgtcacattagttgttaattatcaattattgatattgaggtgtacatatgtaatgctctctaagttattttgtgtttatttcagaagcaactccgaaagctgtgttaaggctaatgggattaaaaggtctgacattataccatttgaaaagccatttacaggtaaatattctttatttatttttgttttgttagatgttttgattctggaaaaatatgatttcatttttgttgaagtgaataaattgtggattttgcagaagtatagacttgggcagcagactcggaaacagaatttagtagaacacagcaaagaaagtaatggtgagtcaccattttttaaacataacaaagtattctttttcctttcatttttgtagaagccaaaaaggttgttactttaattaattttgccaccctgttatatacttatattaattagatattattactttaattctacttattttaggctgttcatatgtgcaatttggtagtcattcctcagtgactagcacaacttcatcaagagatgacaaagaacaacggtaggcctaatcatcaacttttttttttctttttgcattatgattttagcctagtcaattatcactaaagtaggatttataactacctaatacttctcacttatggtactatgaaatgtggaaatatcaattttattttgcatataaaagtataatgtaaagcacgatcaagacaaaaaatactagtgtttactaaaaatcacttacaaatttgctaagaaacttattcctatgaataattataattattattacttaatttattgtcagagataaatttggccatacatgcatgggctttcatcactacattaaaccagcttaatcttacaatcgactctttttattgttgcttgattatcttcttcgaaattttgtgatactaattactgtttttataaaacagtgacatcccaattacagaagcacttaaacatcagaatgaagtacaaaagagattagaagagcagctggaggtaaataaatatactaattactttgcatacaagatgtatgtaccaaatataattaaaaaaaactatatagcagtagtatgtgtatatttattgagtattgctataaggcactctggtatgctaacattttaggacagtacatgtaattatttgtgcaattcagtagcacatctcgtatgttttaatttgaacctaataaaaattcaaatgtatgagacgcaatatttatttgcacaattataggtgtggtaaaattcaaatgtgctattttgaaaccataactcttcccaatttaacattttttttttaccaataggttcagaagaaactacagatgagaatagaagcccaaggaaagtacttacaagccatactagagaaagctcaaaagagcctctcccttgatatgaatgggcccggtaacatagaggtggccaaagcccaattaacagactttaacttggctctatcaaacttcatggagaacatgactgaagtggaggaaaaagcaagcataattgatcaaatgggtggcgtttatagaaaacaaaatgattcaagcttcaagatttaccaagagagtaacagagaagactctgaagatagtaagctcaaagataccaataccatacattttgacttaaacaccaaaggtgggtatgattttgtaggtgctaatagccttgaatttgaacccaaaatgctttcttatggaagatagtaactattttttatggaaaagtattacccccagtgtagatgcttcttattattttatttttggtcaagttacttgctattacattttcttactccagctttgtggttagataaattatatacgtaatatatttttcaatgtcaatcaaaataactatcttgttattggaaaactcccaactccaatttcttaccaaaggtttgaataggtcacattgaccatactaatacattattgatgttacattcaattactaatttggcattaataattactttgtttattacatacgaaagatgaatcgtgcaatacgttgtgaattgtgttatatccgaaagggtcgacttgaagtgatatatatgaacgatcatggtaggaatattattagcctatgctttcttatctgactccaccttctaaatgtcaagcagagttatttttggtaataaaaatgaaacaatttctctctttctttcccttcttataatcttcacacttaagtaagaccgtacccttatttttctttgtgagactatttgtaaaagtgacagagttaattatgttaaaagaatgttgggctttgagggttgttatgtggtggaggcccgtggtcatagtggtgggcttgctatgttatggaagaaagaagatgaaggaaagttgctaagctttagcaataaccatattgatttggaggtgaaaatggatggttatcctacatttcgagctacaggtttttatggtgagcctcaaagaagcttgcggggtaactcgtggagattaatcagagatcttttaggtgagtcaactcttccttggtgcttgtttggtgatttaaacaacacgctaaaccatggtgataaaaggggagggagaccatatccgaactggctcctcacgggctttcaagatgtggttactgagtgtcatcttattgatatggatttgaggggctatccgttcacttgggagaaagggaagggtactgataattgggttgaagttcgtttggatcgggctttaatttctcaagagtggcaagtgttgtttccttcggcttcattacataatttggaggtctcggtttcggatcattgtcctatttggattgaccttgctgtaagtaaacatgtcccaactcaaaagaagttccggttcgaaaatgcatggtctcgggagcctatgtgtcgtatgattgttcaagctaattgggatatggagccgcatgagtctttggataagaaattgagctcttgtagcac

SEQ ID NO: 224983 - DNA, 10251 bp, Cannabis indica
ttatatgtgtttatttcattattctagaatttatattaggatgttaatgaaacatacttggtagtaaatctagatcctggtaaattatttccaacacttattacctggttaactcataatataaatataaactgtaattattaattattaagcttattgggatattacaattctgttgatgggcctactgttatggatgaagaaggaatgattgttgatgatattgggtccgatagtaaagaaaaataagtggacccaattttttatattggaccaaaagagtcaacaatttagttcaaaaaaaaattttgaatgtggcaatggctctcttttgggttgaaagaatgaacaaaagggtgctggacttttaaaaaacttgatccaagcgggccaacaatttggggctcgcttataattatgagttgtctaagttagaattgtcatggacttgggatcccaatgacactacaatttcttaaggagatgatttctcaaaagcagccaaaattcgtctctctttctgaaactgcaataaggatcgtgttgaatgggtgaggaatgtttgaaattcaaaggtgcttttctgttgaagctcaacggagaagggggggactggctatgctctggaacactaaagaggaggttgaggtaattagcttctctacaaatcatattgatttaattactagagttcctagtttgattgagtggcagttaactggtgtctatggcgaacctaaacgctcacttcgtgctcatacctgggatttatttcaaagcttgaagtaggactcttctttaccatggtgtttgttgggtgattttaataacatggtgtcacaagctgataagcggagtggtagaccctatccttctttgcttgttgaaggcttccaaaagactctctcggattgcaatcttgtggatatagatctctatgggcatcaattcacctgggaacgaggtcgtggtactgatcgatgggttaaggtaagattggactaaggcatggcttctgttgcatggtgtaatgtctttagtttagcaaaataatttaatcttgattactcatcttcttagcatagtgctctattttcggatcttgttactcaagtctctttctccggcctaattttttttttcattttgaaatgcgtggttgtctgaacctatgtattttcaacttggtaaagacagctaagaatccaagctaggaagttctgttaaataaaagtggcttattgtggagaaattgtagctaagtggcgggatataattactggagattttaaaggtagaatcgctcaatcaaaatctacattctaaaggcttagaaagctaagggatgctcactcgtgttcactattttggaggaaaaaaagaagctggccaatatcttccatcaaaaggaggtgtattagagacaaagatcaaagtaactgtggcttaaagatggtgatcaaaacagtaagtattttcatgcttctgcaacagctagaagaaagaaaaattccattcaaaagcttcaagatgatcaagggaactcgaccaattggaataatggcttgaatcagcttctttcgttgattggcatgagattgttgattggatcacaccctctattactcaatctcagaacagtgccttattggaaccgatttctatggaagaagttaagggagctttatttggtatgcatcctgacaaagctcctggacctaatggtatgacccttgctttttaccaaatattctagtccgttgttggaacagatattgtttttgtggttcaagattttttaatctccaccttcattcccaaggggctcaatgatactaatcatgttctcaggaaaagaaatccttctgttatgggagatctcagacctattcctctctgcaacattctttataagattatcttcaaggtgttagctaatagattgaagggccttcttgaccatgttatctcccccttccaaaatgctttcattcttgggaaattgatctcaaataatgttttggtgtcttttgaagttttacataatttgaaaaggaataataaagggggaaaaggttttatggcccttaaattagacatgatcaaagcgtatgatagaatcgagtgggacttagctatgctttaaggatgggattccatcatattgggttgttttaatcataagcagtgtgtcttctgtcaattataatgttgttcatagatgatagaggatcggtccaatcattcctttgcgtgacattagacaaggtgatccgttgtccccttatttgttcatcttgtgtgctgaaggccttttgtctcttattcggagttttgagcaaagaaagtggatttatggctgtaagattgcccgtggtgtcccctcagtctcccatattcctttcgtagacgatagctatctttattgacaagcctcggaggatgaagcttcttgtgtgatgtctcttctgcataaatttgaaactgcctcaggtcaagagatgaatttggaaaaatctttgatatttttttagtaataatattgaggcttccttggttagagaattatgtcaattataggtatggtccaagctcatgagcatagcaagtacttgtgtcttctgagactatgggtcaaaataagattgttgttttgggcttccttaaagaaaaggtgaggaaaagagtggaaggttgggatggaaaatgctctctcgagcaggaaaataaattcttattaaatttgtggttcaagcgctcccaaattacgacatgagtgtgttccttttacctatcaaatgatgtcatgaaatggaaaaaaaaatttatcgaagtatttgtaaagttcttcttatagacaggtgagtggcattattttggaaagtagggataggattgtggctcataaacatgctggagggatgggttttcgtaacttaaatgatcacaaccttactatgttgggaaagcaagcatggagactcttgactaatgaaaaatccttggttggaaagatttttaaagcaagatattatctcaatggttcatatattactgcttctcttgggcagaacccaagctttgtgttgcacagtatttttgaagctcaatctctaatcaaaactgggtgtcattgatgtattgcagacggtagtttggtgaatgttcttgatcaagcttggcttcctcatgctaataacccatttatctcttcagaccatccgacgttggatggaatttatgttcagcgactgatgttttcaggaaggagagtttgggatgatgacatcttggattagcttttaaatgctcgggataaagagcttgttcaagctattaccttaagtgaatgagtggacaaggattctaggtactggattcatgaagcttcgggccactatattgtcaaaattgcttacaaagctatgaaagtatcaatggtcattggtctgaaaatgataactctagtttgtggaggaatttatggaacctaaaaattccatcaaaagttttgaatattgtgtggagatcttgttgtgatagccttccaactcaagcaaagctgcttgagaaacgggttgatgtcccattgctttgtcccttttgtcaagctacacctgagaccgtgacacatttgttggtggattgtgcttttgcaagaatgtgttggactcttgttctgtatgatattaaagctgcagaaatgtgttttgtcaactggtttgtatctattttgcagtcttttccttcagctgttatatgtcatcttgccatgatttgttggggcatttggagagcaagaaatgacctggttttgaacaataagaaatctcttgctactgttgttgtgtcttcgactcatgcttattttaagcaatggaaattagctaatgttcgaccacaagatgataactctattgtgaatggagttgttgaaaagtattggagcgtacccaatgaggatacgattaaaatcaatgttgatgcctcggttttcacttcagcaagtttttttaggatcggctggattgcacgggatcatttgggctccctcatttatgttgctgctattcgcaaacaaggtcgggttgatccagtttgtgctgaggccgtaggcttgaaggagggttatagttggataaaaacttaaaattttcaataggttgttgtggaatccgattgtcaagttgtacttaatttcctccatagcaattctaatatgccttccctttttggttctattgtggcgaattgtaagtttctttgccaagttttacctcaagttttttgtatttttgtcaaacgttctgcaaataaggtggccaattatttggctcgctctggttatttttccccaactcgtagttataatgggggcttgtccttattgattcgcctgattttcattaataaagtttacaaacttcctttaaaaaaaacaaagttaaaatattaaaagataataaatattgggcaacatcacgtgtagcttagttgccaatattacaataattgaacgttatatattaatcaattcattaggatatgaattataacgcaaaaggtaaacttaattagtcaaacaagtagagatgatgatattgaatctttgtacatatcataccaaaatggatgatgtgtcaaatttaaagtatagtgaccaggaaatgagtcattttctttatggtgagacgtgagcattttattcattcccaccttaaatctttacacttatatatatatataaatcgcatttggtgagtttagttgatagtagctcattaccaatgtcgaaaattccatgcttatagcgctgccaaaatcaacaatcaaactataaaacattcatttgagagaaactatttagtacagtttagtacttaaaccaattcccattggtgagactagcatttttacaattttttttgtttttgaataacatttttattatttattctcttttttttatagagaaaatgaatcaaaaattggcctttaacattttttatccagggtttagattgtttactctaattctcgtaatatgtttggtgcctataaatgatagtgagtgtctaaaacttctattgtttaatttgtttaaaatgcttatatttctaataatgctctaccaaatagctcacagtactaatatatttttatccttaagaggttccagcatctattctcatacatatgaactagcttatctaaatcttaactacgaattgagtcgtgcccaattagcattgatagatgtaccaagcgccaattgttatcatttagcattgcaagatgtaagtataggtaaaatatgtttttcatttcaaaaataatttagaaactatgggttaagtttggtaatacttttatttttttaattttttaatgaataaagtaaaagtagactttttattttttaaaattatatttttgaaattcaaaaatatggtatgtaactatttttatttttaatattaaaaaaaagaaaataaaagtttgttttgtaaattttattttggtattttgtttttatttaagtcaagtcttgtgtctgaggctggggtccatagttggggccgagtctagagaaagggctagggcgagggttcaggttcagattcagttcgagtttggattcggggctcgcatttaacttcaaggtcatggttcgggtcccgttccgtgtccgagtctatggtccagggaccgggacgggagtggagtccatgacctagtttgggtctaggttaggggttcaagtcttggtccgggtctgggatccggggctgtagactaggtccaagtatgtggtctagatttgggttcgggtcaagatccatgtccgagtccaagttcgagtctgggtttgggtccaggtaagttatcatttttatctttcatggttcacatgttattttcttgattataaattcaatatataaattctactaaatttcaaacatatagttactcatgattatagtgttttttacacgtgaaaaataatcatgatttaatcatgattatattgttcaaactatttagactcaggatttatcattgcacaaaatttatattgacatgataattagtgatgttgtttaattacacttggataagtagaatgtagttttttagggcattagcaaagtcaacttgcatcagatgtgtcggtgatatatcgaattagactgatattgacactgaaaaagatttaataaactgacagtcaaatcttttttaattaaagctcacttagttaatctttgattaattgatctctatcctgagatggttaaccattagcttaattatactatacgggttcttaggcttgttcgttactagtttacacgtaggactagccaatacatacatgttgggaatttgatagtgcaattgagtgggagtgttaatcataaatatagaatctatagcttcaataaatgttttgaagtgaaatgatggttcccttagaacttggctaaaagatatagatggaagagctcttatttttgtatatatatagttcaccaaaatatttttttttggcatagaaatctggccaacactcggttgctagactggtgataggagtaataagtttcagtaaagtaagtagagagacacaagaaatttatagtagttcactccccgtgtcacgatggtgatggagctacgtgtacttcgagtttttatttcacaagaattaccagaaaactagcaaagccaagacctccaatttctagagagaaaatagagagagaagctctgatcttatggggaactagaagaatgtgaaaaatgaactagaggagctctcctttttaagggaacgaggtcttattaaaatattaataaaataatttaaaaaatatgaaaaaatcactttgggttgatcttgaccattaatgatgatctaacagtgaaaaatttacttttgataaaattctccaatttatagagttttgctcgttggattattttcgggtattctttgaaaaaaaaaattgtaattatcttggacatgaattttaaatttgaaatattcataattgcaatatgagatatgacttgatagaattttgaaatagcttcgaaacacaagttgaatcgtgtcactcagatcaatattgagtgtaacaccttaatgattaggcatgctatagtgactttttaattacaatacacacctttgccaataaaaggattttatcaaaaattgtgacaaatttaaacttatgaaaacattatacttttataatcataactatatatactcttacaaaagggttgcgatcccatttttaaacttatttatacaactaaaataaactttataaacatgttgcacaacgactacaaaatgaaacccaagtcgtttcgagacgaaactttctaggttgttccttctgaacatgtacaatcatccccgagctctagactcattgctgctcagccttatccattcctttacatacacatgcaagcaataactgagtcacgaacacagtaagaaaaccatataacaaacaatatattgtcgacttatattaaggcacccatacacttatccacaaggcttaacagatgattaagaatgttcttaatgaaggtacgtatgacctcttcaccacatgcacacatatcgctactgtactagtgttggtagggtttgaaccttatcccgagtaccactaagtgttgtaccacatgcactacataccaaactctactagttttcgtaacactgggttgtactcttaaatatcataggctgtaccacatgcactcagtaccgttaatgtactagtgttggtagcatatgaatcatataataccatgtatataaaatacatacacacatacgtatataatgctagtcttacctcatttttgaatttaagcgtgtcggtcgatctgaatggaaaatcacacgctaaacggaggccctatgtcacaatcacataaaatgataaacaaccttttaaaacctttttagggatctaaactcaaaattataggtttttctatcattaaatagcatggcttagccttatgtatcgaggaaacatgaagaaaaaaaaaataatgaaatagggaaactacctaaaaaatagcaggtcgtttcaataaaaatggcaggccctttctgggtgtgcaccagtaaaaatggtaggaagtttttgcgaaaacggactgctgtttttcactgcagaaaaacaacaactcaaaaaaccaccccaattcaagctcaaaccttaccacaagctctagaatacatattcacatcataataaactatttccaagtgacaaaactagaaatatctcaatgttacacaatttaccattattgaaccaagtttgagttgttgaactcaaattgctcaactcaagaatcaaccatcaaaataacctcaaacaagcctaaacaacctcaaatataactcagaaaataactcaagaccagctagggttcagacaaaacctatctctaaatcttgcatgttcaaactaaaaagaagtcttcaaaattaaaggaaccaagttctaggactttaccttggctcttggctaactaatctccttcaattctttgctatattttgctaggattatatgaattaaggtttggctcctttaggtttggggtgagaccgagaaagagagagatgaggtgagagagaggttgataactttgatttttcttttaatgcttatccttaacataatattattttattctaatataattatcaacctaaaacaataagattagtttaggaagtctacttaaaaaagactaaatcttaccaattggagaaattccaattttacacctttgcttcacaaataagcaaattctaggtctacgggtaaaatggtataaaaccataaccccgcctaacttcaatattccaattatcaacatatggatgccctactaactaaaaagattctaaactaacccttgtgattaatcggtcatctgtcgcattttgcatcgtcaccgagcgaaaattataaaaatagtaaattttgcatatagcataaataatacaatcaaagtttaataaaatcttcaaaatttaaaaattataactgtaatgcccattttttaaaatgggagccacaataaatataaaatgatgtataatcatataatgttaataattaatgctaattgtcttttctaatccataatctaatcatgtagtcattacaattatcccccgtataaaaggattttgtcctcgaaatctaactgggaattttttggattttgagtcctcatgatggactctatctcctagatggcttcctccagctttctattcctctagagtagtttgaccaaagctatggtcttgttgtgtagaacattttccttcctatcaaggatttgaattggatgttcctcataggacaaatctgattgtagttctagggtttcgtagctcaagatatgagtcgggtgtaacacatatttcctaaatattgaaatatgaaatacattttgtacaaccaataatgcttgtggtaaggctagccaataagctgcctgcctgactttctcgagtatctcgaatggccctatgaacctatggcttaacttgcccttcttcccaaagcgccttttattggtgaatcctgcaggaacatggtctcctacatgaaattcaatatctttgcatttaggatttgagtaacttttctttctgctttacaaagcaagcatctgagccttgatcttgcttattgcttcatttgtctgctctcaggacccaaatactttctttccccaatcgcatcccagtgaaccagggaacgacatttcttaccgtacaacatttcatacggcgccatccctattgtactttgataactattattgtaggaaaattctatcaaaggcaagtatttgctccatgaaccctcaaagtccataacacaagctcgtaataaatcttccactatctgtattgtcctctcggactgtccatcggtctgagggggaaaaagttacgctaaactttagctttgtacccatagctttctaaagactcacccaaaattttgatgtaaatttcggatctctctctaaaacgatagattttagagccccatgaagatgtactattgcttttacatatagctccgcatactaatcaacggtaaaagtttttttcattggcaaaaagtgtgttgactttatgaaacggtccactataacccatactaaatc

SEQ ID NO: 224984 - DNA, 4628 bp, Cannabis indica
gtgattcctgaagaaatataaagtttgataatattatctccataaaaaggagagaatggtcatctacctttctctcgtgtgtggtctttctttcctttcctttctctttctcagttctctctaccgggtttttgtgagtttgtttgtagagttttgggtgtgtgggttgagtgttgtgtggggtggctagtctagttctcaggggttgtttctgtagtgtttggtgtgggtttgggagtgttttcttctgtccttttgtctttttgacgtttgcctttgttcttctcttttctttagtgtcttttgctttgtgcttttgttgggtgagtgggtgtctgttttgtctcttttgtctttactgttggtgttgaggttggtgggattttatcatttatggagatggttggtaagaaggttgactccacttggggaaaatgcttttctgttagtaaaccaaaaccggtcacttggcataagtggattcgggtgcaggtggagattgatatcaacaaacttttgttttgtggatgtttcttcaagctcttgaatggtgtgaatagctgggtgcaaatcaagtatgagaatattggccatttttgctatttttgtggctgcttgggtcatcataggagtgaatgtaacttgggttccccggttatgattttggatgatcaaggaggtatttttcccctgtttggcccttggatgaactttggttcttcgtacgccaactgtttctacggcaaccgtctccggttgcgatcccgtgctactgcgaaagggtggcgggataagcgggtgaataggattagagttggacgaccgaaggagcccactgttccttctactccaatgtctgtggagtgcgacggagtggatgtggccagaggtacgttggaccgtgaatcgggtttagctcctcctccgagagctggcgtttctcagaggcccagaacgggcagattttggcttcccaagacgatgtcgacggagaagggtggttgttcggggttttttcatggtgcaggtataaaagaaaaaagacaactactgggaaaagtctctgttactgatagtttgcctgatatagagggtaatttgaatttaagggtgagtagagacttttgtggaggtgcggttatcgagggagtgtttgaaaagtcaaacctggttgttttggagcctccatttgtcactttggccaatgattcaagttatgggtcaattgggcctatgggccgtgagatacatgggaaggatttttgtgcccagcatacttttaatgggaaaagagttgggtttatttatcctggaggtaatatgtcttcggcccaaaatggtttaaaccatttggaaactaatttaacctctgggccgatttgtgatcactcgattggactgcgacccattgctttgggtgtgagtcgccgtgatgtgagcttaggggctaatcatgagttgacttttagggattcgtctaaaggccaaaatttgatgtttcttttaaaggaaaaaagggctttatctaattttttcaaggcgcaagaaaacaatatccatgatcttgaagctcttgggtctccgggtagaaataaaaggaaaaattttgcaattgacattggagttcagccgacatcggagtgcaatgaaagaactatcccggttaaaaaacgaaggcttgacctcgatacgttatccttggggaaaaagccgtttgttccatgccgtcttttcaagagtgttcccagggactttcctaaaggaacggggctgtgtggtagggtccccgatactagtcttatccatgactcgaacgaatcctcggaggagcccatggatagtgaagaagttgccagacagggacgtctcaagaatttgatctctgttccacaacagagtgataaacctgtttctttgggccaatccaccaggcttacggcctggaaggctagggcccgtttggctgatatctctattcctcctccgatttatggtgcttcttgaggagtgtgggactcagcggtgggaggctatggatactttggacccctcgtggaggaggacggtgtgtctcctccacaggagccatgagaggcgtcgcttggaactgtagagggttggggcgagacctctacagttctggagttgaaagccctaattcggtcgtacgatcctgatttcattttcattactgaattaaaagtggatgctacaagtctggtacgtgctcttaagaacatacatttttataataatattgtttttcctgctgtggggcttgcggggggcttaatattggcttggaaagagggctttgtgtttgaaagtatttgtgtatcgaaaaatcaaatctctggcatagtgtattcggaccctgataggaacccttggttaatgtcttgtgtgtatgggccgccgtattatcatgaaaagagggctttttggacgaccttgatggaattaggtaataagtttggtgggccttggttgattattggagatgtgaactttgtgctgagcaattctgaaagagctgggtctagggggacggatcagtttctcccatttatctcaaaccttatcaatacaaatgctctggttgatctacctgttaaaggggattgtatgacttgggataaccatagggatggcatcaatcacgtaaagtcggccctggacaaagctcttgtgaatgaaggttggttacggatttttcctagggtggtagtccagtctctcaccacatgcaattcagatcatcgacctctttttatcgattctgctgctcgggtttctaagtccagaagacctttccggtttgaggcttggtggacaagggacccccgtagctctctcgttgtggagcatgcatgggagtctttagcccataattgggcccctgccagagtctttaaaaaagttggtgctactcgtctggccctttctagatggaaccgggatcagttcggcaaattggattcctgcatttctaaactccaaaatcaattacaggctatccaaagtatgcctgttggttctagatcatggaatcgggaaatggagattagaaaggaactcaatgagactcttaggcgtaaagcgatttattggcagcaaagatctcgtatttcttggatccgagagggggataaatgctccaagttcttcttccttacagcaactatcaggaacagaaggaactcagtggattgtatcttggataagaatggggtttggttaaccaagagagaagagattggtcatgagttcactgatttcttgaaagatatctttagcaacccggccctgggtcctttggaaagcttagaccatttgatatcggatcacctctctccctcggaacaagctgagatggaagttattcctagccgggaggaaattcggcagaccttgttttctatgggtagcatgaaggcgccgggccctgatggtatgtcggtcctcttcttcaaacattactggaactttgtggggaaggagtttttgcgacgcagtggtagattttcttccaatcagggaatatgcacagagggtttaatgctacgaatctgacccttataccctaaattggccaaaccctaagaaagtttcccaatataggccgatttccttgtgcaatgtaatttacaaggtaatctctaaaagtattgcaaataaaattagacctgtgctcccaagagtgatttgcccgacgcaagctgcttttgttccgggcaggagtattcaggacaacaatgttttaatccaggagattatccactcgtttaaaaggaagaagggaaaagaaggtttttttgcaattaaaattgatctggtgaaggcttatgataagttaaactggtcttttattgaccatgttctttcgagcttcagggcccctgagaagttacgtctttggatccggcaatgccttactacgacgtctttcaatctgcttctcaatggtagaaagattagtagttttgtaccggaatgtggtatccgacaaggggatcccctctctccttacattttcatctgggctgctgaaattctgtcgcggatacttcagaatgccctgaaccatggaactattaaaggtatcaagttgagcagggagggcccaactctgtcccacttgttctttgcggacgacctaattttgataggcagggctaatttgaacgaagctaaaggtgtgtggcagtgtttggagaagttttgtgattggtctggtcaacgaattaacaaactcaaaacacccatcttctttagcggtaacacgagcagtggtatgaaaagtgctattaagcaagccctaggacttaactgtgctattggtaacatcaattatctgggcattccgttgtttagaacccgccagaaagatgctgacttcaacttcatccttgataacctggtaaagaaattacatgggtggaagttgaaatctctttcgaaggcaggacgtgctaccttggtcaaatcagtagggcttgccttgcctgtttacacgatgcaaacgacaaaactttccaaaaaacttgcctccaagattgatggaatggttagagacttttggtgggttgtgagcaaggaaatcggggaatctgtcttaaagcctggga

SEQ ID NO: 224985 - DNA, 2801 bp, Cannabis indica
aaaaatattaaaaaactaataacatgttttataaaaaatatcactcgcgaacctataaaaaaatttacttagagaaaatttggattctaaaatgattattttcacattttacattgtttttatataaaaaaaacataaaactacgaaaaaataacataaaaagtgttaaattattaatagatcaacaaacttgttaaaaaacatttatatatcattcaactggcctctttctctttttcaaaaaagaaaaattattcattttaattgcaatatgtcttcttagagatgaaattaatatattatttagttcatttttctctaattttaatcttgatgcatggaaatattttatcattaatttatctatatttaaaactcttatttgtaaatggaggaagaataaagattctgtgttgataataaaaagtgaaggaaatattttatcattaatacatgtatttatatgctgttgacacaagattaatgctgttttggttcctttcttgtcaatttttttttcattgctatgaaaaacaacaaaaaaggatgagattttcagaatgcaatcaaacatttacaacattaaaaggttcttatttcctgaaagcaccaaatcaacatgaatccactggagatccctcttttatacaataattagaaatattttcttcagtaataaccatcagaggggacctaaccactctccctgaaaagttaagaatatgaagcttcataacaacctaatgttctgttttgcttggttctagtacgcacattggacgattgcagaaattttgaagtttttgtgtacatttatttttcttttcaaatattgattgactgcgacatcatgttgaagtcattttttgccccttctggaaactgtattttggttctgagatctctagtgtggctcctcattttttctttcctttacagttcaccttcctttctcactaaggactctaaagcagacagcctaagtccaatggagagggcagtaagttccatatacatccttgtgttgcctgagattatgatattttaatgttagtgttctagaaacttcattgtttattttctcaggctgaaagggatcgcatggttttagtacataaaggttaagctgcaggtaagacattatttgtctcactgttagatcaagtagaatagtgtatgaataagatggctgtaaaatattgtctttgtgcttgtttcttctgcatttcagtccttgaaatgacatcccattacttgatttcatattttggtttcagctcaagtgtatacaatattatgaattgatacaactatactctattaacatgctaatatttgtagaaatgtgcactgtaggtatttataaaagtgtcactaatttctatttcttttaatgtcctcaatcagccaagactctatgaagagatgtctaggatatcacaaatatgcattatttatttatttatttattttgttcttaagaatattaaaatgtacctagctcaataaaaggacaaggtctaactttatcttgtgaatcattatcttctggccaggctagtgtgagtttacatgtacatacatttatgtataattttatgagcgccaatatatatatatatttatatatatataaaatatttaatttgacactacagcttttaacttgcatgaataatatattttttataagaaacaaatcataacacacaagtaggaagtttcattcaccgatcacatcaaacaaattctcatactactattttcactactgaatgaaatattctaggtttatactcatcaaaaccttgcaaagttttggaggtgtcacgattcatttactacagttaaaacacaatttgtttatatgatgatgttattcagcacctttactatcacgactcttcaataaacagggtctgtggttgcgtcttctcaaattgggagcaactgaggatcctctttcatcatttgaatatggcacaatccttggtaatttaatgtttttcctttttccctgaaataaaattatactatacatcactttttattttttttattttagacaaatgatttgctacattcattcttcatgtgaagctattgctgtacgaacattgtgtgtttttttttcttttcattttcatatattgtgttgtgcagctttaattgaatctgatgctgaggggataggtgggagtgggtttgttgaatgtatcagggagcacatacattcagtacgtaactttaatatttatataggaatggatttctttgcccaatgcaacatttatgctttataattcaatgaatatttctcccagggatggcattgccagttaacggaggaacagttcattgctgttaaagaattggttagaattcttctctaagattaatctgtttcttttgcaacatgaattgattgagactacataattttcgacattaatattttcaattattttctgtcttttagattttttaactattaaaacttctaattattcaaattatacatagattcatggttcagttaggaaattattacttctcctccatctgttagactatgcctttcaggactgaatatgattcttatctacactaatttgccctattttcttcgtaatgatgagttaccatatgttattctaatgtttcattgtgcctaatgaagctcaaaacagcaattagtcgtgcaacttcacgcaatgatatgttgaccatcagagatgccattgaagtgtctgctgaaatgtacaagaaggatgcaaataatgttcaagactatatacaac

SEQ ID NO: 224986 - DNA, 6507 bp, Cannabis indica
agtataacatgtaaatttctcttaaatataatacaataacctaaaacaacgttccaaatgagcccttacaaaagtcatatactaaataaaaactctatataagagcatttccctccaataacgggtaactagtaagaatagtcagatagataggttattgtaatgttcaagccaaagaattcgggggagtacgaaatgaatatgattgtatgcgtggactcaattttactacattacgtagcaaacatccaatgccaataattattaaatgatcaattagttattaaataatttcttgataaaaactgatataagaacatgaatacaagataaccccaaaagaaaagggaaaaaaagagaaaaaaacaagtcaaatacaaatccaaagaaagtaactttgatttactcacttacaaatatcagttctcctttgattgggcaacttaacccatcttgttgacaattgagcattaaataaaattacatctaaccacacaaatgtctcccccaataggttacatagcaagattcccattaaaaaaaatatatgaaaagaaaaaatataagagctaagaatatactaaccacaacaaaagtgtatcccccatcgaaatgggatctaaaatccaaatttaggaaaggttgtgaagcagcccctccaataaatttcaatatccaataatctttatcaccacacctccaaccccatccctcagacatctaccagtatccgagtggcactatatatggcttgaccttgacctcgaccatgagttttctcagaaaaggaaacaagattctacctggtcaaaccaaaagataatacaattcattaacatagcatgttaggaaaataaaagacttttcatttattgaaattttaacatatccaactccaatatgaaagtaataccactttcatatgccaagatacaaaaacttgtatcttgttagtttatgtccatatcaactaatttaccaaaataaagtgacgagcaatgtgtgagaaaacactataatcaagtagattacaggtttgaagagaaggaacgccgctatccttcaatatttaaaaaagaagaactgaaattctcagattcagaatagtcaaacgtatattcttccagcagcaaaaaccattacatattgggaaagaatcgaaatagaagatgtaatacagatagatcaccacaagagacaaaatgggataacagcctaataataaatgaaataaacgacaaacaagtcaaaaacagcatgtaactactcaacagcaaatttaaaaaataaatgaccattaacgccctgcatcataaagtctgcacaattccaataggaacagatcattcaaaaattctagtatatataaccacaattattatcactacactaaccttagagaaaccctccccctgtccatgtggcatcagactttccattctgaccagccgcttttgcaccagattcactctgatagaaactatcatacccatcttctttcggatcatcccatccagcccaatcatcattgttgtgagacgatttaccctttgttgattcttccttcctgttgtctttttggtcccaatcatcccaagaagttgagttaaaagaattaacatgaccagtcgaagaggactgcccaccagaggaagaattaaattctttgttctgcttaaactcttgatagtaatccattttgttcactatcattacgctgccagttgtcagccgtccaggtacttccttctttggcatactcttcaaccttctgtgaagctattgccatgacccctttcataatcccccatgtcctctgtccaatctcagaagtcttcgcagttacaacgttaacagtttcattcaccttgtaatcataaccaccttctttgacctgcagtaaaaataaaccatgagcctagcttaagaaaagagtacctttactttaaccttcacaccagtaaagtaaaatatgaagaccttcttgtaaatagaatatgaaaaaatgctcgcttcatagatcgggcagagaaatgccaagcttgggaataatacaacagcataataagtgctaatttcacatagtttctcctaattgcaagagaataatcaagaggccattcacttaagaatcgcattgcaaaatactagccacactgagagcgtaaacaaagtccaattttctttttcaaataccaatgatccatgatctacaaagaaatgttgcaagaaactcatacgttgacaccttactaaacaaaactcaaaatccctataaacattccacagattgacaaccttagcggagctgagtagattatgttaattaactgtaacacaccatccttctccgagttatgatagggaatggaggacaaaaagggacagtacaaagtgggatatcatcgcataaactcacaaaaatttcagccaccacaaaatagcattgagcacaacaagtaaacaattatttgtactttgttttaaagcaaatatttctattaatcaaataacaaaaaactatagccgttattattattgaaaaaaaaaggaacacaaaactctgagcttaagtctatccataagcataaatgcataagtaataaagcacaaaaagaagtagaattaatcagaggatctcgttcatctcatcaactgcaaaaaagaatatgatgaaataccttagaagttatctcttttgtgccagcttgaacaacacttgcagccgattgagcagcggatgcggcaacaagtgataatctaccaaatccctaaacaagaacaataaaagagaaaacaaaaaaaaaaatgtacgcttgctcatgcttaatattatactaagaagaaaactttaaaataaaaaatcaaaagaagacattgcagcagaattacctgagaaacaacagacaatacatcgccttgggcgctgttattcctctgagaaggaggagccgggctcgatccaaaacccacgtacttgccaccttgcgacggaggaagtccctccggacgagaatcattttctgccaacttacgttggaaaaagctgtccttaccggcagcagaggcttccaattgcgccctcgtgtatatatcctccgtagatttcgaccgagacggcatgcccccgtgaccatccccagctcctctaacattgcccgttgattgatttcgcctaatgtcattcgaagaagaaggagatctaaatccatcgtcgttatcccaagtatcccaaccgctgttgccattcctagcaccgccttgagctaaaggcggcttcttagagccagcaccgacattctcctttgcaacgggagggtcccgccacgaacggccttcggccaaggcttgaatccgatcccgatatacactggcagcgttggtattgtacttagtgacaatatccgtctccttagggataccatactgagagaagaatgcattgaggcggtcgttgccaccggcttccatcttcttaatctggatctcggaccaggaatccatggtgacagatcgaacgaaggagatgtgcacaccgagaccccgatgcttgccggagcactctaagcacatgaagacgccatatgatacggatgcccattgaggatttttttgagagcaatcgacgcaggtcttgtttcccgattgcgattgtagatctcggagccgcctcgacgccgccatttaggtctggttcgatccgatccgatctgaatcggattattaccccaaaaataaaagaagaaaaaactataaaattaacagagaattgaaatgctaattgattatatttgatcaattaaattacattaaaggaatcaaaaacctgtttctatgcgtgaatgagcagaaagtgttggagcgagcgcagagagaatgaggaaatgaccgtaaagactcaaatggtcacgaattgcttaccaatacattccattccatttttcttctctttcttttcttttcttttcttttcttttcttcccaattttaagtgtttccgtttttattttatttttttcactagaaagttggtgttagtgcttcatgaggcccggcccaatacacatttttaagcccataggacaaataatgccgtcaaggcaaaccttagcccatctacctgaattggatgaaccacatattttcataaatatggggttaattatagagtttttataggggttcgaaaaattattaaggttattataaatatggcataaaaagtaaatgtcactaaatatggcattatttaaacaatcaaactaaagtattattattattatagagagagaactgagtaggctaggtttaggagagagagagagtgtctagtagggtggtgagtgagtttagagagtggtcttctatcactctcttgttgatttctgccttcctgttggtttcttcgggtcttgttcgttgtagtcaggtttgttttggttagtggctgttgtgagtgtcttgttgtgtgaagcttttgtgagcctttgtgagtttgttgtttcctttgtcgggtgggttagttctgtttttctctgggggtgagattgtgtagttttgtggttctttggggtgtctttggtgggttggttgttagcagtttattgttattttaaggttggtgtttggtgtcttgtcttttgctgtcggtatggagatagttaatgccaccaaccctgcattcaatggaaagggtaagtgcttttcttgcgtggaatcaactataaagttggctccgtgtgcttcttctcaacaggaactctcctccttgtgtcttttgggaaaagttgtggcccccatgaatgtcaatgaagcatctgtcaaggattttgtagacaaaacttggaagtttaaagtgaatgtggttgctttgtatgaggcttccaatattccaaacggctttgagtttggctttgtgtgtgcagaagatcgtgcctgggctctcgataacggaccgtggtgtgtccgaggctactctttgatcctcacagcgtggtctccaagaaacttgctctcggtttcatttgaagtgatgaatatttggttacaaatccacaacctcccacgggattatttttcagtggagaatggtaagcttttagggggcaaagctggcagggttatcacagtggcgttggaagagggtgcgccggctctgtggagtaagtttctaagagttttggttgagttggatatccagaaaccactattctctggctgtttttttgaattggaaacagggggccgtcgatggcttcagtttaaatatgagaggctatggattttttgttataattgtggtaaactgggtcaccaaaggagaggatgtgctctctcttccccggtcacagtgacgaatgttaatggaattccttatccaatgtttggaccgtggctatcaatcgcttcctcctatcttgatgttttttctggtgcaaattctgtctcccctgctctggctcttcctcctcggtctgatcgtgatgtgtatcggaggaagtccttgccgtcgaccatggatggaagtgggaacagatcgtctagtccgattggggtggtgcgcggctcgaagcgtacggtgaaggggacaggtcaattatctgctatgggaaagctggcgtctcagaaactgtggcgtcccaaatggctccctgtcaatcgcacgcctaccatttcctctctgggcaataaggttcgcgttggagaagacgataggcaaaagggggttcagatatttccttgttctaatttaaatgtggtggaccggaccttgactttgcaccttgggtcaaataagggtgttgggcttagtaagaaagacattgggccagcgctttcctccactgggccgataatagttgacaaggaaaatttaaatggggagggccctagctgtgggccgagtatgccaagtgggcttttaaatgaatttaaagcctctcacttaaattgtgggaccccacccactttaatgaatcagcttcacgtgaggggggttgggcctaagtttggtttggagtctaatgggctggtagttaaggataagggccttgataatttcactaagaactttggtattggtaatgaggatgttgggccggccacaactatctctaatgaaagctctatatgtggtcaagaggtaaatttccaccatgatgaaaaattagctttgactaagtttttccaagctcaagacacacttgtacaagagcttaagaaatttggtaacttggacctttatgagattaaatctattggaggtgacattggggtcccaactgcttctgagactaatgaacgaactactccgtttaagaaacggaaatttgatggggcttcgacgtccctttgctctcgcctttggaagcttctccgccctcatccatgggccatccacgactttccttgggactcggagggtagagaaaatgatactaataatacagaggaagagccttcagaggaaatctctctatccaataatgacttttctggcccagatga

SEQ ID NO: 224987 - DNA, 5443 bp, Cannabis indica
tcttactcaatcaataaagaaaatttttggtggtgttccagaattggagtagagccatagatcacatcaatctatagggctagaaccagtatatatcatggtgttaatttctttaatctctgcacttactgttttctggttttcattagtttgtttgcctctgtctttatccgattgtttttttttgatttgttaatcttgtcattactaattgtgtgattgtttaaagttttgacattttgattttgcaccattagtcgtaattttttcacagtagtattttattggatgtggtatttcgacggttctttatcctacaatagagctccaatacagttttttgctaggctattttatcttggggacgacgaggcaatcatagtctgcttgcacagttttgaacagtgtcgcgaacgtcttaaagagagcgacatagtccacgactcaacccaaacttttattcggtatactcgatccttttattttcataagcaataattttcaatagtatgtgatctaaaatattatgggagaatacaagcaagaaaaaaaaaaagaattaatgacatggaggagagttgtcttcatccactgaaaaactcttttttgtaattataatttccaatttataataaaaaggaatatatatctaggtacaaaatggcttgttgtactgttaaatttatgggaaatttcattttctatacttagaaaatcttaaaaaaatttccctaaatacatacttaataagtaagaattgccacatgcatgcatgtgtgagtgggacatattgtgacccatgatcatctattcttcgactctccttaattagttttggagagttttacaacatataattaagagttggcttgggagtggcctagcttctttgaaaaacttcggaattggcttagattaaagagaccaataaaactcattttgatatattctatgctggatatttgagaaaatatataaaactttaaagttaagctaaaactagtacaggagaaaaagttattttgataaaattatcctcaaaaatacaaaggagttgtaattgttttggaggggagttccctttatgtttgcatttagctcggtttgattaatagaaattttattttaaaaaaacatatagtcaatctgatcatcaagtaagttataacattgtacaatgcatgcatgcatgtcaattcatcttctctgttggcaaactagagacgacggtgacctggtcccgaccttactagcatcgaaggtgtactaatcaatgaattcctaaagcctactttctttttttgacaaaatcaaccaagcttaaccggtcacgacatgttgttgatattgatcgagtttcggtaacttaaaaaaaaattactcttttaacttttgttttttttagtctttggtactcatgactccatacatattttattgaaaattgtaaaattttaacatatttataaaatatagaaaataattaatttataatagatattcacctcgtgtgaaataaaatctaacttcgtcactaataataatgataataataataataataatataaaaatttaaatcaaaatattgtaccattagactccgaattataaagaggaattaactaattacctcattcttttatttatttttttaaaacatgtgattcatctatctcactaataaaattaatcagatctcaataatacctaatattatgaatattgcaaatgatcaaactaacaaaaacagtgacaaacaggacgaccttcacttttacaaaaacctcctttctcattacatgacagcttatggcattcggcattgcaattagaaggatctgagtatgaatgaggacataagtcgggacgccatgtgcttttacaacatgagagaagcttatgaggatcttcacctagagtaccattgaaccctctaccttcacactccaaaccttgataaataaaagaaaacaaaaatgtatagtgtgagtaataatataaaacacatatatattaagattttttcaagaaaaaataaaatattgagacgaaccaaaggaaaaaatgagaactcccacaagaagaacaagagatagaacttgaaatttggccattctttctataattttcttgctttttcttttagattcctattatttattttaggtctatgaaaatatgctaactacctactcattcttatatacagctgaagaaatgaaattatttaattaaatttttgtgttttgttttttaaatttgccaaaattagttatgtatttaagttcccatatgatcaattgaacttgatatatatcaactttgtatacatagaattaagactatacgtatatagtactagttaacaaagaagttttttacattttattggagtaaaatatatatatgtaagttttatatggtattacatgggtacattttccttctataattttcaatttgcttttgataaaaggaatatccaatctttatgatccaatttagtatctacatacaatatacaacattcaattctcatattcctattatatgtatacttgtttttactttttatggaaacatgcatagcaaaacccaaacctaagctaatttagattgtatatattgtaattaactgagaattttatttttatttttaattataaatatatatatatatctatatatatgaaagaacaaagcaagctacagctattcaatttccatgtatatactcatttttattctttagaaaaaatagtaattattatatagctgagaatttgttatatgcatccttactatattatatatgtatataaaaagaaaggaaaaaagcaagctaattagattatacatttaagtaattatataactgagaatttgtttttcaattttatacatatgcaagaaagaaagaagctagctgcaatacaaccattcaatttccatatgtgtacttgtttttatttctttcaaaatatgcttagtttggacattcttttattgtggtctgaattaaaagaatattctttttagattctttattttattttatttttgacttaattttttaatttgaatttgggctgaagttttaggctcttttttgggctgaagtttgggctttaagattctaaaaatattaatttttatattttggtttcaaattgccactttttttttttgtaaggaaacttgtgcttcattagagaaaatggggagagtacaaagcaaacaagttacatggatggaaggtaaatgaccatttcacaccaactcattatctagtcctaatcataatttggcaactttatgtgccaactgattagaacccctgtacacatggacaatactaaggctaggactgaaagataacaaatttttgatactaagtaaaatatcatccagtggactatcattccagttacaagaattaagtttgtcaacaatagttttacagtccgtttatcctttctgtgtcttctctttttcttatttttaaattttcaaatatgtattatttccattttaaagatttttttttgagctatttttgaaaacaaaaaaaaatgtcctaaacctcttaataagtgacacataagtaaaagggaaaaatctctatcaaatagacgaattttgagtctataccttcatgtttataggccttttggttctactcaatgccacttaatagttggtcgatggaagttggataacatctcaaaaaaaacaacataataactagattcacctcattattagtttgaggcagaaattcgatgatagttttgatgcttgacaatggtgtgcatggggtttgtagatgttcattgatgccagtaaggggttgtggtttctttgagctagggttcgaggtgcatgtttgtcgtggctatgagttaggagtaatgggtttcatcagggtttgatgtgggtatttgttaggggtgtttattggactatatccaatattttttagtttatccagatcagatctaattatatattcgatgttagattttactatatgatccgatccgatctaattaattttagtcatccattcgatccaaaatttattgaatattggattggatcgtaactatctattagatgtattttatgtgtatctattggtttgatttaggtttttctaatattttagacctagtattttttagatcggattcctccaatattcaggcccggccctgggcataggcgggcgaagcctgtgcctagagcccacctagtccaggggcccaaaaaaaaatatttctcttttgaaattatacaatttttttactgattttaaaaaataccacattttttctaaataagagcccaaaataatttttttgatggcccactaaatttcagggccggccctgccaatattttagatctagtatttattggattggatagtttcgaagaaaaagcttgtcctcttatcatgaattgtgtgaagcgtgtctcttattcagtcttgcttaatgagagccctcttaacatataactaaacttgatcttaccaacgctcatttataataatcggtcataatttttttttgaaagcaataaataaattcattgaaaatataataacgttatacaagctaattatgatcatgttcatcaaataaatactatacatgtcatgattattacgatatttttatatatccaacaaaaacctggatcatcatatctagccaaacaagttgttcatccatccgaagagcatgcacaactaattcatgagcaacacagattaggaacactcttgaaaatctagatgacaaacttgtaaaaactttaaacaataatgatcttaaaatcattatcgtggggaaacttcattgaaaaataaatcacagttgtaaaatcttggtaatagattgcaatctaatgtcagcgtcctgcaatttgttttaaaaacttgttatcctttctctgaaagcttgaagggacattaatattttaactacacataaacaaactatacattagtaggatgaaacataaaaataataaataaataaaaattattgtaaatttattcttttaaataaccaaataagcatcaatagacaaaaattatagaaattacaaacaatagttaccataaataaaatatttccaaccggaaaaaactaaaaagaaaatgtaaaaataacttatcttgttaaatacaattagtgtctgtagtagatccacaagcattcaatcaatcgtttaaataacttttataattctaataacatcaataatttataagtcaaataatttgataacttaaaattgtaattaataataaaagtaataaaataataactaactaatgtaacattatacaaaacatactttagattaagtaatttaaaataaatatcatgttatatagtaaacaaataaatattaaaataatattttaa

SEQ ID NO: 224988 - DNA, 3621 bp, Cannabis indica
ttattttatttttaaaaataataaaaggtccctttcaaatgcctcccatcccaactcttccccataacaaaatgctcttgcaacaaaatggttgaaaaaagaattattgtgtaacaattgcaatgcaatagttgcaaataataaagaagttttgccataaataaccctaataaatattgagctaagaacaacaacaaaattgaaacttcacttgagtaaattaggaacctaactatatttttttcatataaatagtttgaggaccaatgtggtaggacacaaaaaagtttagggaaaacaaaaattctcaaaaaaggttttattaaccactttttccctatactttccaataccacaaattctaagcaaataaatactaattttcttccttattaaacaataaaatagaaagtgacacaaaccataatacataactaagttggtcatggtcacctcttcttttccagcacagtcctcacacattggagaatccgaacatactcacagaacagggagaagtcaaatccggtgatattgtccccatcgatggtggctttcgaacctgaagattgagtgcatgggttttgacaaatgactaagtcaaaaccaccaaatttatcactcatacttttaaccttggtacttgttagcctctgaatatctataacttgcatcaactcaccactttgtgttctgtcccaccaagccttgagaatccttcttttagtttctgatgtctcaacagatacgacaccttttaatcgaatcccaagtcgatgcaaagcaatttctgcaccaccaattccgctaaaaatagacaacactgttaagccttctgggtacattgccttcaaaacagacaagtgataccccaaagtatctgtctgaaagcaatatttcaatgattgaagtctttccattaaactactatatgattgagtatgatttcgggggtaacccaatatgctttctaaacactcgggactgataggtcccaacttgttatggccaacccacatgagatttaatgttcgacaatgatgaagtatgttcctttgttgctcgagtggaagcattccatcagagctagagagtgtccttccaagtctatcacacagcatagatatgccattaacttctgagctgataccgttcaattgtttgcgtgaatcccagtcaggccaccatttctttgtatttggtatcgcatcttgtatggtcattggtggctttggaacgatgtgaaatctgtcttcggttgggagattgtgtatgtagccttctttcctactcaaagacgagaaaaaatgcgtatttacaaactcaggctccaagttgtacaagaacttcgagatttttacccaagcgtcgtgagataaattcccgagatttgcatacaagaagtatggagccttggccactactccattaagaatccttcgtgtcggtttaggtactccatggttggagaagtcatggtcggctttttcttcaagccaagttgggccacaaaggaaattactgcaatcgtcatcatattctggttttggccttttccctctttgattttcattatactccattcgtctgcactgaggaacggtgtcataataaccatcaaggtgctcatctttaggtctcttcccgaccaagccattgtctacattggcattcatctgttgaggaattgcatatgaagaagaagcctcggtcttcactcttatcgagctaagtgctggggttacttgacgaagaagaagcaccgtcattggtttgtggtgcaaaaaccatttgcaccagtaataagttttgggctgcagcgcaaaaatttaacactgtttagcaaaccactaaaagagaaaactagaatataaccatcataaaataaaatttataggaattaaaatcaaaatagaccctcatgaaataaaaccatttcaatgacattaatgaaagggatatgcaaaccaaccattatgaaaataataatctaggactcttatagaacgcaacgcggtcaatgagctaagaaaattgggacataaatagcggaaaataaaattaatcagaaccttaatgtctcgaaaacttccatcagcattctgacaggaaaaaatcgaatccgcaagctctgagattgatactccatgacctaaaaataaattaaacaaggcaaaatttacattgggatagtagatatatattatgttcaactttccccttcctgtcatcgaaaatgactgatattaaaagaactcaccaagcttatcaattacccaagaaacttgagtctcagagaaacccatcttaagcaaatgaagtgttttgtccatagtaccaaacagagtttcgttgtttgactcctgaaaatcggagagcatactaacattacaaaccatatataaaacgatgaggaaaagtacaatgcatattaggaacaaggaattttgaatatgacacgagaacgtaatttatcaacacatcctaaatatgcaagaatactatactgttcccccaacatccaaagatgtgtattaatacttaacgcgagaatcaatcatgacctcatttttttgttgagctgtttcatcattatcctcatcaaatttcacagccatctgggcagcaacaatgaagtccactatttcatcaatcggagtatctggacctgatatgcagataaaagaaatcaactaaagcaatgttgatatgttaaagataaacaaatgggaaaagagcaattataaacacaatgcaaaaacatatatatatatacataaacacagttatagagacacacaaaacaagtgcacagcaaaaaagacagattcatcacgattagcagcaatcaggcatgtgcttaagtaacctttaatgacacccattttcataaattttcagaacattacattatgaacttctatgtattaatctgaccaagtcatgaaattcaattaatagtagcagcagactgagaataataagataactacatgctatgccagaatttttatacagaataaaaaagtaccaagcttatcaattgcaaatttaacttcatctacagagaagttcatcgtcaataaggatgctattttatcgtcagcaaatccattggataagtcaggctcctgccatattgagaactttgttagtattctacacaaataagaaggcacaaatagatttctgaatactgaatacctctttcggtggaatgaaagtggatacttctggtggactgcttacagcattgtcaccaaataaactatccaaagaatctgaagatgtagaattggctttttgaggaccctatcaattccaagagagactattaatagcagaattaaagaaaaagcttcagcttatcctaatatgaattcacaaaccagaagaatagctatatttctctatgttaaaatgttttaaacattgctatatggccttcacttactgaatatgcaaagagtgtgtccaataacagctcaacattatcttcgcctaaatttaagaaggttatgcagcagccattaaaatttgagtaaaaataacaatattaaaatgaaattgcagaatttatatctgtggacatgtatagtgcatatttaacagaatagttcc

SEQ ID NO: 224989 - DNA, 2454 bp, Cannabis indica
gatttacttttccgtttcgggattgtttgtctaggacatggagcaagatttgagggtaatccaacttaatttgatcaccatatgttgaattccaaaagccgattgttggatccgatatggatggattagaatgatcaagagtcttttcaaggagaggtgattggagtttaaggaatgcagaatcaaaaattagtggtggctgactcctctgtaggcatttcagggtttctgaccataagacttgaaattgatcattggtgctttcatcttgcatctctatttctgccagccattggagcaatggaacggagattatctgaaagaaataaatttgaaacaaaatcataaaaagataaaagtcttaaattggaaagatttaagaatgaaaaagaaaaatagttatcaaaattgtctgaagtgatattagcatagtttcttctatcaaaaagacttgtggggagcatcatacatagcatacgacgaaaactaacctcaaccaatgaaagaacatcttgtttcaagtgaatacaactaataaagtacgccaatgcagagtatatcctgtaaatttccaccgtaagggggttgtcaatgtgagattagattaaattattacaaaaaatgatggtaacaaaaagctaatctagattacctcgagatcataacaggaataattggtggggcttttcctacctttgtctgcaaaaacatcataaatctgtacaacagtatatgaaccatgataagtgacaatacaaagaaatttaagaaataaaatatgcagaacactatactattactagctctcataatgaatgaatcaagagaacagttacgtaatgtaactgtcactaacagcagtaattcaggtaaaatctaaaaaataataaataaattaattatatttatgttcactgtaacgattaatgaggtctgagtctagtagtccacaattataaataggaaccaaattaataacattaattcggtggaaacaatttactgataatctttagagtaacaattaaaatgagacataaaactacaaaaggaaaaataaataatttaggcagactagcaatttcagtaatacacgagacttgagacttcccgtgcctttatacttgtttaaaaaataaactaatcatgtattcctacatcagaatttcatgaaacctaaaaaatttatagaggtaaactactcatgattaggcaagagaaaatattagagcttgatgcagaccattacagccaagctcagcagcctaaccaaatgttgcaaaatatacttgaattttacaatattgtaggactaaaacctacattcagcacagctgcaatcctcaaataataatttaaaaatgaaaaaagacttgaacttacctaatagccattgtcaacaaactttttatgccacttaatttcttgtgatgcctgctacatccatctttttcattcggaatcaattctgaaggttggaaactttcaagaatacaagtcatggcaccagcatagaaggagacctggtcaatatccaaatccatgtggcacgattcaacatcattaccagactcaaatatgctattgtaattgttaagcacctcctctattgtgtcacatagatcctcaggaaatttgttagctttgaaacactccaattgcgaggtacgaagagagccatagagtgacttccaaactccaacagcttgttccaactctagcttattctgtggtgcaacaagagactcttccagtgagccactaatctttgctgacataaaatctttctggtagcaatagcatatgatgaatgggtaggataacagactacatgtggaaaagtatgcactgttgtactccgcgttaaataaggatggattttccacatcacatatgtagtctttaagactttccgctattgctgtccacatccttaggcagcttgggcctttgtgcttgtacaataagtcaatagtaatgacaaaattgtcctgtggtcgtaagatgataaaataatttaaaatacttctgcattgcctgctgaaaaaatttggcattggaagtgtttaaatctgatttagccacgacacagaagtacagtacagttaaataaactgccggtgaaaccatatccatataagttagagagcacatccctgaagcttttgcatgtctacttttatcaacatcagcaatgctctggctttcaatatacttgagatctaatggtaccttgtaaagaggagaacccaacacagacggctttatttcttcaagaacaatctctatgagctgaagggaaataatttgaaagtcatttttgtcactgccatcagaattttcgtcatataagtacttcataaaccttaatattgtgttcaaagacagcaaaatatcatcataagtagtggatgcttttttgaaatctatttggactcctttcacaacagatct

SEQ ID NO: 224990 - DNA, 3371 bp, Cannabis indica
cttaattagtctaggtatagttctacacttagctcaatatattaacgtaagattaatatatcgtacgatatatccaactagtattatatcacatatatatatatatacatcacctactgaatttatatatatatatataatattattcctataactgaaaagatgtcgacactatgacaaaattttgaagacaattttgtatatctatataatcaaaatgtcatcatcctttaattaaatcgttctctaataagatttcattatttgagagattgaacttactcgtttttttccatatatatgatttagtcaatatttaaatatagctagctagatctttaagttaaaatgtatatttgaatgtgtatatatatatatacatatgaaatatatattatatattattacctgaactatgcaacccccaagtcccattccctcaaaaaattgatggaaagacaaggcagctattaggggttttattgtttcagggctttgagaagcacccaatgttatgccaattataactgagtgaacaacaatacccaactccagtacctaattaattatatacaaacaaccaaccaaaaatattaatatataatctacacttaactatatatataaatataattataatgaaccttacttgtgccacaatacgatgtcggattaactcagatgaagtactagattgttgtaaagagcttgagccatgagaatgaccatgtgaatgaacatgtacgtgaccatctgtatgcccctcggcggtttcttcatccaatcccacttgtttatctcggccgccagactgcctcttataataccccgtcgcgaaagagtcaatcattagggttcctatcgctgacagcatcgcggtgaaccctacaaagggaaaatttccccaaggattttcggggaggcaaggcgaggacaagtcatcgaaagcatcgggcagtatgtgaatgaaaccggttgcaaggataacaccagctgcaaatgccttgatcatgaagaagatgtcattttcgggccttagggctgggactttgtttcccaatataggaaggcttactccaaaagctccagctaaaagaatggaaacaattgcaccaattttgaatttgagggcttccctattttggccttctatggcttcataatcacaagtacaatccccaaaaactagagtggggaaaacaaaaaatacaatcaaaagagatattttctcatgaaaatagtacatgttgaaaaagaaatatatagttgtagaaattgtgtaaaagagttagaaacaaagaactaaatttaagggtttggtttaattagtgggacaatgggaaaaaaaagatgtatttattgttatatatataggaaattgagtatgacctttggaaagagatgtgttctaaattctaatcaagtttgattggaattataaacttgtacatacttacgtgcaaagaatatgattattgcctaatcttttaaagtcaacgtaattaaatagaaacatattatgacatgacaaaatatatttaacaaaaacttaaagcaaaaattagaaataaaaattgaagcatgtaattttaagcttgttggtttcaacccagttaagttacttgaggctagctcaagtggccataggaggtgcgtgtgtattggaggtcctgggttcgagtttcaggttatgttgatgtaatatataaacgcttaaaatacaaaaaaaaaaaaaaaatgtttcaacccagttatattgtgaaaagatagttttcggaaaagaaaaaaattactagtacgtacatgcagattatttaagaaaaaattggattttttgtctccaactttgacacttatacaattgtgtcccttaaattattttatttatttatttgtctttcgaattttgaaaataattgtaaatttgttattttggttgtgttttgcatatttttggagacaatttattgataatgtaaccacaaagtacaaacaattattattacagtatgagggtattaattaacaactttaagctagttaaccaagtatatataataattttaaacattcaaatattaactctaaaattataaataaatatgtatacaatctcaaatttattgcataattagacaataaatctatgcaaatttgttttagcatacatttcttttaccgtaagttaacaatggatcaatcttatatcagataaatatttgcaaaaatgagcgaaatataaccgaaggaaaaaaaattacaatttgttttaaaatttgagagcattttttaaacaaagaaaaaaaaatcaattcagaagctaatttatttgaaattttatataagcctagttcaaacagtctaatcgcagcttgtgaattggaaattatatattatatatatatacttttttattttgaattacaagttttttttagttagattttgaactgcaagtctagttgtcttgtttaaatattagaattataatgaatgttattcaatatacagattaagaagaattttacttcatttggagtagatcatactgctaatctttaaaagttgtataaaaaaagagtagaaacacaaaatcactatggctgtggttgaggtcattgtgcatattctgtaaaaaagttaagatgtgtgcatattctgtaaaatataacatagagcttgttaggtgcactgttaattaagtgtcgtattgtatattaaaaagtaagtaataatatgtttagattattaattattaagactataaattttaatataatgtaaatcgtattatataataaataacaaatgatttgtattagtttatattataatatttataaaaggttcgggattgaggactctgactcaaacttagttttggtcctggtcccaaatctcggatctggatccagactcgatccaactctagactcaaaaacttggatccgattctcggcccaaatcattagaggagtcagagttaaagttgaagagtatggtaaagataatataattttacataagctactaatataagtaaatattaaatataatattgtattaaataatataagataatctcactacacacataatccttaacaatagaaaagtaagtaaattaaatgggttgtagtgaaaaatgttacgcatttgtctaaatcaatctaaaacgtagaattagctttttgatgaggagacattgtcttattattttggtgttactatgcaatttctttctctaagatgatttgttttctgcttttgttttagttttgaaattatattttttagattatctctgtaagttattataattactcttctatattatataatatataactagatatataaatatatatata

SEQ ID NO: 224991 - DNA, 4365 bp, Cannabis indica
aaaaaaaaaatatccatgaagcatggttttgtagtaaaggttctttggtacattatatttacattttacatgtggtattaacttttataagcatgaaatatataatattttagtatataagagtgttgctgtcaacctcttattacaatcttgtagtcaacccccgtgacccaaaatacctaccgaaattatttttaatttttttttttcatgacagtattagttatgcttacaacatcctataaattttttaaatacatttaaatatttttgaatgcgcctggtaaactgagatataaagaactctgttttcgacaccgtgaactataccaaaatatttacaaaaatttacaggaataatattgtaaacataataaacaccaccataaaaaaattaaaaagtattccgttatgtaatttcggatgtagagattaattaagaagttctaatagaaagttataattagcactcctctttagtataaattaaaatttaatataatattatataataattaaaatttaataatatttttggtatattttaaaatttaagacaaccgtatacggtgtaccaaacgagccataaaagataatatccacaataaagagagatagacaatttcattaaagctctttttttgaaagaaaaaaaaaatcattttccaaaacattatcatcttaagaactcagcaaatcaaatcaagtaaaggaaccagaagatgtagtagcagaataaattgttcacagtgaccaacttatgataggttctctgttttgtgttttggttttatccacataacatatgcaactctatatttatcaagaaccaataccaaatcaaatccccccaatgaaattggtttgcatacagaaattagttaccacccctcagtgcaagcaccagatgaaggaccgagcctccctcgatgttgtagtccttcgcggttttgtcatctgcgagctgtttacccgcgtagataagcctgcaaccgatcgtaaactcaatgtgaatatttctaattatagaagaacaagagaatcacagttcatcttaatgaaaatataacaccatgtgaagttgtaagtactatgtcaaggattcaaaattgctcagccatatccaaatggagtatggagttagaatatccagctataataatggaagagtaatgaaactagaccttttatgtcattttttgtaaaatgattttgatattactttaaacaataactaatattctaatgtattctgttaaaactgagcagaagcaatgctttaaactccaagaacaaattaagggctgtaaagccataaaccctttcacccacattagataacacagcagacatggtaaaactagatcaaaattgcactgttaaatcagtttgtcggaaaaaaaaaaggcactggattggagactacaaattaagtttcaactgtatgatatgctatgatatttctgagaataataattcaaactaaaggtattcatatgcttgaaacttattatttttatttcagtgtaatactgagtgcatacctctgttgcacaggtgggattccttctttttcctcaaccctttctttgatcctatcaatggtgtcagttggctcaatatcaatctcgatttctttcccagtgagagtcttcaccttaatcatagttcctcccctgagcctcaaaacaagatgaagagttgactccttttggatgttataatccgcaagagttcttccatcctccaactgctttccggcgaaaatcaatctctgctgatcaggagggatgccttccttatcctgaaaccacaaattcactagttacagccttacccttaataccagcatccccaattttcataccatattcgtataaaggaacagaaacactaaatattacagccgaacccaccattaccctgaaaccaaaaatccacagttagccttactccactcatttttttcggtacaaatgagtagaaccccttccccctccaactcaagctcacacgcccaaccacttgagctaacaaaaagtgacactctcttaaaccacattaaccccaaaccgaaaacaaatcctcaaaataactactgaaccaaaagaatacacattgcagctaccccttatcattcccttccatcttactaattcccaactctccctaaaggaaaaaatcatcaataatcattatatacatacacataaagtgacattaatcaataaaccaactaatctatataacagcctagtccaaattacaattacactgaaaccacaaattcactagctactacagcccaccccttataaaccccttaaattttattaatcaccaacccaaaagaagactccacacgaaaaatactatacatgcacacataaagggaccatagtcactacaccaaataatatatattgtatacaagcaacaaaccaagaaaaatgctagccagaataatccaaacaaaccaagaaaattcatacataaagagaccaacaacaacccagaaaatataaccaaagtcaagtaattttatttttatcagataaatgaataaaatagaaaaggggtctcaaaatcaatggaaaaagaaagaacgataaacaaacgaaaacggcatagaatcaataaaaccctaagccaacaaccgattataatcaaaaacaaaagtacccaatactacgaactgcataaatctctcaactttgtacaatataaaaacgcgaaaacaagaaatacccagcaatcgaaatacccttttcgagataaatatgtatataaattaaataatgaagcaaaagggtacctggatcttggccttgacattgtcgatggtgtcgctactctcaacctcaagagtgatggtcttaccagtgagggtcttaacgaaaatctgcatcttcttcttctacttctactgctactactactttcttcttcttcctctggtttcaagggtttgagaagctgagtggaatgaagttttgggaggtttttgtattgatggaattggtctgtttggctttactgttctaggatttaagccactgacttttgatttgtgggagtcaccaatttaattcttttatttattatttattagacaaaaagagattttttttgagtggtttgatagaatttttaatatttgattaagggaatactattttttttttatgcggtgaatagaattacacatgattaataatacaacaaattacaatcggtactggaactttctcgaaccaggatatctcatcgtctaaccgaagagtatattttcccaaaccatgagctgcaaaatttttattgtgagcacaagagacaaaactgaccccgaaaatatagacaataaagctaattattaattgagtttttgttttagttaataaaaaattagaccctgtattttttaaaatattaataaataatactttgaattaattttttattaaaataaaatttaataataactcgatctagagatgctatgataaaactggttacgtttattgagtctgttcgtgttaaaaattattttcaagttgattatattaaaaaagatggttgaaaatttaaattaaaattctatttatgctatttcgaaaatacaaaatttactttgttgtttagcaaaatagaaatttcaaaattatattaaccctattttattttatttatagaatttttttttttttaatttttgcaccatggaaagtgagggatgtattggaatttttctttttttttttaagaaagaaaaagagagagaaaagttagtggcccaacttaatatattccaagtttgtgttggatataataaataaaataaattttctaagaataataatatttttgttcagtttgttgaaattaaatataaataaagttctataaattattctaaaaaaagttgtgatttagtggcccaacttaatatattccaagtttgtgctggatataataaataaaataaattttctaagaataataatatttttgttcagtttgttgaaattaaatataaataaaattctataaattattctaaaaaaagttgtgattacactaatctaaattaacataatttttgtttaaattctatcatcaattcattaactaagaattgattctttaaaaggatgacattaatttttgtagattctttctttttcaaaatgatcaacatttcaaacaagtaatattatttttactatttaagaaataactataatatgataatataatgataaaaatatggtaaaaaacttctatgtgtgtggatctttagtatcaagtataaactcttgaaatgtgttcatcccaccttctcaaatatttttttttcaaaaaaaa

SEQ ID NO: 224992 - DNA, 6685 bp, Cannabis indica
gtaaattaccaaacaacaactctctttctttctttttttactttactttctctctctagaaaatattttcaattcactttctctctctaaaaagactctgaaaaatcaaatcttcaaatgtcagtccaaacagtgatgatcggcttcggaggtcggaggagaactcccactgttactttcctcaagctttgacggaacgtggtccacacgcgccgcctttactggagaaacaacaatggtcttcaaaggaagattcttctcatcgaagaaatcttccgatacttcttccaacactcaagatgcttcttcaaacagtcctcgatccatcggttcaagttctcctctcagatccgataagaagaaatcgtctaaatcttcatcatcggcttcgcccaaactagtcaaagatggcggcggtggtggtggagcaaagaagaaggggaaagaaactctttctcaaccttctacgccgaattctaaatcgagcttcggtggcggtggtacttcaacttctttactcagtaagattaaaccggcggcggatgtgaaaaacgtgccggctccggcttcggctccggctccggctccggctccggcttctgtttcgccgattcttgcttcttcgcttggtttgaataggataaagacgcgatcgggaccgttgccgcaggagagtttttttgggtttagaggtgataaggtttcgtcgttgggagcgagtaatttgtctaaaccaattagtggtggtgaggatgggagttcggggaagaagaagggtttgttggatattgcttcgaagagttgggctgataatgtgagtaataactctgatagtatgtctactgagagtagagaccagagtcccaatgtgttacctcaatctcggttacagaacggtgaatcttcttctgaagcaggtactataagatttacgaattgtattttgattaattgaatagtatgaattgtgaggaaatagtccaagattagtttaaaactttaaatgtagcgggaaaataggagtgaagagaagaaagattggagctttgattcgaacaaagtttctaaggagaaaacttgtgtgatgagtctaatgactgttggataattagaatatgtgcaagaacttactttttcggttttctattgttgaataggactgttattgttcatgtctgaattgtattttgatgaatggagttcgaattgtgaggaaaaagtgcaaggtagtttaaatgtagcaagaaattagtagtaaagagaaaaaagatggagctttgtttcgaacaaagtctctatggagaaaacttgtaatttgatgagtgaggtttttttttctatgaatttgtaactgatagctttcttcagttgattctgtattggataattagaacatgtgcataaacttactttggtgcttccgcatattgattctgctgcaaattttttgtagtaagtttgaaaaaaacttaaacccagtgtatgaattgtgtggagatagtggaaggttagtttaaatgtagcgggaaaatagtagtgaaagagaaaaaagatggagcttcgattcaaacaaaatttgtgtgatgactgttaaagaaaatagtgtatgactgttggatatcactttatattgttttgtaactgatatctttcttcagttgattgtgtaatggataattagaacatgtgcatgaacgtactttggcatcttctgcatattgataattaggtccgagtatggtccaagtataacaacttgtctgtaaccccttaccctgaactgagataagaaatttgctattaatagtactacctatataaagtgaatttctaattattataatttataagttattcttttagtaccccttaaatttcctcctcttgtcactatttttgttgctttaatcatatttgaagcctctactatttcttcttgtttgtacattagtcaacagaatatgaaggtggtaagattgcttccacacatacacttcaaatatttataaaatagaaaccatattgattgagacatatatacaattaaaaaagaaaaatggggatgagcagtccattaaaaccttaaaaagcttgaaggatttataaaatagccggctgctccctttattgattttggtagtatctctgtggtacacaaatgtcaaaattttctttggtcaaaattttcttggtattattgcacaaatttatatgtagtttggctgattaggtatgtggactaacttttttggattcaaagtattgatatgcttctatctgttatcattgattttatagttatgtttgaaaattacctttaatttttgccaagttaaattgtaagcatattcttaaaagtgaaactttaattatccatttgagaggataagactcctgtgttttaggttgtctgccttccttttgctcttcattccaaatgacaattccttgatatagtaagaactgattagaaaggttttggaagaggttgaatttataggagcttttcataagaataagaaattagaagtatcagattgtcggaattattcatatatttattgggtgattgatgatctaatgttggattttgttgtcagcttccttatgttttatatttttatttccgatagtatggaggaactggtgaatttattgaatagtactttaactctaagtcaatcttaacagggaaatttgactcatcatcgggcccttctggaggattgaggagttcagatgtttgtacacctgagatggtaattgtattgacactcactaatatatttacaatctcatcttgtgatagtacacataagaaccttttgcctttatgttgttgaaaactaaagtgtttgatttgtagactacatttgattgtgataacccaaaggagtccgagtctccccgttttcaagccatacttcgtgtaacaagtgcaccaaggaagagatttcctgcagacatcaagagtttctcccatgaattaaattctaaaggtgtacgaccttatccattctataagcctcgaggcttaaacaacctggaggtactgcaatatttcactttattttttatttccttttcaattagtaattttctttttggagtctatatttgttttcaggtactgtattttatgcaggtttttatacttgcattatttgatgtagcttacattatttcttatcgtcttttattaatacttcctttgtttcttataaaataaaataataaaaataaaaataatgcaggaaatcttggttgtcattcgtggaaaatttgacaaagccaaggaagaagtaaactccgatctggctatttttgcagcagatttggttggtattcttgaaaaaaatgcagatactcatccagaatggcaagaaactattgaggacttgctaattttggctcgtaggtgtgcaatgacaacacctggggagttttggcttcagtgcgaaagtatagttcaagacttagatgataggcgacaagagctttctcctggtatgctgaagcagctgcacactcgtatgcttttcattcttacaaggtgtaccaggctgttgcagttccacaaggaaagtagattggctgaggatgctcatgttcttcaactacgtcaatctagagttcttcattctgtagagcgagtccctccagcattgcctagggatgcaaaaagttctactgttgcaagtgcatcaaaagcagcttcaactagaaaatcatacagccaagagcagcatgggttggagtggaagagagatagcactgttaagcccggaaatcttcttttgccttctgctgacgagacttcaaaaaatttggagtcttctgctgctagggataggatgacatcttggaagaaatttccatcaccaagtgcaaaaactgtgaaagaagctgctgctgtcttgaaagagccgattgatgttaaggttgaacaacctaagcttttaaacaggaaggcagcttctgaagtggatctgactgcagctaagcccctggactcccttgctaaagattctcatgatcattcttccaagcatcgacacaaagcgtcttgggggtactggggagatcaacagcctgtatctgatgataattctatcatttgtcgtatttgtgaggaagaggttccaacttcaaatgtggaagatcattctagaatatgtgcagttgctgaccgatgtgatcagaagggtctaagtgttgatgagcgtcttcttagactttctgatacccttgaaaagttgatggagtcatttgcccaaaaggataatcaacttgcagtaggaagtccagatgttgcgaaagtatcaaattcaagtgtaactgaagagtctgacattttctcaccaaaactgagtgactggtcccgaagaggctctgaggacatgcttgactgtttccctgaagctgataattcagtattcatggacgacctgaaaggtttaccttccatgtcatgtaaaactcgtttcggtcctaagtctgatcagggaatgacaacatcatctgcaggtagcttgacacctaggtctcctctattgacaccaaggaccagccagattgacttgcttttagcaggcaagggtgcttactctgagcaagaagatcttcccttttcaaagaaatcttcaatgacactctaattttgaaagtcattaaataaatatgtatccacattctatcattttaagtttatgatgccagcatccacccattgccttttcagatttcagtcaagaaatattatcttcttaaagcttttgaaattatttgatgttgctttcatttaatctagaaggatagggagaaatgaactatgaattttgtatgcatgcatggtaaagagtttaagttttaaggaacaataatataaaacaatccgacttttaatttttgttgtcagcgtaaaatactattggcacagtactggtaatatatagtttgaatcaatagaagtatttaaccaagtgttaaagtgaataataataataataataatgaaaaaaaaaaaactgtgcagttttggtctgctgatgatattattcttaaattgggttctatatgtatattattattgatattggctagccatttttatttggggtgacagatgaacgaactggctgatattgcaagatgtgtagcaaatacacctttggatgatgatcgctccaatccatatctattaacttgccttgaagatttgagagttgtgattgatcgaaggaagtttgatgcactgacagttgagacttttgggacacgcattgagaagctgattaggttatcatttgctgctttttcatttgaaatttgtatatctttttttttttgtgtgtagtacttgtactttcaactttgctttttttttcctgttttcttgtaaagtcaaaatgtttatttctttattttcagggagaagtatttgcagctttgtgagctagtagaagatgaaaaggttgatttaacaagttctgtgattgatgaagatgctcctctggacgatgatgtggttcgcagcttgagaacaagtcctgtacattcttcaagagatcgtacctcaattgatgattttgagattatcaaaccaatcagtcgcggggcttttggacgggttttcctggctaaaaagagaacaactggggacctttttgcaataaaggtttcttttctgatttctcattataaaaaataaggatcattattctgttattttataacttttcttctaatcgtatttgatcttcttgctaatttctcatttttttttgtttttgaattaaaaacccacgagtctctcccatgttgcagtttactctccttgtagttctttatatttcttaaataagcactgaacattgacatcttccaccaattgttcatttgtaccatctgtaacaggttcttaaaaaggctgatatgatccggaaaaatgcagttgaaagtatcttggcggaacgtgatattttgatttcagtccgcaatccctttgtggtgagcaggtctatcttgctaacaagttaacctttgcttgatggaaaaatgcttttcttacattttgttaaatatcaggttcgcttcttttattcattcacttgccgagagaatttgtaccttgtgatggagtatttgaatggaggggatttatattcgttgttgagaaatttagggtgcttagaagaagatgttgcacgtgtttatatagccgaagtggtaagttcattgtatcttattttgaaacctatgctactttttgttcaactctgtatctcagcttatgtttgttcttttatgttggcaggtgcttgcgctagaatatttacattcacttcgtgtggttcatcgtgatttgaagccagataatttgttaattgctcatgatggtcatattaaggtaaataccttgtacacgggcacaaatgtattttatgtatgtttttaggctgttctgttctaatctatacacatctcccacattaaaacacatcacctaatgtaggaagccaaaaaaaaaaaacaaatatttgtaactctttctatcattttctttaacagttgtacggattttgggtcgtctcaaggttaggtcttatcaacagtactgatgattattctggcccgacgcagtaagtacgacatcactaatggcggaagatgagcctgagttatc

SEQ ID NO: 224993 - DNA, 9876 bp, Cannabis indica
actttaaaaaatacatttagtgaaattcttcaaaaataatatgagtagaatttctaaaaacaaattaatattagtagaattacattcttaaaatatataagtttacttttttttaaaaaaaaaatacaagtaaatatttaattttattaatattaaattaaaccactagatggtgtatttagatatgaggtagtaattatttataaatttataatatcatgtttgacaaaatagttagtaattataaaaaaaaataattatttttaatacttaataattaaaataaaaagttttaagtaattacagtgtgtaatcacactcaattctgggtatgaaaattgaagagtgtaacaccatatggagacaaacacaaaaaataatataattactttcaattacacccaagtcaaattcctcttggcttttcaaatgagccttagaatttgtattttattttcagtttaattacttgattcatagtttctagatatcgtataaaatatttataaaaataaaacgctataatattttcttcaattgacacgcactttcgaaaaacagttttagtcactgaaatttacttgttgtatcacttgctgatattgaccccctacaatgtaatcctggctccgcccctgattatagatcaccacttgtttaagtattgtagataatattattttgcagaaaataattaaattgtattattggtacctaacacattttttaatattaaagtattagtataattaaataacgaatcttatattacttaaaaaaaagaaaataacttttaaaaaatattaacaatattctcttttgtaaaataaacttattcagaaattaattaatatatatttttaaattcacgattaccgataacgtactcaaacacatgtacgtgttgttcacaatgaaccggcaactcagctcattatccaacataaagttattattatcttatcatctcctctcgtcttcaaatattaaagttagaaaaagataaatagtatattcatatgatttcctagctataaaaataaaaggtatccatgatttaacacaaaaaggcttacaagatatataattaaaatactcccactattttatgttccctctctatctaatcccattgttgtggttgaaaatgaatcgaaagtaagtaactatatatgacatatcgaaaaattatgtgtatgatatgaatttgaagatattttatgatgatgtgtattaataataattggtatataattatatatagtattattaattaccatatagaaacaagaatctagattcttcccttttgatctcccaatcaaagaaggtgaatgatgtaatactagtgtgttattattaattaaataattattaaatgattttgggtggctgatcgaaatgggaataattaatatatggtgtgttttgattaaataataaatataggtggggtgcaccttcctacataattgaattgtctctaagagaatagtaagacctcaatcatcaaacatttggccgatatatgatatgaagaagaagaagaagatgatgatgatgatgaaggaggatatgcattcatttgaatatgtggctatggcaatgtccacttccaaattgcctttgattgggttatatatattttttgagccactacttcataccaccaacaaattcatgatttattgcgatatatggcaattataaggctcaacgagctagaccccattaagaataaaaatatatattaattgttatatcaattatgtatcataaaatgttgcagtctaattaattattggtctgactataattgaaaaagtagtagaaaatagaagatttgtatctcgggtagccaaattagttaaaccaattacaataattaatcatgtggttctaatctctttctatcgatcgatcgcttggctaataatatagtttcaactatatatattagtgaatgagacaagttccagccttgtcatactcatgcatcggctctgaataagaactcaatttattaagactgactcatcaattaatgtacatatcaataatttaaactagaaattaataagacttacaaagctagactcttaatttaattagctcaaaaaaaaaaaatacagaatttactaaataactcatgaaattataaacggaccaaaatgaagatgcactaactacgttgccatctcgatgattattggccaattagtactcaaaataataatctgataataatgctatatagcttaattattgaattgagtttgacacgaaggatgatatgaacacatgtggaaatcattttcattttctttattaattatataaataggaaagtgagtgaaaccaagttttgcaaataatattaattatatttcattacgtgcaacaacaaccctcaatcagcttaatttcatgttaataagattgtcccaacattttatcctacaatattacgtgcatgtcacatattaatatatattcattaaaatatactcaatttgttcaaacctatagtgctacatatatatgaaataattcactgattgaagaagaaacgtttgagtctatcttcctttgagttggcataatacaattaattgttaagccttttcttgttattggttggcttaattaatcaattaattaattatctgaataatcaaccacatttaattacgtattataaaaactcaactaatctaatttaataattggagcagccactacatgacatccatgagtcaccccatatccccactcctttaaatttcaatgtttacaaatgtctaaaagctagtaggcactccaattttttggccaagaaacaaatattgtggagacaaattaatttgacatgctttttaattagatgttaacattttaaagtaagataacaatcttttaaatatgttgattaaatttagtcaattcactgccaaatcattcgagcataatttttggttaaaaagcttatttattaaaaaacattaaataaaaataaaatattaaacaaatcaattggggttctatggtgtagtggttagcactctggactttgaatccagcgacctgggttcgactcccggtaggacctctttaattttttaaatttaaaaccaattattactattttaatatttttgtgacccttatatatagggctgaatcttcttatccaatttttccttccctttcttttctgccccaaatttccgaaatggagacttacaaaagcctagaaattatacagaacaaggaagattcatcggtatttcacctcttactcaatcgaccatcgaaacgcaacgctctctcaccggaattattctccgaatttcccagagccctctcgtctctcgaccataaccctaacgtcaacgtcgtcgtcctttccggagccggagacaacttttgcggtggaatcgatcttagtgagctaaaggcctccgaacgtttcctttctggcgaccgaggtcgtggcggggagaggatccgacgacacatcaagggtttgcaagattccataacagcgatcgaacggtgccgaaaaccggtcattgccagtatcgagggtgcatgtatcggcggcggaattgatattgtgacggcatgtgaccttaggtattgcacaaaagacgcatacttctcggtaaaggaggtcgatttagccatcgttgccgaccttgggacgctccagaggttgccaagcatcgttgggtacggaaacgccgttgaattggcattgacgggccggagattttcgggtccggaggcgaagcaattgggtttggtttctaaagtattcaattccaagcaagaactagaagagggagtgaggatggtagccgaaggttagttagtatttttagacattgtctcattcagtttaccaaaatgatctgattttaacattcattgatcattagtttaaatggatcaattataatttaaaagacaaattttgagtattgggtctgtgaaaaatggcaggaattgcttcaaaatctcctttagctgtgactgggacaaaggcagtgttacttaaaagtagggacctgaatttggaacaagggttagactatgttgctacttggaattcgtctatgatgttatctgatgatttaaaagaggctatctctgctcaattccagaaaagaaaaccaaaatttgccaagctttgatgagttaaagctctcactttggtacgtaacaacatgttctcttcaatcttacagctctttttagcttggttttggtgtgttgtattaaatgacacttgtaattttgttgtaattaagcaatgccaatactcacgcagaatggtctgaaacttagttaattttccaataagagaaagaagagggtttcagttagtacttttttctcattcttacaatatgaaggtgagagaataccggaacttatacttaagaattcaatgattcaaatggctatgatgagcttaaatgagcccccaataattgattgaagttggacagtttgtgggaaagactaattcgttaacgtcaagatattgtcgttttttaaaactgtagtttgttttatgacattgtcgtatattcatatgacgtccttttcttctccctttgtcgttttttcttcaagaagtccacgcgttcatatgatatgaatgaagattgaaagtcaccccctcatatgttgtcgttttttcagggtgttgctgatttcatagatgttgtcgttttgtagtgctgttcaaattgtcgttttttgtgggttattgtcttggccagattaagtttcaaatcccctaatatgcggtagtcgtttatcgtttctacggttttacgtactctatcggtctatccttacacatactagaatattaatttatttttttattttacatcacatttttatatggtacactatatagttaaaatatttaaagaataaataaaacatttgaagaaaataaaaatgctttagaagagtttatatcatttgttagaaggtctttttgcttctttgttctttaaatttttaaataatctttattttaaagaatttattgggagtgcttaacctctttttctgtacctctgctctgtccatcgttactttgtacctcccaggatacaaacaaatttaagatttagaatgattataattattgaaaaagaaatgatattaaaaaaaaagttgcaggaaaatatctctctacttctatttcctactcctttctcgtgccatagtgtgttgttgtgttttcatgtgtagttatatgcttaaatgatgtctttcagtgttctcttacctctaaatcaagtccgagagaaccactcgaggctagctcaagtggctataagagggtgtgtgtaagtcctgagttcgagtaccaattatgcattgtgtaatatataaacgtttaaataaaaaaaaatgttgtggagtcaattatagccatgattgtatcaaaacttggccaaaaatcatttgagttaaataggcaaagtgaatttaaagaaaaaaaaaaaattgaccctgcttatatataatcgaaatcgatagttaataattttatctatttgcaagatttctacatttagaccacaaacatgtcaaaatttagcaaactcatatcagattcagacctttatgaatcacttgtacgtaaataaagataagtttcaattagatagtccatcaatagtcacgtataagtgaaactttatgaaaatatgttgccacattacttggctagattttaagacataaattataaaggaaataatcatcaaatttcaaatacatatatatttttataacaagccacaaaattgttattattatttgcacacataatcattttgaaagtgagagagacatgataaacatgattaatcccactggtaatggctttcatttttaatcccactggtcatgcattttaatactaccttaattttgccacttccttttttttgttaattttcataacgtcccagagaaaacctatttatttttctcttggctaattaggatttttgcgccctaaactttgacatgtaccaaatcataccccttgaacttttaaggctattgaaaatgtcccctgaactattgagattattggatttaaggacttttgtctaattttattcaattttactatttcaatgattgtttatataataaaccatgttctccaaactttggtatctaccaaatcatgcccttcgaactttgacatgcactaaattatgcccccaaactttcatcaatgttagactttttttactaaaattagaaaaaagtccttaaatccaacaatctcaatagttcaaggggcattttcaatgaccttaaaagttcaaggggcatgatttggtacatgtcaaagttcagggggcaaaaatcctaattagccttttctctttaagccaaataggaagttttacataaaatttttatgattaaatgtgatttttagtcacaacaaaaagttatttgtgactaaaaacatagtatgtaaatacaaattgtcactaatttagttttagctacaatatttgttgtgactaaaaatatattaagttacaacaaattgtaatttttataaataatacttttagatacggatcttttagctagaatatagaaatgatactttataatttgttacaactttttaaattttaattacaagttttgttatgactaaaaataaaattttttgtggtgacttgacaaattttcctttataagaaaatattccaagcagtattagaaacaattgtaatctttttatgttaatttttttataacaactatattttttttataccaactatatttttaaaaaattgttttttgtaataaaaataatatgaaatgtttttgagagtctaaatggtatattcattttcttgttgtactttcactgcataaagcttgctaacttttacaacttaattacttataaaagctatacaaaatatggcttaaatccatataaaacatgtcttaaatccatataaaacgggctctattccaacttggtgggataaggcccatgggccagatggcttaaatccattcttttacaagaagaattggcccattgttggaaggaatctttgtaatgttattctttatattcttaactctgaagctaatattgctcctatccacgagactattcttgttcttatccctaagagtaagaatgccactggagttaaggactttcggcctctcagtctatgttccaccatttacaaagttatttcaaagactgttgctaataggcttaatcgtgttctgaatgatgttatttctcataaccaaggcgctttcctccacaatcgcattatctttgataatattatcattgcaaatgaagtcattcactttattacctacagaaaggctggtaagttagggtgggctgcccttaaattggatatggagaaagccttcgataaagttgaatgagaatttatacgtcaaattcttcatcatttaggcttccctactcaactgatatcccttattcttaaacgcgtctcctctgcctctttcagactgtattaacaataatctttcccctcccttccaaccttctcgaggtttaggcaaggtgaccttctctcaccatacattttccttcttgttgctgaaggcctttctgctattatcaatcataaaaccctccacaaccaattcaagggtatctccgtctgtcgttctactccctgtatttcacatatgctttttgcagatgacaacttgttttttccttaggttaaagctcacaattgtgatgctagtaaagagatccttcccctctacaataaggccactggccaaacggttaacttaactaaatcctccatcctcttctcccctaacactagcccttccgatagatattttttcctcaattctctgattatggaggataaaccgtttattgataaatatatgagtgttccccaatgcctttcccgttttaaaaaattctctttccttttccttctccaaaaatatagcaataaattgtctgtctggaaccaaaaactttttctaaggctggcaaagagatattgcttaaatcagtgatccaagctatcccctcttatactatgtcttgttacaggctccctatctcaatctgtaagcatttcagcagcctcatggctaacttctggtggggttccttggttaataggcataaggtacactggaaaaattgagatctgctctgcaaatctaaattctatgggggtcttgggtttcatcatatggttcaccataatcaggccatgttggccaagcaagcttggcgtatcttaactaaccctaattccttgttgcttctttttaaaagccaaatatttaagcacaacgattttctctgagcttctattggtcataatccttctttttactggagaagtctcctttggggtagaaatcttctttctaaagggcttgtttggaaaattggagatggtaagtcggttgaaattgctagttcgaattggttgcctgattccaggaatatctcttttcacagtgattcatatccacctgaaaacactgtttctatttttttaagggaggatagacaatgggacattaataaactaacccatttctttgatgataatactgttaattccattctcaatgtccccatcaatcctttcaatagggattgtctcatttggaggcatgaccctttaggcaatctcacagtcaactccgcctaccatcttgcaaactctaataatttcaacctttgtacttctaatgccgatgctcttaaaccttggtggaagtcaatttggtcttctaatattcccccaaaaattaaacacttcatttggaaagcctttcatcatatacttccctcgaagcttaatcttttctctaggaaaattctagataacccatattgttccatatgtttaaaccagattgactctaacactcactcctttttgtattgttctaaggcaagtaagttgtagaaacagtctagattctcttctttttttctacaataataaatattgtgatattaaagaatttttgttaagaggttttgatgaatttagcaaagatgacttagttgtatttgttggtatcttatgggctatttagaacaagcgcaataattttctttttgcagataacaagttcattggtttagatgtggaaccttctatcattaataacttgctggaatacaagaatccacaaacaaagatcactaccccttctaccaacaatcagcatgattggtcacccttgatatcttctccaagaatgtttaaacttagcattgatgcagttgttcagttacattttaacagacatggcgatggtgctatatccaagactttcaaggcagaattatcgcatgcttctcttccctagcctattcaggtttcactcccatttttgctgaagtagaggcccttcatcgtgctttaagttggtgttaagcagattgttttcccattgaactcattatttcaaattgctagaatttggtctcaagaattcaaaggaagcttaccgaccgctcaaccctttctcgctacatcatgaatattatctcctctttgtcctattttccaggcgcttcattcagatttgctcccaaatcggaaaacacccaggcgcataacctggctcaggcgactttaggaactggcgaagagtttgtttggaacaattggcattccaatctttctagatctttgtaacctagtttctctagtctctttctttggttatagatcttgtttatttttttttttaaaaaaaaaagccatataaaatgtaacaccctaactaccttaggcg

SEQ ID NO: 224994 - DNA, 6354 bp, Cannabis indica
gaaagaaaaaaacaaataaataaataactaaaagaagattcttgggctcaggaagttacacagaagttctctaaattgaaaccaaaatgtaaatgcatattagacctgtaaaaatgagtccatttacccaaaagcttgtgaggatcaagtgattaagtgcttcacaagttgttacaaaatcactaaaatcagcctagttttctcagcaggattttcactttacctgcatcactaccctttttttaaaatagagttttctgagtttctttccatttctgtaaatttttgcactctgtactagtctaatgtgctgatttcttccttcattttgctctcttcttgcacttgtttagtccagcactttctctccggttgcaaacaagttccaaactactgtacctatgatgtacaatgcaacggctaccttaaatacatcgtcccaagaacctgcataagaaacaatgttgatagtttagactagagaaaaagataatgtagcaattcagcaaaggcattagattagcagggctaaagttgtacctttttgtagtatgagacctgttgccgctgtaccaaagacgccggcaagtactccagccgtatttgacagtcctagcaatactccctgtaattgatttgtaagcttgattctaaataattctcaagacacaagtaggacaaatagttcaagcacaaactaagaagtaaatgctatactcaatagggagttacagctgttatatacatacaattgtcaaattataatactcacagcatagcgtggtccaatgtcttggtgattggaatatagaccagattgtgaaaatgcatcagatccctgtcccaaaagaaagagaaaagcgaataagtaacagttgataaattactatttaaggttttcctcatggaatcatatatttgaatctccattgtacaagaagtttatctcctttcatagttttaaaatatagaagaggcatgatgctgatgactttctttttacatttttaaaagcttaactttgcttgatgccaattcatgttaaacttgtgcctacctgactgcatgccatgcagagcactgccatagcaggagttttgacatgactgagctgagtgagaaagaaggctggaccaagaaagccaattgattgcatgatctgcagggtcaaaagaatttagaatacaaccaacaaaatattattctacactcctaaaattaccttgtaaaagttgataagaaagagctcgatccataattgctaatttcactttggtgataattcaactttacatgggtatttaagttgtaaaaatttatctagtcaatatataatgtcccagaatatggtttacttggtatttggttttgtatctagtcaactttatatagtcaatgatctaattaattctacttcgctgtgcatgaaaaccaactggaattcataccaatgcaagttcttaccttacgaactgatgttatagaaaaacctttgctcacaagagtatctgcaatccaacctccaatatttgcaaacacagccatagttaaccacggcagaacacagagaagaccagattctgtgaggttaaacttcaaaacctgagaaagcaaccaacattatacagaggttgaaaacaaccatgttcatccaccatgtaagttagaatacaggtgttgtgacttgagttcccctacatgtgtctgtcaaaataaatcctttcaatattatgacaaattttgtgcattagtaagagtatactcaattacctgattgtaatatgtcggcatccacgtcaaaagaataaaggtaccccagttatggcaaaagtgggagataataagagcccaaacaggtgctttagataaaattaacttccatggaatgactgttacaggttccttagatacattaccccccaaactaaattttttctcttcttcactaagttactggatcatctttcggttgagctatatgcctcggtaaaataaacatatacagttagacacagaaataacttaaagtaaactttagcttccacaaggaaatctaaagagcatcttagctacaacttatatcttctacataaatcatgctcaatattacagtcagatgattgcccaacaagatagcagctgctttacaaatttaattggtaaaagaaaaattcataataaaatcaactagtgactttgtattgtttgagagttgtcctctcagcaattggttctaattgtgttgctctaatatttttctgtaagatgttaatcaaatttttgtccggaaagaaaaacatactttacttagccatactgcaaaccagatacttccaagggagccaaaagagtaaaacacagatggccatccgaatttctggattagataaggggaaaaagccaatccagtgacagaaccaagatacatgccactgtacacaagcgctaaagatcggcttctctctgacactggaatccacttagaaagtaagttattcatagcaggcatggcaacaccctgtagacatagatagctactgattgaagaaacaatagttggactgtgttgtagagcagtcaagcataagaaaaaaaaaactaaacaagtaagaaaatcctacctcgccaatccccaaaaaagcacgcatgacaagcaaacaaggaagtccaatttttgcagcaatcggcgtcaaaatcgttgcaattgaccaccagacaactccgaaacctaatactagcttcccaccaattttatctgcccatatgccaccaagaatctacatgccacataaattataatatagttaatcggaaaaaaagatagccattcttaactttgttgggataaagagtacatatataaataatttaaacaccaaaacagtgtcaaaaagtgcaaattcaagcatacaaaatcagatcctttacagccgtacagccatagaacagcagaagcatgaccatttgaatgaaacacatgaatacgagaataaaaaatctacaaacggatagatataagtatattgagttagaacctgggtaagtagataaccccagaaaaatgatgactgaatcaggccaactgttgcactgttccagttgaattccttcgacatgggaagtattgcaatgctcatgtttacctacaaaaaagatgtcaaagtagtaagcaaacccatcacttagaaagaactacgataacaaccaatcaacatgtgtaagagttactatcccagtccaaagaacagtacaaccatatattgtgaaacaatgctgcaataatggagcaacaacaggaggatctaactcagtaagaaacaaaaacactcacacggtccatgttgcacaataggaatgcacaaaaacagagaactacaatcacccagcgcttaggaaattgttgccaccaagaagatgcttcttgcagattaccattgactaaaacagcttcgcctgacccgtccacagacacacgtggctccacatttgcatcatttatgtcataatcttcagacttgtaataagcacaggtcctgttgatcctcacatttgcagacttatgaaatacttcatttcttacatctagattatttaacactctaaacttgctccaagtgctgcaagatgcatttggagaaagactgctgtcacatattgctctaactctttgcttagaaattttgctgcaacaccttttactagattgcagagatggagggtgttgcctttcgttaaatttccctattgacatccactggttcttttttgaagagccagtagcatgaagaacatggccatatgtgtaattagatctataaatattatttcccagagtacataaagttcgatttccgattctctcttgaccatatcgtacagtaacaatccctgaacgctctcctctgtgatgtgaaacagcctgtttgtttgtacagactttacctgccatcaacaaatgagcattagaaagttacgaactttgaaagaatgagtgcattgcaaatgtatctgaatgcaattgcatatttttctgacagagatagcaagccctgtcactactctcaactcaaatctatttcaaatcaaaacatatggcacaagctgccattttgggtataaacataaaatagatctgcatggccaacagagagatatctccatgcaatattactgttcttgtactaaaatccctgcagccactctcatccgattttaactcataacatttagcaaaagtttccaattaggaaaaaaaaaataacagccaacagctaaaagggctataaaattataaatagaagagttggccataaattagtcattgaattgcttctcttcctttattttggtcttcacatacactccatgaaatgcaaaaatcctattggtaatggaagtagaaaatgtgaggttcccacaaacaatcaaaccaatcttgctttaagatttgtataactttttatatattaatctatgtaaaagcgttaagaaatcatacatgcaacaatgaaatcaatcgattctatgcaatatctccttatctaattatggatatttatataactatgtgcgtgtattaaaaaaattaaaaaaagaaagaaaaaactaataaaagataaggagctgcatgcacaggaatttgctccatgattagtgaaacaagtttaagtttcagtccaatgtaaactcagacacctctcgaatgaaaattcagcagttaaaacagaattttttaacacaattcataaacaagactggtataaaaactaaattcgattgaaaagaagacaatggaagagaatacccaaatcactgtttaaaaaagaaagaaatgtgccaacataatctgtcagaaaataaataaataataatagaaataaaactagaattggacttatggataagataagcagcgagtgcgaggttatacctgagccaataaaggaaccgaaattccgattcgatatcaaacctccgatagccattctgtttgctccgacaccagtaaaaacgagctcaatgaaactgaaagaatcagctccaatagaagaagctacttatacaaactcagtatccattaccagtgctttttctcctcgaatacgtcgccgtttttaacgctctctctctctctctctctgtgtcagagactcggatcagctgagaggataaccaacggcgtttcttcgttcaatttttgcttctcagatttttcttattattattattattatttttaaaagcgggaaaaaaatctgagtggcgttaaaacccgaggtgttgtaatcatgccacgtggaatatcatcttcagtaaacatgagaattgagaggctataattgaagcaaaaacgaaattatgggagtgcccctgaatcgcacacagaatctttcggtggtctacaagttcaacgagggtatttcggtgaatctgaagagtgaaatatgcgtctctttgttcaccgcagaagctccaaattccctaattccaccgtcgaaaacgaccggaaaagctattaaaaaaagtacattttaagaaacatgtatatatatattaactattaaataaatcattttattatattatttcgtatttcacagaccgcatatttcatagggacgtggaatatcctcaattgtaaacgtggcaagcctctcacttttcgccagttgggcttaaattgtgataggcaatcgaacgacaatgggatttttgttaaacgtcgtttgcattaaccacttattacagaattaaaaagtcccaaaatttggtgtctcctctctttctttttcttttttttttccgtcccaaaatttggtgtctcctctcctgcacctgatctaccaagactcaaaagataaaaaattatatattttattttttggtttaaacatatattatgttgattatttatatattaatacaaacaaataatgtagcattttaataataataatgtagcatttaaatagagatgggacacgaaacttggagacgtgtgattttaattaggcacattacgccactatcggtcaacactgtaaaatttcttgatggtccgatccgacacaatatcaattctacatataactaaactaattgacaagaataaaaaaaggcagcataaatcctccaattgatctattttatctgtaacacgctattgcaaagaacaattacatatctcgtataacttgattagattaatagctcgtgaaactctaataaaaaaaaattaatacgttatctaatgaagaaaagaatgctaataaaatcaaataaaataaggcagaaaaaaaaaacaaattaaatatattattaaggtaagtactgctaggttggcaaagcctaaaa

SEQ ID NO: 224995 - DNA, 3771 bp, Cannabis indica
aatgctattcaaaatataaagaaagaaaatgaaaagggaaactaagtatgaatgatgggtggtgggggaccccctatacatatgagcttaattgtctttaaccttaaattcagctcatccatccatgatccatccaatccatcttaaagtcctatacatgattttcttattacttcattcccatacaaacttcaatagcataaattggacaaacaaacaccacagtttagtgcaagctacctttcaccattttccttcttattcttcttcttatcacatatcaacatcatcactttttttcccttctttctttcaataaagagaaatagagagagagagagaggtagtcaatgtaaagttgtgatttcatctataaagaaaattaagaatttggttttggtactattcataagatctaacaatgaagtggaattaggcccaaattttatgtgctttgacaataggctcaactcttctttgctaagattctataacaccaagcatattctacactagactagaatattcatgtcaaatattacatacatggtagatgtttttcagcattgctattaagcaccagtggtgtccaacactttttacaaaaaatactttaagattggttagcaatactctctaaaagctattacgttagattatatgggacctgatacttaattacactaataatgatataacatgtaggcactagtgatgtaattcaaaataatttgaattgggatcggtcaaaaataaaaattgtatgtaatactctggtgcatattttgtgtgtacatacatcattactcgttagatggatccacttttttacgagaacgaatattaatcgatgcaaacaaagatttagaagctataaatatctatggtttaagtaacacatcatttgttttgtaagacaggccattgaggaattggattccatgagacaatcatttctacctacacaagttaagaacaactatgtggaacaatggaatctcataagaaaaggaaaagaagggaagattcttatcaatatctttcaacctctgcccaaaaaagacatatttacttgcagccttgataagcaaagatcaaacaagcaataaaaaagcaaagcattctttgctttttgaatagatatcatagatagatagatatgttttgttttgtaacataatagagttaacaagaccccaatgatcaaataattaaacataccaaattttctttatgtctcaaaagacactcttctcttctcttattatcttcttctttttattcttcaaaaaggcttttcatactcctgtggcggtggctgctcccacggccttaaaaaagctacacataatttacaaaccgcttaggaaaaatcgaataaagaaactaccaacagaaccacaagaccaaattagattaaagatctaacatacttagtggtatttctccaagtgacatgtatatcgaatcatcatcgccaatagctccctgcaacaaaataaccgccttgtggttcaaatattctaagttctatggttaatactaccgattagtgatactacttatgcaacaaattcaattggttgatacaagttggttttctgttacgaatactcgaatcaatcaaaacaactcaaggctgaattgcataacaaattcagatcatataagcatcaagaacatggttacctcttcattagggagaccaatgtcattatgcataggattgatgtgttctggtactgcagaacaatttggaaaatcattcccaagcaactccgagatcataagcccataaccgtcttgtgtatcaggaataccgccagtgttctgagcatggttatgaatttcgtctagatcagtataaaccgtttctgtcctgcatagttgaacaacattataacactaaaaacatgtatcatatcattaatcattaccattatcatggcaaaggaaaacttactttctatcttccataactaaatccttgtcttcttgagcagaatcgttttctaaatcgattacttcaatctccttatgatggtcactttgtggtcttttgctgctctcaccagatacaacattgttgttattattattattattacagttactcattgacaagccaatatccattggctttgcttctcttctcctttcagaaatagattggtacatgttaactgttgcagcatcacaatcatgattctcatgtgtctctgaaacttgcataagattaagatcacagattttgaatgaacttggaaagagctgtttctcttgagaaaaatcaccaccaccaacaccatcaccatcatctttatcattatcgttatcattatcattatcatcaatatccacaataattctatcacttgtttctcttggtcttttgactccttccttaacatcatcttcttcaaaacctcttttgtcaaccctttccttctcttcattatcatcatacacaaaagctctattgggcatagacactgacctctcacacttaatgtgttgaatatgacttgattctcccacattttcagcagactgagctctttgtatatcagagcaagttgcagaattagtttcttgttcttccacctcaattgttgttgctgttgttgttgttgttgttgttggagttgaatcaagctttggacttttagatgatgataataatgatgatgatgacaatgaagaacggattctagttggaaccttagcaaacttacactttgttaacaaatcagttgatgaggtattgttagaacaatctccttcttcttcttcttctccttcttcttctccttcttctttctcaatctcagatgattcattgggcttagaatcatctaaagtttcagactttggtactaaatcgttaatgggttgttgttgttgctcagaaacaacaacatcatcatcatcatgttcataataataatccccaatatcattactcaatctatcttggtcctgaaaagaaccacttctggaaattgcattactattgttattattattattatagtctctactaacccaatcagacccataaccaccacgatacggtggtcttctcctacctctagacccatttctgaacccaaattcatccccaacaaaccttcttctacttgacccaactgcaactgaatcagtcacagcatttcctaaccgagcaagagctgaggttctaccctcttgcccaagattgaaactttccggttccggcaaccgagatattcttttgaaactaccgttggaccactttgaagggagagagagaacgtttggaggtaagattccttgggagactaaatactctgctgcaagacgaccggcgtcgacgaagatgtcgggctttcgcggaggtggttgtggtggttgaaaagaattggaattgggacggagaagaggtcgattgaaggaacggtggtagtcgtcgggagagatccgggaagtgttgggcgttgttgatctgtacccatttccgggactacgatgacgagcgtgcatattcaactaactaacacccaattaagctcagctgatcaagtttaccagtagatcgatcgattgattgattgatcgatcaagccatgagatgagagttgagaaagtttggactttcagctcaatccgaatagaaaaaaaaagttgggatttttattttgagaagaagaaaaagaagaagaagaagaagaagaagaagaagaagagttgtgttgttgggtttggaggtgaaacaagaaaagagaatttcag

SEQ ID NO: 224996 - DNA, 1646 bp, Cannabis indica
gtggtgttgaggttgtgcagcagattgtttgtttttttatcatttttttcttttgttttgtttgattgttttagtgttgttttaccgttgttttgccatgattatttattgacgtcgattttactgcttttgtttattcttgtcggaattaatggttattttccggtgtcctggtgttgttgtggtggttatgtctgtgattgtcaaagatggaggcctcatacttttgttttgttgttgacagtataaaagaaaaaaaaaaagggaggacagtataaatgttaattctgccgtgtggcagtaaaattgaaaacaattaccccaaatgcagtatttttgtaaaatgcccaattttatatcattcatcgaaatggtctcatatccagaataatgcaaaatataagtacttattaaattctgatacataggaacatattttaatttcaactatactcatataatctcactctacgtctctactatatctacgtgtatggaagacttcatctctgttcaataagtgtgttcataattgattaaacgacgtgtcgtatattttaagacagaaacaagatttggttaaagcatatacaaatatacaaaatacaatgcacaatgagaatttttgcatagttggtgaagcattctcataatcaacctagcttttattacatccatacacaatatatatagacaagacacctcagctcatgattacaaccttaattatgcattatttaattaatacccccaaaaaaaaattcttaagaaaactattgtattataagcaaattaatgaacatatatatatatagtctagctgacatactgcttctcaagaaggcttttgcaaaatgccaagtcaaatctctcttcaggaggatcaccaatgcagtcaaaaactgcatcagcatttaaaaagtcttcatctgctgtgtatctacaaccacaattcaaaataccttaatcaaatcatacccaaaaaaaaaaaaaaaatagagagaaagctcaagtggtgaactatgtgattcaagaaaaaaattacccgcttttagttactatgcatgtcattccagcagctttggcagcagcaaggcctatggcactgtcctccaccacaacacagctgtagatcataacagtatcataacacatcattttgttttagtacaaaatgttaagggaaaaaaaacaatagaaagtttgagcaaagctataaaataattaacttaattagatacatattattaaatgttatataaattataatatcttaaatcatatacaataaacaatttgataccacgtgttaaaaaatcaataaaccaaatacaaaatttgtatataagttagaacagaataataattagataataattatgtatacatacatgattgatccataacaattaccttaaatttggtattgcaatactatttactaagttttcttccctagatatctaaatttaattttgtttttcagattatcaaaagctaacaattgtgatgagacaatgtatatttgtagagttaagaatgacacttaactatataactatagttgaactgggcttgctcatcaaagctttagtaaattagaaaagtccacactgtttcaacttgtaggagtactgaaaactcag

SEQ ID NO: 224997 - DNA, 5404 bp, Cannabis indica
ttttaaattttattctattctatatatattccgattctcattcttatttttatttcttccaaccaaacggcaccttagtatcttggtttgtatgttcaatagtttaacatgctaagtaggggctacttatgtataaaaaatgttaatgggctcttaaagtgttaagcaccacaagacgtgatcaattgctattaatgtattttgatattggatccacacatattttaatttaataaataatataagaaatcgcttaccaattatagctagcataagtgtagctttggcaccttaagatgccaaataacaatattccttcttaattcttttttttttaataaaattccttcttaattctttttaaaaaatgattattgttaaaaaaaaaaatcgacgaaaatcaacaaggataacgaattcaacaaatttatgaacagagtgtattggaatcctgatgtcatagttgcatcttcgagaaagaaaaaaaaaaaagtcgtcgcgtgattaaccttgtgtagttttttcaggaaaattgttgttttcatatcaaaacgacgtttcaaccagatactaatttagtctggattgattcggaaaaagatctacaaaaattgaattggaagtggaacccatttaaattgatgatatataatagaaaaaagttgaaaccggttgttaaatagaaatataaatatgaatttaaatattcttatgagtacgctattataacatgatacagtcactaaacaaataatcctacactagtctggtttaattatagaatcattgtctataacaatctatcacctatactagtttcataagaggggacatggaaaaacccacttaagaaacttctttccacgctaagaattcccccccaatccaatatctcacagtataacactacttaagaacaaatcttttttgttttacactaaaaataccacaattccccacagaatcaaaaactgaacactaacccagtttctatatgcctgagaactagaagaagtatcagtgacaccaacaagaaacctacactgaccaacagaaggatctaagaaagtaaccataccgagcccgtcaaaatcgcaactttgtaagttctgcatttgcaactgatagtaactgttgaaagcataagaaatatttccctttgccccaagttcattacatgaccctccatagttgagtgttgtgcaatctgccatgctacatgccagcttcatgtggttagccacatctgataggtccctagatggatttgctacacaccacctagatggaagatattcaacattttttgcattcttcaaaaatctgttgcccaaaccaaggttcaatggatatttagcctggccgtcgaaagaaaatataccccaatgcctttcaaagtttcctggaagaatgctcttggctccttcgtcaagcaggctgaaaagataaacatccatgggcgggatacctggccttaagggggttcctttcctattcaaaacttgattaatgaggccttggttgaatgcttttgcagcgctgagatttgcaccaatggccccgtctgctggccaacctatctccccaatgataattggcatctgaccatatccaagtttggcgagagctgcaaccagagtgtcgaaatttccatcaaatgcatttgagtaaacattggccccatctgtaacaggatgggtagttccaccaaagaatgcatagtcttgagggaaatctgaattcccatacaggctgagaaaagggtaaatattgactacaaatggagatccatttgagttgagaaactgaacaatttgagtcataatttgtgtcaactctggtctaaatgcgccttgagaaggaagttcagcctcataggcatcagcattgcaagggaccactaactttatgtagttagcaaggttcaccttcgccaaggattgttgcagatttagcatggcaggcatcacataggactgaaactgacctgagtagctcgtgaggaagggttcatttccaactgcaatatacctgtcatcaagatatacatgttaacgcagaactcctctcaataaaagccaattaataatggtatctcatctcaaatagagccagcagaagcaatgaccataacattcgacaaatgaactgcgccctttgacaaaaggtcaatctctcttgcttaccacatcctttgtctgtgatcaataccaaggataccaggtcaaaaatttaataagtcaatcatgaaaatctaacttcaagttcatctatatgactaaaaccgtagtggttctgatacagcaccacttaaaacttttacaagcctctctaaatccatgtctatcaagcactttgatcactaattacaaatatttttttaattggaaacaaaaagtatatttataattttggatgatctgatcaagccataactccagaacgggactctatgtgcacggtgtcaaaccaacaagatgaatattctctaagagaaaaaaaaaaaaaaattccctcttttctgctagattcagccaacttagtgatatctcattatgaaaagaacacaggagatgattgccgatgaggctaagaatcaagatgaagaaaaaatgtctgttgaaactttcacgttaataaagctaagacctaaataaggaatttgcttatgttctgaacgttttatgtcctaccactagcatcacatatgttaggttgcagagattcaaatccagaattccctataagagttaggaactcaacatccatctcgtgttgttattcaatcaaagcacaagtgataactaatcatgttacctatcaagtattttttttttttctttttttacaaatacatcttcagcaaacaactgaatctaaatatagaaagaaagaaagaaacaaataaagtaaaagataacaaatataataaagagaacaccggtggaaaagagtaagaagagaacaaaaagaatcaaacctgatatcaacacctccttttcccacaaaggcagacacattctgacgaacccatatatcagaagcagcagtggaagagctcatggaagctaacatctcatttgggatcccaaccatgacctctataccactacccatcagagccctgagaacaccatggtcggtatcaaaaatcttcactttggatatcttgttatctttcaaaagattcaccacggtcgaaggcttgagcctgtgaagagaaatggtaccccagttcactccaatggctgattccgcggttggaagtgatctccaaactactaacagagaaaacagggctacaacaaccgttatgaatctgggttccaacatttttgtcaaatgaagcccaaaatatcaccaaaatccttcactcattcgattctactgactgggtttttggctagtaagccggagaagatgaaaagagagagaaaggtgagtcctttttcaaacggtcactgttagacttgtgttaggtaagttgagagtggtgagtgaatgcggtagagaaactaacaatgttagccctttaaaagagtaaagttgaagaaacctccagaaaatcaactgttaataatatgcatatcacaacagggaaagaatgagctgcttgtatacactcgtaaaaaaaagtgtgaaaggaaaaattatttaatgcaccccaaaagggtctgttatttagtatattttataaaattcgtgaaaaataagatttaaatagtttattttatatataaataaaaaaattaatctataataaattatttagattttattttttgacatgttaaatattttagaatttctttaaattttataaaatattttaaataattaataagtagataattataaaaaaaaaaattaaatattttaaatattttaaattaattttttttttcagagatactgaaatagataggaatatttgttagagtatgcattataaaaaaattaaaaatatcttaatttattaattttgaaggaataactttttaattaattttctatttgtgttcttattaatgggttaatgaggtgtaaaaaggaagggtaatgtattgtttgatgtgatatggcttctatcccctgaacaaagcgaaatttgatgtgacacaagtatgaacacactgctagtctttcggtttcattcttgttagtttaatatttatctttttcaaatattcccaatattattaatattcatttgtttaaaaaaattattcgttcacttaagaagtgattatctaatcggtacaaaatttgggcaacattttccatagagcagcagattttgtctagttttgtttttatgacacggtaaaaaccagagacagcactatttggaactctaataagaaagaaatatctattgattatttgaagcaagaaaatatcttaacattattgatctgcataattctaacgtcatcgtgaaagttagtaattggagatattatatatgacaattcaatgtttttatctatttcctttcagataataatttcaaaccaactgccatttctcacgagggcaaatcaggcacggtctatccgacgtcgttttctatatttttgctataaaattctaatttaaataaacttcttgttgtttaggccacgctgacaagaccaaggtgaaaaaaaaaaaacgggaaatgattaagtaaattgtacgtgtttagtggaaaataaataaaacattcatgtggagaggaatagaacttgtagaagcacataaaggaaaaggtgtcatataaatattgttttggagaaaaatcaactaggttatgattttaacttagaaagaggtccaaatatatttattaaggataataatacatcaaaaggtattaagcaagcacacggcttgcctttaataactttaacagtatcaaagatgaatcctccatttatggccacaaaagcttgatagctctggctctaaattatttaaattcccaacaaagtttgagggagggaaaggacccgtacggctatggtttacttaaatattattaatcaagcaatttcgtgtggcagtttagtattattagcttcatgtgattgtgttttagtagtgtcttttaggcatgtgcccatatggaagataatttttattttatttttttgctgaaaatatggaagataataattgttttgcaaaaatggcggtgagcccaagctcaattgctcacaaaaatgacaataaactacgactcttccaaaccatagggaatgttatttctgtttgtaagctgataaggtccacctttgagaaagtagaaagaatcctagtttttcttttgaaagagatttgtgattctctagtcagtgtgtgataaagtggtccatgcaaattggttgtctttctttatagaaagcaagtgtatgtgacattg

SEQ ID NO: 224998 - DNA, 6129 bp, Cannabis indica
aaaaaaaaaaaaagcattatataatatagtaattaataagtttgctaaccaatattcacattgtaaagataacaaatctttgaattcattgttatgcttttttgatccaaactctaaaaagtactgttatatagtttaaaatttattataaaacaaaattatgtatgcatgcaatcagaatttatagcaataatatatgtacggtgattccatctttgagagttttttcgagatatctcatgttctttattcttttctaaggaaagtaatagatgaattgactatcaaaataatcagcaatcacataaattaaagcattgaaatttatgatgaaaatttcataacaactaattaaacgttaccaaacaattcaaacttacaaataacaactaaaaacaatctataacaatacaaaataattacaataacattttaacaatataaaaattaatcacttttccaatcacaatatacattttttgccacaatagaaacaattgtcttttacctttttgtttttagacttagggccgactttattctttttggctttaggtgccattttgcctttcggcttgggcttgctactactgtccttaccatcccgtttcattttcttattcgaataagaaagagagatgaactttgctttaatattgtttgactcacatttcttggacttatctttgttaaggttttcaacataatcaactcgttcaactattgagtcatgttgaactataacttgttcattacacagcttatcgtgaacactttgaaacaatgagtgagcgactcaagaataatgctaacttgagtcctcttgtctacgatagactcatgtgtctctgcctcatacattagcgtaatcatgtgcaatgcataattttttacaaagacaactcagtaaggaaaaattttgtggttctcacaaaccatcattatgtcagattagatttccactgagattagattagtttttcaattgctagtaaaacattaagggaatttgacatagtagatatttttgaaataaataaaatgatataatgattatacttgaataataaatatcatttcaaaattactataagtctgtatacgtgattcatgagcacatacaagtaaaatacataaaattttgtttaagtgttattccacgataaaactctttgacaattgattgccgatttatggtcggtatcgagtcaatttcattgatatgagacaattctcatatttgttattttgaataaatttaaatgtctcatattttctttttaatatataaaatactgctttttgaccaagttaacaactaaccgcacgaagcttagttacactttgtgagtgtaaccattatttcagattctatgactaaacttagtgtcacactaaaatacatcacttcttcttatcttattcaagagatcaactttgaacaatagtatagacacataccttccttagatagatgaaatttgagccgtctcgaggctagtctatactccttcggtgttaatcaataatgtcctaggttacatatactcctcccactcactatattagtttaatgtgtttgttttattaattctcaaaattaattttttttgggacccactaatatttttctgtctatttttccttttgttcaactttctccgttaccaaacaatctcttctatccatttttcttttattttcttttttcctcttttctcctgaactaaacataaggccttgtttgacttagtttttataagttcttttttagcttttagaataaaaaattacttctaagagtgtttggatattaaaaataaaatattatttttaatttaaaaatcattttagaaaaaattaggatttgtagcttctcctaaatggacttttgagaaattatttataaaattaaaataatttaaataattcttagtttactcacaaaagattcttttttattaaaataaaatttttatataatagttatccaaactataaaaataacttatacttatcttatacttctaattattataagtaaaaataaaagcttagtcattttctatatacttaaacacatcagaaaagaaaaatagatcatgatatcaaactaatatttaaaaattgcttattttcaaatttaaatatttaaataatactttatagatatattttgaaaaataatgctttatatacttttttttttttttgtgaagaaaacagatataatgctttatatacttgggtaggaagtgatgtacgtataatttgcttcaaaaggaattggaaagtgagaatcgatctggccatgttagaccaatatataatagtttatcatctataattaacttataccactcatctcatggtcctaatggcttgtaatttaccatatcatatgacatatgagcttagcttcagtcctaaaaaaaatgagtaaacgttggtggaacatattcaagctcataaagaaagtcttaatcggcatatggacggacgcagtaaagaaagtgtgggggttatagcccccactaaaaaaatagtgttaaaaaaaattaaatattttctatttaattaaataattatactacaaaatagtaaaaagtccccacaaaataattataattttaatgtaaaataaataataaatatttttataataattaagtccccactgataaaaaactttgggtgcatcacatacatacatatatattatatatgtagaaaccaggcaacgtacatatacatttaatttgttttgcttattgtcccaacatatttgagaattatatcaagttgcatttgttaaagactaaatgagtcgtaccatttgctaaaagtttcattctgtgtagtcttggttcccaagtgatgtcagtttcaatttaagatgactttaaaactagataaaagatacataatatttaaggtgaagatggtttgactttcacaaattcccacttgaaattattttatatattgagatagtgctattatgatccgaaatagaaggcaaacaatcatcttaggtacattcccatggtgactataaataaaggagactcaacaatgaaaaatcatactcactcgtaaagcccccccaaaccaaagcacatagagaaagttatctcaaatggctcaatatagcccacatctcattgttgtagccctcctcttagggctactccaaataatggttgctgcagctccaactccttatccaactacccccgaaatcccttatcctccaacaatacctactactccaacaccaacaacaccatcaggaacactcccaacaccatcaccttatcctccagcatcgcctactacttcaccaccagcaacaccatccccaaaagacccgaaaccatcaccttctactccaaaaccccaaaaaccatcccctagtactccatcacccgcaacgccttccccaaaacacccaaagccatcaccttctactccaaaacacccaaaaccatcaccatcaccagcaacaccatcaccttatcctcccacatcgcctactactccgtcaccaaaaacaccaaaaccatcaccttctactccaaaacccccaacgccatcacctgtaacaccttctccaaaacccccaacaccatcaacgccatctcccaccactccaacaccatcaccatcgacaccttatccaacacccccaaaaccatcaccaccggtaacaccatcccccactattccatcaccaacaacaccttctccaacaccacctacccctactccatctccaccatcaccaacaactcatacaccttatcctcctccaacccaatctgatgatgctggagtcaagagggctagatgttggaataagaactatcctcaatgttacaatactgaacatatatgtcccaatgcctgtcctggtggatgtgaagtcgactgtgtaacctgcaagccagtttgtagtaagtctcccgaaatagattttttattaagtaattcttataccaaagagtaatttctttaatactactatatattttttggcaaatgcagaatgtgaccaacctggagcagtgtgccaagatcctcgtttcataggcggggatggtatcactttctacttccatggcaagaaagatcacgacttttgcctattatctgattctaacctccatataaatgcccacttcattggaaagcgtaactcaaatatgaaaagagacttcacttgggttcaatcaattggaattctcttcggtaagcaccaactctccattggcgcacttaaaactgatacatgggatgactcagttgaccgtctcttcatcaccttcgatggtgagccaattatcctaccagaatctaaaggtgctcggtggcaatccaacaatgtcccaagcatttttgtagtaagaggtgttgacactaataatgtcatggtggaggttgatagaatccttagaatcacagcaaaggtcgtgcctataactgaagaggactcaagaattcataattatggtataacgaaagaggatacatttgcccatctcgaactcagattcaagttcttctctttaagtaatgaagtaactggtgtgttaggccaaacatataggccagactacactagtcgtgtgaatgttggggcaaaaatgcctataatgggaggagaaagagattttaaaacttcaaatttgtttgccactgattgtgttgttgcaaggtttaagggtattaacaataaagaagaagatactttagaaggtttagaactaccaagcttaagttgtggtagtggaataaacggacaaggagttgtatgcaagaaatgagattgattttctctatattgtcacaaatggtaatatattcatttttcagcaaataaaataattacataaaatggaaagtcaatgagactattcagtgtaatctgttctcttagagatgaatttatataattttattttaaacaatattaatatgaatgaaataagtttttatgtatttctcttatttatatattatgattgtttaatttgttcaaattttttatattctctgtactacaaattattttctctgcattttagtttatgacgtttatcaaatgtgatcattggtgtggaaatgtatggagatttttatattttgagaaataagtaataaaaattgatatttggcctttagtattatttatgtggtgccatgtgtccttaatactgtttttgctttattcaaagggttaatataaatactcatatactgtgtaccttttctcttcaatgaatagaaatataattgctttcttctgatatggtatcagagccaaacagctcctcatggcatcaataaattgtactagctctaccctacaaatggaagatgaaaatacccaaaatacccttcaaaaccctaccatcattaactcacaaaaccttagtaatgtagtcgcctcacccatcttctcctcccttgctttctcgacaccctctttttcttctctacctccaaacttccttgcattaatttaaccaaaccatggcagtcaaacttgatgattctaattgtttggagaatgaaaattccaaatattatcattgccaatggccttgaaggttatattgacaatattgttgcttgtccttcacaattttccagatccaacttcgaacctgacgaatcagacattcacagtgtggcatcgctacaatcgacatctcatgagttggctctacgcctccatcttcgattccatgcttgggcaacaaatagtatgtcttaacacaactgcaaaatatgggtctcccttgagagaacataaataataactttgtttgctcggagctcagattttcaaacagccttacaaaacttgaagaagaaggtcttactgcttcaacatatttacagaagctaaaatcactttgtaacaccctcgcatctgatgatgaaccaatctcttcccaagatcatttgacttaccttttaaatggtctaaaacgagagtataatgtctttgtgactccgatcttgaccagacctgtcaaacccactgttgaagaagttcacgctcttttactaagctatgaagctcgcctggaacgtgaaatagcagttgcatcgattagctcc

SEQ ID NO: 224999 - DNA, 1930 bp, Cannabis indica
gctcattttatatttactttttttaattttttaaaaagaaaaatcttgcataacgcgccaagtgacgcgtcctccttccaccagcagcaaactggacccacatgtgtcaacctttaccctaaaaactagttaataccgtataaaagtaaaaagaaaactagaaaaagataaaaaagaaaaaaaatacatatttaattaaaaaaataaataggaaagctttttagtcaattcttgtaaatttccctttttattgttggattagcttataatttcttttagttctgtttttgtttctgtgttcttgactggtgatttcaaatcaccacaataacaaagaagaaatgaacagaaatttggtggaaagaaagaaaaataagttctatatttatttatgtatatgttgccttactgacgccattataatatgcacaagagtataatacaagtctccactggcatggcagtggtatgttctaataaacattaggcttgcgccattacaacagtcaacaacagcagcattaaattacaaatcatgacaatattagacgaagaatatctcccgagtgcttaaaggacttctcagtctcttccaaacaatggttcttctcttctctcgtccagctctgagaaaaccataccatacaagttatgttttaccaatcaaatacacacccctacaccgattaaagtttcaaaagggtacaagaaaagacaagtacctcagctactttgttaagcttttccctcacattctgcaataattgggaaaggtcaccatcccatttgtaaaattccaactccttgttgtttaataacttttcagccacctaatgcaaagaaaaggatgccaacaagaaatcttatgcttcaatatttggtgaatgaatgacatctttgtttttccttgtaaaattaatagaagacaaaaaccgtaatttaggtgaaacaatttgtttctgatgaagttatagcttaaagcttaaccctgagcaggaatatgacaccgaaacaaagaaacattttgatacaatagaactttttttgcatacctttctccctatcattctaccacctgcggtatgagcaaagtatgtattgtagaagtggcacacaaaagcttgtggatctgtctctgataattccttgaggtactcagaataagcaataccgggaccagacggttctggtatggtatagccttgttccttgaaccactctaaatctttagccaaactttcagacctttccaatcctgtatttctgaattcagcatctgtataaaaataagaatacatagcaaagctggtatgttagctgtatcatagtaaagtcaccacgagtccacgacagtatacatcttgatagttgaaaaatcgggacacattacctactgccactctcaggagctatcctaccttagaaataatcattaagcagatgtctcaattgataacaatcaaagtccatttcgtgtatcatactaaatcctagggaagcctaatgatgttatgtaattgacatctgaagttaaagatcatataatgtaagtgaaagaatgaacattctatcatatttctactatttttctttaataagatcatttaccggacttgaacaccgcacaattcacacactcgcaaactcaactatgagagctagccagaatctcaccataattcagttctctaatcctaacagcaaaggaatgttttgattgttggaatataccatgtcaacaactgaagaacaagaacttaaggtaggactatgtctgacaatgttaaagtatgaaaatgagaaaaaaaaaaaacatccaataagaacagtagagccatttatgacaaagacaaaacaaaccttggatccaaactaagatcacatatacaaggacccacaatagccaataacataaagtcataaactgcta

SEQ ID NO: 225000 - DNA, 4128 bp, Cannabis indica
aaaagaaaaaaaaaaataaatgaagaagaatataacactataataatttatgatattacattacagtgtattatcaaacaaaacaaaatacaaaacttcctcctatcaaaacattaacacccaacccatcttagattaacaaagagaataatatataaaacaatataacccatcataaaatatatataaatatttagtatataaaaaaaaactactgatattttatacgatccactagagatatgtttctttcttctactggtacatgtaactaaacaaattagttaataaatatataaaatcaaattattttgttcaagaaagtaatcaatgcaatataatacattctatataaaatgtgtaatgacaactttgaaaataaaatcatactatacagtccaacaaaccatttaaccatcccacactaaaatttgttgagtgttcttcgttaaattatgaaaatactataaggatttattagtaatttgaaaagaatgtaaaaatctataaatatataattgtgtagctattatgtaatatggaatgaaaaaataaaattttagttcaattagagattgtcatgtaactattatttttaccaattgatacaatattaattgtatcggaatgcaattttcgagtcagtactaaactctaaatgcactctttgagatagtgctaatctctaacttaaccgatattctattttcaaattccatatcctataaatataataactatacaattacatatttatagactttcacatcattttcaaattattaataagtgtagttttatagtctaacattctgtttattataacattgataattagcataatattaaaaactaaataaaaaagaatgtatgaaacattaccatcttattgtattattaaagaagagttttgttacaataatttgttgaataatgacaaatgacattgtttcacaaggagaacattttatgagaatgataagaaaattccagtgctcaaatatataaccattcaaaagaagaaaaaagaaattgaaatttcaatgctttatattacagagcatattcaagattggtggcagaaattttcaaatcccatgtattcttggttctccattttctcaatcatatttgctatgccaactccacctataataatccaataaatcattttaataatttaatcaaaatgtttaatgattttatttttattaatttgaaattttacctaaactgattgcgctgatgaatatggttaaagctagtatgaagacgattatcgatgttcgaccaagaatcgcgattagttttcgaactacatgctgaccagtaaatgcagcaattgtagcaacaagaacaaagtaagaagctgcaaaagatataaaaattagtgaactcaaaactattaagaaattaagttatctattagagctaatcttttatagaatttgacaagtttatgatttttttttttcagaaaatttcatatgtaatttttggtaaaccacaaaaaaatcatatgaatgtaatagaaaaataataacaaaacaacattaaaacaatataaaaaatattatataactaacaaaaaattaagagcacaataataagagtacaacgtaaaaatacataaaattatcgtattatatataaataaaatcttaaaaaccgtaaatcttaacaaccgtaaaaaattgtccttttggtatttgttttaattgatacttactattgagatcacacttagattaaagtagaatatgtttctacttaggatccacttagtctaggaattcaattttttttttttagaaatacacatttttttaataacttttgcaaatattacttatatttttttttaatgaaagtaataatatttttttttaaaaaaaaggctaccaaagcttaccatatgggactgggaaacgattgagaagataatactgtacaactgacatggaagatgagaataccatagcaaatgttgatgtagcacttgccacctaagtaaacaaacagtacatacacagtcatttaatctagtttgtctttctatgcaaaacccaatttagttttgttgctaattgatcagcccagctagtcaaaattgagtcttttcataatttagctgtatgtttggttcaaagtttgaaaaagatttcactacaaaacaaacctgaggagggattcccagttcaaggaaaagaggtcctaatatgaaaccaccaccaaggccaagcaatccaccaaccataccagctataattccacaagagcagtacataaatatttgatgtaatttccaagttgtgatttcttttcctttggatgcaatcactctagtccctctgtataaacatatggcctcaaaaagtgtaactgatacagcaattggaacctacacaaaattccaattggcacagtaaggtatgattggccacacaactaatttatctgtttttggttactaaaccttacctgcaaggagtttaagacccaaaatttgatggagcaagttttggcatatgtctgcatatagagagaaatttattacaaccactataggttcttcttctagcattaaaaaatgtacaaataagaacaatcctgtataaagggggtatgcataaaggtatttatctaattatcaaaatgggattaaaatttaataactgctaagtttaagataaaccccacaaatctcacaccaaccaaacacacgcaaatttcttactttgataggttaaatcatagagaaatgagacttactttaacaatctgaacaataaggaaagccacccaaacatacactagaagtgataagtctttccaatatatgttttgcagcataggcacctgcatataagtagtaatggtaaaattcaagaaaatgaaagcataatggtttaaattgaaagtttttcaaagagtatttatgtttagaaaactttaaaatccttggtagtggatacatattaaatgcactcttcgacatagtatcattttccaaaatgaactaaagttctattttttcattccatatcttttaatctataaacaattacatgtttatagattccattttcataacggaggagtggttggtactcacttcctcctcgtgtttagcagttggaccgctcggtagcggtttgtagtctgaaccagattcatcacctggtttggattctgattcttgctgtttctgtgcatcctgaaattcgagtaagatctgaaacacctcatcaacatgtttgacaaaccaaaaaatgtttgttaaagaaaatgaagcaaaattaacaattgatattgttacctttttcatcacagtctcttttttccatgtgtctatacctttcaataaggcttttgcagatgtacctgtgttttttcagtgcatttcattacaagactggttttgataacaataataataattaagcaatgtaaatttattattacctaagaagagaatgatgagtagaacagtgaccatccaatcagcaaacatgacattaaaagccacaccaatactaattccaagcatgagcattggctgaaatagcaaggctagatcataatctataagaggcatctccaatgttgggtgtctaagtctcatattatagtatactgttgaccctgcagctcccataatcatgcctacaaccccaaaatttcataaatatttatgcacttcacaacccaaaatagaagactaaatactattttaaaccagcatttcacgaaaattgagctcagggtattattttgtacaagaacacgtagtaagagacttacactttgaaatggcagtagaagacttgggatcaaaaccaacaatcaaagtaagcattggaacaaaaattccgccacctccaacgcctccaacgcttcccaaagccgcgccaaagaatccaactatcgatcccacaacgattttccagccaaactccatctcctgtgcaaccattaagtaaataataaaaccatgttgagttatttatacacacaagaatttcatgaacataatgtgatatgatataaattacttacaggccaaacatgttggtaagaagattttccaccctcccagaaaaaatgaataactctaattaaaatccc

SEQ ID NO: 225001 - DNA, 4403 bp, Cannabis indica
taatattagttttgggttttgatattcaaacatttataatggttagctctctctaagcattcttttacgtcaccaagcattttgtgatgcttttaactaaaagaaaaatgctaaggaacatcttagtgccaaaacgtgacataatatattttaatttaattaatgatatgtgaaaccgctaacatagtatattttaatatcgtatggaagtggtgttggacacttgtagcaattgacacaaaagaaggacccacagacaacaaatgcttggaagagaaacccagctgactagtgtctgtctcttctttagattcttttcattttctccaatgtctgaacaaaacccaaatcacaaaattctctcaccttcttctcctgtctttctctcatggcctcaggaactgggacttgtttcgacttcgacgtgtatcatgactacagtgaaatgacgtcgtttaataagagtcgggcacttcagacgcaagagagctatcagttgcagctcgctttggctcttcgcctttcttctcaggctgctttagctgatcatcccaatttcttggacttcaagtcccaatctcacgatcaagatgttgagtccctcgctcatcgtttctgggtacgtaagtttaaattctggacacccaagaatatcgattctattttgtgggttttgctcaattctgcgttttaggcgcagagacacaatcaaaagcaatattcggttcgaatcagtatcatcataggttgtcttttgtttctttttttgccaggtgaatggttgtttatcttactctgacaaaataccagatgggttttacctcattgatggactggacccatatgcatggaatttaagcactgatccaaacgactctggtcgaataccatcgttggagaccctgaaagccatacgtcctcgtaatgaatcgtctgttaaagttgtcgcggtagataaactcagggattctggtttgatggagctacaaaattgggtccttcgtctttccagtacgtggttcacaactgttgatgtgatttatcagcttgcaaatcttgtttgcaatcgcatggggtgagtttttctgcttcattttcatgtaaactgatcttaattcgcatctctaatgagcttttactattaccatcataaggggtgctgttgtttcttctgaagaagagttggctaaccgctggaaggagtgcagtgtaaatttgagtgactgctttggctccattgtagttcccattggttacttgtttgctggactttgtgttcatcgtgctgtactgtttaaagtaattcactttataactcatgttgttagtttagaatgctagttcattatatttagatcatctcttttcttccccttggaattagcacacccattgaatatctctgctatttgcattttccttatgctgcaagatcttatgggattgcactgagcctctaaattgattttttttcagattttggctgacttggttaacttaccttgtcgaattgttaaggggtgcaaatactgtagtaaggatattgctgcctcctgccttgtgcaacttgattctgaaaagtatgttgattgactggacatttcatattaaatagtggaattaattcttacaaccagaaacataataccaatgattattgttcacaattactcaatgttttgtttttaatgatagaacacaatcactcatacttgtggtaacagtttgtttcttttaattaagattttcttgattgtgttagttaagatatgagttagaagaaatatataaatgatgagagccttagctcattttacagaagtaacttagatcccaaggtgtctttcaatcaccatcctcactccttagtaatttgggtcaaagctcactgggtcctagttatgggctgggtgttgttttatttcttattatcaatagtagcataaaacttgactattattttgttactcaagaccttctatgtatgtgtgtatgccttttctatttgaagcaaaacattaagcataaggttagatatgggattggaagctggtgaatgagctgcgaggatagtttagcatgttctgaggatggtcctaatattacggccagtaaaaaggctatttcatgtttaggcatgcaaagtcaagaaaaagtatactatgaaaggccgactatcttttggctacatagaaaacagtttggtttcttttttaatgattttataagaaactttagaaatgttatacgctgcttaatgatgataaatagcattgtattcttccagggaatatgtggttgatttgcttgagatgccaggagttcttagccagccagactcttctctgaatagtgcattatccattttggtttcttcaccactatgccatccaaaatttaaatctgtcaagacttctcagaacattcagatgttagcaaaactttatttcattgaatatggatctctggctcttgcttttgatgacacttcttctggtaagtcccttatttcgtcatacatgttctaatcattcggtatactactggcagttgaatgcaatagaatattattcagttctaaattgcaattgtattactacctatttctattgtcataattgttgctctggatgtatctgcacattcctccatttgttgaagccaacatagcttcataatcaggatggttcaagaaataattaggagttctctattaaacaaaataaaccgagatgttttttattttactgctgctgaaactgtagtcatcactgttatttcaaaatatctgagttgaatgattaagttaaaaccaaaagacatgaatgggtggctgatgtctaacaagaactttcataatatatattaaatgaaacagaatattctactaagggtttgatgacaaacatgctcatacaacatcatgactaacttgaaatttttctgatcatagtaggtactcgtaaaaatcaagacgagagaaaagtttcaagaagacctgaagcttttgatttaaactacattgacaggaataacattgcatccacatctctggaaaatcatgaaataattgcaccactttttcgaaaaagagctccactgaatatcacaaattctagagatcatcgaaggctggcattttctgatccaatttctaatctcatggactctacacacttgatcaaggactccattcaaccacgtcatatcctaacacttcactgtagagatgctctcccagagttttctaatcatcggtcagctaatattatttcgttaatagagaaaaatgaaccagtaaagagtagactaaaccgtcaattttgttttgatgaggagggttcacacatcttgtggcgtgaacttgctttagaggagaaaattggatcaggtaattgttgttgtttggaacagggtcgtatagaaattgtgcacttcatttcctataatgttgtacatttgattctgaaaaaaaaaaatattaatgaaataatataaaaatgaatctgtcgcaaattctttcaggctcttttggaactgtctatcgtgctaaatggcgtggctcagtatgtgttctttgtttcatttcgttccattcatgatatacatatacccttgtatttttgttatgtctagttggttataaagttcttattctttcttaactgtgaaaggttatcattgtattcagttgtaaatttgtgattttaacattagtaaattgatgtccggttggctataaagtgcttattcttatttgttctgaaccataaaatataagtcattgaaagcatgcctctgtatgcctttgtggccattttactttccagaattgactcacaagtttgtaaaggttgtacctttaagttaccaaaggacccatcttcttaccgaccttcatattcttattcaatttctcagttaatatgtccaacccaagatgcaggtggcacaaataggtttctttatcgtgagtgtgtgtgtgtgtgatagttttttatttattttctatcataagctcagtgtcataaacattatcgatagagtggtatacattgaaggagacatggggtttagaacaaaatgactgtattgtatttgtattcgacatttgatgtctgcaacctagatttcgttttgaagatatcaatcttctctctctcattttcaaaaacatgcaattaatcctattgaggccacggagcaagcaagtcagccattggctaagcttttacttgtagtatataattactataactatgtgaaatggtttcttctgttcaattctaaagctgaaaatgtttaatgtgcttaccattttgcattgtattgtttgcttatcattctagtagaatgtctttgcctgcttctgaaactagatattttaataacctttaggatgt

SEQ ID NO: 225002 - DNA, 5444 bp, Cannabis indica
tttatgtgctcaagccaagtgagcaattaattttaaataatgaattgtagagtaacattgtttcaatcaaagaagaggcaaaagatttctgatgatgatgaaatgtatttatggcatctacgtttaggccatataggcctagacaggataaacatgttaacaaaggatggttttttgagagagctaaaagtttgaactcttccgatatgtgaatcttgtttagaaggcaagatgacaaaaagacctttttctgcaaaaggcaatagagccaaagaacaacttgagttaatacacactgatgtgtacagacctattaatattcaagctcgaggtggttatgaatacttcgtcacttttgttgacgattattctacatacggtcatacttacctgatggccaagaagtcataaacttttggaatgttcaaagaattcaaggctatggctgaaaatcatataggtaaattattaaagacactttaatcagattgtggtggcgagtatttggatacgaattcaaagactattttttggaagaaaggatcttgtcccaacttacagcacctggaacacctcaacagaacggtgttgttgagagaaaaaaacaagaccttgttagacatggtcagattaataatgtgttactcatcactgccattaaacttttgtggatacacacttttagcggctaccttcattttgaatgtagtaccctctaagagcataaacaataatccaatgaaattatggaataggacaaaattcaatttgaaacatttccgtatttagggttgtcatgctcatgttcttaatcccaagtctgagaatcttgctcctaagactgaagtgtgtatatttgtaggatattcagataaaattttaggtgtctatttctatagtcataaagacaataaagtatttgtgtcaaaaaaatgctacttttcttgaacatgactaaacaaaaagtcacaaaaaaccacataatcaagtgattatcaagaaaataaaaaatgagatttctaaagcaacaatttcagcaccattagttgaacgaccagtaacagttaccacagttctaaaagtgaattgagaagtcatacacatctattattagaggtgagggacttataattggcctaataatattgatgtaaattaaatagttaacttacattaaacatgtcaaaactatattatataatttataaataatattactattatgtagtaaaaataaaagatagaactgcccactatgagagcgtggcatataaatagggatgaaaaggcgctgcctttagtcgggaaaataggcgcgatttctccacaacaccactctcttctctcctcttctacttttgtcttcgagggttccttcctttcttcaagcccggtggtggtggtggtggtggtgatggcggccatggacggctcttcttctccaccatctgattcgaatccatcatctaatggtgcttcaaagttcctcttaaaccttccctctcgcggcctcttctcctccaccgttctctcttcgaatccggtgatctcttttctcccctttctattttctttaccacgaaacaaaatatgagtttatgaatttcagttaatttaattttactatctttgttgatttttttattgctgtttggataaatatgtggagaatgtgggtattgagaagtgttacagttgagttgctagtagttttactcgattgatattcgagattgatgaaagctttgatttttagtttgaatgtagtttaattaacatgtatttggtgtagaaaagctgttgattgagaatttcttttcaattatttataagtgatatttgtgtcagtacatgtataagaagcgaagaatgaatgatggggtttgcttagattagccaacttactgagtattgggttgtcaattgtttgtttagaagaataaagttttggtggattgatgtggctttagtttttcaatttgaaacacatcaagatatgtatatcaccaaatgcagatgttttgcataaggtgaattgatgtggcttgagtcccctatatatctaatagcaataaatcactttatatattgaagaacatgtcttttcttccttgattgaagtcagtatatttaacagttatctccatgtccatcccatccttgaagattttaatatagaaattgtctgagtacagctgaccttctagtttttgatgttgaatcttgtgaatatatttgttaattatttgtgctagaagtaacattgatgttcattatacctcttttttttcaatgaatagatttttacaaatttgttttaggcatgttaaagtatattgaacttagtttgtgcaatttttttgtagggtggaatgcgggtttatgtatgcgtccatgacacatcgcccccaggttttcttcacttaattgaatcctcagcttgtgaacttaaatatggagaaattgctaatcctattatatattttatacattgttttttcttgggaaaaaaaagaaaaacagaaatttttaaagcaatgtctgagcatattcagtttgaataataacaattactatggtctcttgattttttgtttttctcattctttctttattttcaatatgcaggtaacagacgcataatgaaattttggcatgagactagagctttttattttgaggatttctgactgatgagtgtttgttcgcatccagatgatcaacagatcaagacaaatcaacagaacatattgatcagatcgcttacacttaggaacaagaaaggtgattccagttcaaaggatgtgaaaagtgcaggtgcaactgaaagttctagaaaaaggtaatgctttcaataagcttggatttgtcatccttctgttccctgcaaatgataatttatctggtagttgtcttgaatggaatttagtgcctggatacttgagtgtgcatagttgattgtggtccttattttctgtttcagtcatcacattttttttttctctattgttattgttaggcctgcagaaagaactttggatagcagggcttctgcgaaaaaagctaatagtcagagtagcacttctcgacaaggtagtcttgatattcttgtttgccatttctggtttgttagacctcattgatcataaaggctgaagtttcccacaaaactataatttatcgaagaaagcaatcgctttctcaatattagttcagattggtatattgtgactcagaatgtactatcaccattattgagagtctcatagttgagaatggtatactcacatattcatagacttatgtctgcgcacacacacaaaaaaaaagttctaagtgtagctacttatttcggttggacctatcctatgcttttgatcgttaaatttcctttagtctaaatgattacgttgtcattattgtcttacgagtttaaaatggctttcttgaagagggatcaagcaatcaggcatcaattaaggatttccaaggtctgactgtagagagacttcgtgcacttctaaaggccaaaggactttctttaaagggaaagaaggcaagtattaataaaaccatctagtgatgcatatattgtcaacgtggtgtgttgagtgttgatcgttcgaaggcattttctttttgtttctttgtcagtgaagaagaaaatttggcttcgtgacatgttttatttcatttgcaggaggaactgattgcgcgcctcaaaggtgctagcagttaagcataacgtagaaaaaaggaccagggaagcagccggggaagagattagagtgtgttcacaaatcgtcgcccaagagtagcagtcacttttcttgatttttcgagtgaatgtaggaatggaacggtttagactggatatgtccataatttgaacataaaaacttttttgtgaagacaaaggattatatattgtataattttgtgttcttaatgtttttatgcttcaaacactttattataaacttaaaaaagttatttaatggcgtagtgcaattttcttgatcatatgtgatgaacattattgacattacaaaattgtattattatcaactttccatcatacatggaatgaaaatggagtttagtttaatcaaattgacttagttactgaggaggaatctggtgctgcttgcattggtggaggtcacttgcgattggctaggtcttatcctcatctaaagaaatacgagcatgtttggttgattggaatcaagattgtaatggaatcaaaattgccattacaatgtttgctttgtgtttctaacctttgtaatgggattccattataatgggcattacaccaatcctatgaattcccattacactcttacacttcataaatgaggattacaatgacaactaaataataaaataacaattttatccttttttttttctcacttaaaaaaatacaaataaataaataaagtaaaaatatttttgtcaattcaattttaattaccatgttcattataaaataaaccaaacgtgggaatagtattcccattattattaccattacattctattaactctttgatgaagattggggtgtgtgtttgtccaattaagctcagcagcagcagatgaagagtttctttttctaggcactgctcctcatgagttttgtttttacagatacacaattggtaaagaaatattccaacaaattttcaagtgttttttcatatgattatcatacaacataccaatgtgatttaccccttgtctttccccttcttcatcctcccatccctaccaaaattcccatgcttccacctctctaatttttgtatttagttaggaaaaaagagaaacaaaattttttttattgtttttttatatattttttttattttaaatagttatttatttggactgataaaattatgtaatttgtataatgtgtccatgtgtttactatgaaatgttaaattgctaactaaacacaggtttgggattttaactatttttagaagattaattgttagtaaggtgagacttttggcagttttggcaatgcatgaagaataaggatatggagtgtattcatacagtgttttttcatatttaagaaaaaattgttgcttaaatacttatttgtttattttagaataattaataattttgttttttaaactttcaataatattgattttgtctcttaaaatatatgacttgttcaaaattatcctcgaacttttatcgtgtctttgtaaattagtaaatttgtcccctaaattttgacaactatcaaaacacaccccccaaaataaaattgagaaagattcaatattcttttagtaaattttaaaaaattaatttaaatcttaaaaaaaaataattttgaatgattaagaaaattaaaattttaaaattaattaagagatttaaaaaattatttattttttattaaaaaatctatt

SEQ ID NO: 225003 - DNA, 3874 bp, Cannabis indica
ggtttgctcaggttgcgatctgagtattcgtttgccaattatgaaagaggttggttccacattatctccaggatacgtggcagggtatgcttgagatactgtttgagcttccgatgtgttgcacttattatgttttcagttaatgagtctctggaatggcttatttattactcgtttcccattgtaggagagacttgattagtttggaggatggaaagaatgtcgtttaggttgcggttaagactttgttcatcattgtatcccatcaatgaacgcattagagtattttttcttgagtatgataggcatactcttcgaacaagcccaccagtggggttctgaacttcttgaggtattgattcatagttatttccttttccatttttctttacacttttatctttatatcacatttaccacatcgagaaagaaaatttgtcttcaataatggtcgctgtagaacgaaggtcagtttaggtctgaaggttcaaatttgtgaatattctactagttccacctagtgggtgggtgataaaaatatagacattggttgctgtagattataagccttgttaactgtagatttactatagtattctccgtcaatgaaattcgagtgccattaaagttgttgagtatgctgatttttgttgctaaggagctgtttctcagaaacatcaaattttcttgttctaattaatgcagaacacgttaattttgcgtgcaggctattaacagtttaaagaatgttgattccactgctttgcttcaatttcttcatcctattttgaatatgcttctccatcttattggcaatggtggagaaacactccaggtttgttaaaaaacactccatcttatcctcttgaacacttttaacctaagtgcatccaaaaatctctgaagatgtcaaatcttcgggactcgtttttgaagttgttttaattatttgtattgggtgttgtgtaatgctataatttatttcccactcttttcaggttgcagctttcagagccatggttaatattgttaccaggtgtgtatattatgtctatgcattgctccaaacacattataaacacaaagtaatattttcttctgcaaggaaaatactggtatccctgcctgagacagattgaagtttctgacaatcagatgcagagaaatatatgcatacatacatgtattgttatattttacttgtttgtatgtccaaagttatttttgttgattttggattcatttgacattgtttggaagattttctgtagggtgcagcaggagtcagttgatgatgctgaaagaaaccattttctggtcaactatgttgattatgcgtttgatgactttgggggtcgtcagcctcctgtatatcctggtttatccactgtttggggaagcctggctcgaagtaaggtgaggctagttcttcatttatcagttgcttttagcatgtggttttctcgattatcagttcttcattactctagtaggcccccaaatattgtatggttaggagaggttcctagtcttagaaaacataggtcctttactcgacttgttctgttgactgatttatctgtcagtataaggttcggcttgctagtagtatatgaatgtgcttctggtatttggctgtaacgacaccttctacttcaacaatgtttcatctagtactaacaaaaattgaaaatgaagagagatatcgaccaaaaataattaagcaaaatgaagaagccctccattttttttttacttctggctctctgatgtaatttttcttctaatttgttcgatgtgatttttctacaggctaaaggttatcgtgttggaccagtatatgatgatgttttagccatggcttggttttttcttgagcttattgtcaagtcaatggcattggaaaagactcgtcttttctatcacagtcttccattaggtaagttacttacaatgaaaacatgtgtctaaggaaatgccttcttcctattcttgtttcttcgatatgtaaagtttatttcacggtgcaggtgaagatatcccacctatgcaacttaaagaaggtgttttcagatgtattatgcagttgtatgattgcttactgacagaagtacacgagcgttgtaagaaggggttaagtttagcaaaacgcttgaacagtagtttggccttcttctgttatgatcttctactgattattgaacctcgccaagtttttgaattggtatgtatatgttctctgccttttttgaattattgcttgttatttctgctgttgttgtgtggagtcagttgcatcaaacctagaaactcaggcaagggaagagagaatgtaatgagaaaagatcatgcacattgagaaaattacattgtttgaccttttctggatttggcaaataatatgctgttgctgcatacttgaggtgctaagatattttaaattttctaatcactgcaggtgtcgttgtacctggacaagttttctggagtttgccaacctcctctgcatgattgtaagctctcatttttgcagatcatatgtgatcacgatcttttcgttgaaatgccgggaagagacccttcagataggtactaaactctagaactccagataaatgtggggtcttagtgtcttggtaatttattgataaaaatgtttgtgttttaggaactacctctcatctgtcctaattcaagaacttttcctaacttgggatcacgatgacttgtctctacgagcaaaggtaaagaaaatttaaatggataatctagactggccttatgtgtgaggatgaatatgtatactaatgtatttttgttattgttgtaacttgtaatcgtataattctgtctgttaggccgctagaattctggtggtccttatgtgcaagcacgaatttgatgctcgataccagaagcctgaagataaactgtacattgcacaactgtattttcctcttattggccaggtatattttgggactatatctgctcaagctaaaatttctctattgaacagtaaatgatttatgttatactttcagtttcactgattattgatgtgggctatgcagatcttggatgagatgcctgttttttacaaccttaatgctgttgaaaagcgtgaagttctcatagttattttgcaaattgtgcggaatcttgatgatgcatcacttgtaaaggcgtggcagcagagcattgcacggactagattatttttcaaactcatggaggaatgcctaagccttttcgaggttccttggtttttcccttttatcttgatcatgtgattgactgttactgtcatttaactattgcttgtgacactgattctgtactattcatttttacagcacagaaggtctgctgatggcatgcttatgggttcaagttctcgtagtcctgttggggatgcacctgcttcgcctaagtactctgatagactttctccggcaatcaacaattatctgtctgaggcatctagacaagaagtcagagtgagttaatatattgttgtcttaaatgaaaaaatcgatgcttcgagtgttttttctatcgatgatgcttttttaaattacttttctagttttgtgcacaacacttatgttgaaactcactcatgcagcctcagggaacaccggaaaatggatatttatggcagagagtaaattcgcagttaagttctccgagccagccatattcactgagagaagctctggctcaggcacaatcttctcgaattggagcttcagctcaggctctcagagaatccttgcacccattattgaggcaaaaactggtatgtttacgttactgtcatcatatttcgaccccgttatgaatttgttcaatcatgtatttacttttaggt

SEQ ID NO: 225004 - DNA, 2551 bp, Cannabis indica
tagaagattgtcacttactgcagtcaaggaaacgctcatgtcttgaatcttgtaagaggggttgtaagaagggcatgtcgcatatctctttgtgggaagttgtgtcaaatcaacagcaaagtgactcaccatttctgaggcaaatggagccaggttgggccccacgaagcatttaaaccattccgtcaaaggatccaaatttaagtcccagatgtcccccagcatatttgcctagaaaaggcccatcttgggcatccctaagccacttcttcagggcctttgattcagcatctcacctggataattcccccacaacataattatgcttggccatgcggagttgaaccctttcatcgtcagtttgagcaggagttagaatgatgcttggaggcccagatactcatcaacttttgaaggaatccccgaatcggtactagggtcgggggtgtcaaccgtcttcagcttctttgaaggatctacctcagtggtgacacccttacacttcctatcaaggggaggaactacttcttcttcctcgtcgtcaataagcaccacctcctggtttccgagagctttcacgacaagtccccccagaattacacgtaccgtgtggtgctcaggcatgtatgactcggggctgtatgtcagggcaagggcatctaaaagatttttaatgggtttcgctgtgtgccatgggctcaactttttaggcagcagaacacctgtgcggcaccttgacttttctaagccaacatcaaccttctaaccatccaagtaataatgggctcatttttcgtgtgaccgtgtgcctcgtgcacacttccgtctcttgaacaactcccgctgagtcatgctcgcaagcatccatgattacacccattcatcgaggcactctagccaagatactcgcactatccatagtcccactatgataaggaaaatcgcaacaccaacgctcaccctgtcactcgtgaccaaggtagcatgtgtggcaagatgccaaaactcagtcaacgtgccaacacttctatcatgccccattcaatactgtctaaaaaatctccctcattgcccaaggactcccatacatccatggaccaatcctcaaggcgccatgcctccacccatgttgacaggccctcgagacaagctgccaaacgagttgcatacattagacctctgtcccttcccaacatggtccatccgtcccatgcgcgtatgcaaactaggccgagaatgactaaccgtgtcatctcatgttccgactcgtggccaaggcgcaccataatgtctcttagtggtttaggccaagtcccgtgcaagcggcataccggctagccaatggaaacgtacctgttaacctcttgcagcttcttagatgcagcaccgggtcagcccaataatgtccatgagtactccagctcatgcagacatatgagtcccctcgtggtcctcatatgcctgccctactagccccgctgactagtagtagctcacttagcaccaaggtgccagggggttgtggagagctgacactagggtccgcccttaaagagaattctaagtttttagccttctaccaggaacatacatgattttggctctgtagacatatggccaaaccatacaccagatcatatagttgctcaaatcctattgcaccattgtattcatagtcccaatgaaatggcaaataccaagtcctgtcacaatctggacaatatttaagatatttacgaaaatgcaactgccacacaaactaagcatcaatatcccgtcaacatgcgcttcaacatgcgccaccagttgaccaccacttggccaacttgtgggaatcacctagcttttaacgtgccatcttgacacgcacacgttacattctaccccacttcaacatgtcgatgccctcatcgacggaccctaggaaaatcttcctgatctcgactcctaagcttactccatgcttctcctgaatcctaagtctttacttgttcctctacctccatagaaacaccctcttagtgacgatctccctcccccgcacttagacttgatcaaagaacctatgccactgtcgttattcagaatctcccatggagtagtgcctgcgcactatattacttccctcaacatgaactcctccaagtcaaacacaatgtccctcaagtcaaccaagtagcccttgcaacactgaccctgatgctaacacatcctctaatagtagctcacatgcgaattgtccaatgcatactccttttgacaaggattaagtatggtgcacccatcgggttgaggttcgcaaattaaccttacccaacgacacctacaaaacatgcatccactgaagccaagtccctctagacaagtccctctgaaagcttcacatgccaactccatggcgcaccatcctcttgctagcaatcaagcaagacactcatcgcaggataaaatttgaagcgttccacaaggacgaggctcgcaaaccaactgcacccaatgcagcaccaagtgcactcttgcacaaaatctcttcgcaaagttctcaacattg

SEQ ID NO: 225005 - DNA, 4746 bp, Cannabis indica
atatattacaatcatgttttactgagactccaacccaagacctctaacacacacacccatctatggccacttgagctaacctgattcaagtagagaatatatccgtacatcttttttaataaagaaaatacatagtagaatcactctatatatattttcttttatttaacactgaccataattcatatcactatgtacgtatttattatgtgtatttattattttttgaggtgagattttattattatcttgagataagcaatatgaaatgtcatatcatataacaatcaaatagtaaatatgaaatagtgcataaaatctggacacggtagcgtattatatgatttcctttgtaagacaaaaatagatggaatgtatttattcacatatatatacatatcacattactttatattcaagacattttatataatttgattaggacaattcaccaaaatgggataattattacatatacactttcaatgtatatatttttaaaaaatagatagtggcatattatttggataaactttatggataaccattccacaagaaaaaaaaaattcaattgcaattttccttagtgcattatcattgtgaaaagtaatggatgaaaaagctcataaaaatacattacattcacaaaacataaataacagccaactaaatacaaaaattagataaattactaagaccaactaacttacctaactctctacaagaacacaaaaagcccaaaatggactaaacatatcccatgatttacaaaacttgaatgaagcagaaaaaagatgaaaactttcatctaatgttggctgcttccgggtcctcctagtgttaaaatcacaccttgaagatcacttctaaggcttggtgattctttgggcaaagttgaagaaggagtaggtctaaccacaggaaatggtctagccatttgatgagcttgtgggaagctttgagcagatcttggacttgagttcttcgtcggttgctggaaaagcctatagcgcggttcagtgtgaggcgagctaggaaactgctgagttgcagccgtgtgtgggttttgagcgagagccggtcctcttgggatgactccaagtccctgcttaaaaaagtttaaagtaaaaagatgagtttttttcagtgtaaagatttaaactttgagcataatatatgattggcattgggcttttgaagattactggtgcaaacaagactcctctgaatagctttccattaacagttgcagtcattaaataacccgagtcgaatactccatcgacttttcctcgaacctcagctccaatctatggacaaagagagtatatgagaagcagaactaatcaaaagaacacaagaacaataaatgcctagcgaaaatttaccgggtgctgatttgaccctggatctaagaagtgagtgttatttctacccaagtgaccattattagtctgggattgacattcccctaaaaggtgatcttttgaagtcctttgtacagcgtttatcgactctttctgtctacttgaaacatttcgagatttgtcattgtttggagtctcgtttagttgcttgaacaaattaaatccttgagaaccggtaactgaatcagcggctctttgagtcgtggtctgttcttgatcagataatgatggagaggaactatgagaaagcgaaagagagtgctcctcttgctctgattcgacatcccatactttcgctgttgatgttcttttcctctttgggtgtaaagtatcttaaaacaaaaacaaaagacaaagataatggttactaaaatatgtttgattgcctcaatgcataccaagattgagatttctctgtttaaccaacctgaattgaaaggaaaaggccgttttctttcggattctagttcataggctctttcccttactaccacattgttccccaaaaatattgttttctggttcaaaacagataataagctcccttatgagattacatgtccatataacgaaattaaagattgaaggggtttggtaacaagttactaaccatgtcattatttccttctcttctcaatgacctcctcttatcttggttccaatggtttccgaaaatcttgcacatggaaatgttgtaacggccattgggatgatctgctccgagttgcaacaccaataactcattgagagggcgctcgtcctcgccacatctaaaatcacaaaccacccaacagttaacaaagttacttacttacattagaagttgacaattaagcaagattaaaaaaagatacattacccgccatagatggcaatatcaaaatctgcaacaatggcagtgtgagagaatcgcccttgtggttgttggcctcgtataacaagctgagtccaagagcaagtactcacatcaaggatccaaacatcattgtagtaatgtttgtccccaactccaccaatgacatagacctgaaaatcacaagcaacttagatccaaacaccaatgatgttcctttccattttaattttctaacaacaaactcaatcacttgcctttgtcccaatgtttacagcagcatggcccgcccttacaccaggcgaagatccttgcacagatagctattgaaacataaaaaccagagcttaaattaaactcagtatttaaaaaaagaaccatgtaaatcaataacatgttgttttttctaagaaattatacccgcgaccaagttaaggtatccatatcgagcatgtcaacatcgccattataccgatcaccacaatctccaccataaacaaagagcttgtttccaaatgtaacagcactatgactatctctagggacaggaacatcacccttaacttcaggggaactccatgtcatggttttgagatcaagaatatgcaaatcattcaagtaatttccttcaccttcaccactgcctccaaatatcactagcttctcatcactaactagtgtagcagtgtgactttcgcgaggtgaaggcggggttcctttgcattcgggttgcatccattctttctttcctaaatctagtatatgcagatcgtttactttcttcgagccatttgtacccccgaaaaccaccattttctgccccacaacaaccgcgctgtggctgtccctcgggccagggccttcgcctgtggatacaagagcattccaaaccattgtgtcaagatttagcagaagaacatcaccaaaatgcaagcctccacaacacccctgaaatgatagaaaacaacaacaaaaaatggtcaatatttagcattggaatgaaaacattttaagttcctaatgagatcaattacaaatttggatattaatagttgacctttgaagtatgttgtgctaataaaagccaatttaatcaaattccaaatttgatgtaaaatatattaccaaattctatatagtttcaaccccatatcttaaaatctcactttagagagcttaaaatttaacagtgtgcttcaaccgaagttcatcttccatttccctctagaactatttaatttccataataaattaaaataaaaatacagagttagatagacagaactcagaccaagccaagctcagaagatactttaagtaaagaactaaaccaagaaaagagaagaaaatagaaagtaagttatttatattacaaccattaatagtgatattagaacaacaaacaattaggagggaaagaaaccaaaatcatcataataacaaaaaaaattatacataccccaaatacatagagaatcccttgagcataacaagtagagtgcccccatctttcagaaggattaaatcccataaccttaggataaagccacattgccttcttctctacagcttcaatccccaaagaccccatttttatttgatgcttattcagtttttctctctttattgaagctgaaagagagagaaagagaaagagagaaagatggaaaatgggattgttgttgatggggtatcagattacttgaaaacagtatttgagaaagatgaatgaagaagagagaagaggaaaataaaagggtcaaaagaggacatgaacaaggcaaagtaagtgatgtatcaactatcagtgtcaatagacatgaaaagatgggagctttcaagtctaaatcactgtggcaaccaacaaagacagaagggttgtggtgaaaacaacatattttttcctcttaattctgttgattatctcatatttcgtgtgtgaaaaaagaaaaaaataaataaaaattgaaactttagtactacccttttaatgatcagtatttagactattagttgagctatataaatgaaaaagtaaaagaaaaatttacttggtacactaataataatcaaccaaccaacgactgatgtgaaatcatgagaagtgactaatattatttatttactttactagtctaaagaaagcttttttatttatttatttatttaagaaattaattttcttttcacatttctggtcttgctgaaaatgatggagtgggaggtgggcattgggttgtgggaaatgatggggaaggtgtattttggtggtttgaggttttgtaaggtagaatggggggtttagagacttgggtgaagagaatttgtttcagtgtttccatacatatacaactcattatttatttatttattattgattgatatttgttttgaaattttggtatagttattttatgatattggaattgagattgggattgatgggagtgaagtgtttccactctt

SEQ ID NO: 225006 - DNA, 2774 bp, Cannabis indica
atatttatttaattgacgagaacactaaattatatatttaatatataaaagttaaatagtatttcatgatgaagaactcttattgtgatagataggtaatatttaaattgtatagttaatttttttcaaaaaaaaatttgtatagttaataatagtacttatattcttgagtaattaatcaatcggtcaactatgttcttgctaatgcattatcactccattatccacaaaatctttagtagttttgagtttttacaaattggttgacaattcttgttttcataattttgtaaaattataacagaaggtgcttcataattttgttttgacagtatgattttgtaaacttttgctttaactttcccgaagattgaatttgttataaaacttcctatgggaacacattgcacaattgaacggtatattataaaaagttgactacacgaaggtattaaaaaactttcaaagggtgcgtttctacgctgaatgatgataacgaatttagattaatgagactctaatgtgagaattactaggaaactgcagtgttttccgtgctcaactcaacttcttcattattattttataaaagaaaaaacatatggaaaattgctggtatttgacttttttattttgtttgttagaaaattgtatttgaattgggtttcctaatcaaaacgttagtttgtcatctctgtctctaaaattctgtgtttgtgcccaaatgggtacaaaagataaaaaattcatagctttgttcttccgggttatactaatctacattttttcatctaaatcctgctccgcagtttataacataacatcatcccaagctttatctcagggccaaactctggtctcctccaaccaagttttcgagttaggcttctttagtcccaataattctgaaaataagtacgtgggaatctggtataagcaaatctcacccattagagttgtgtgggtggcaaacagagacaaccctgttacagttgcagactctccaccaactctaaccattgccagcaatggaaatcttgagctcttggacagaaaccgaaactctatttggtcaaccaatatcaatatccaatctaataataccacagtggcaattctttcagattatggaaacttaattcttaaagatggtacacagaacttatgggagagctttaagcatcctggggacacattcttaccaggagcagagttgggttttaatgtcaaaactggggagaattttttcctgacttcatggaatagcaatagtgatccttcagttggaaaattcacagttgaaatatcaaaacagaaacctccagaagcaatcatttggataaacggatcagagagaaaaccacgctggagaagtggtccatgggctaagagtaagttctctggtataccagagatgaataccttttatcgaagttatttcaatctagtagaagaggcagaacaaggaacgacacgtcttcgtttcaattgggactacaacaactctacagtcctaaatatgttcctcacctctgaaggtgttgtaaacattgtaggaaaagaaagcgatgaaagtggctggtggtacaaggactgggaggcacccgagactccgtgcgatgtatatggagtttgtggtccttttggggtatgcaaagactctcaacctcccatttgtgagtgtttgaaaggatttggaccgaaatcgtttgaagagtggagcaaaggaaactggactagaggctgcgagagacgcagcccattactttgcgacaaaaatactagtggcttagccaattcccagagaggtaaaaaagatggattttggaagatagacaatgtgaaactacccgatttttacgaatttgtggacccagtagagcttgatcgtgctgatagggagagctgtcaaataaggtgtttaaataattgttcttgcatagcttatgcatatgtggataatataggatgtttggtctggtctcaaggccttattgatatcgagtggttttcagatggtggtgaagatcttttctttcgtcttgctcactcggagctaggtgagaccaaagttgctaccttcgaaagttatacaatttgaactgttttctcctttttgtctttgctaaattcaatgtgtttaactaattgttcagttggaggagataaagttaagaacataatcatcagcctttcagttatttctagtgttgggattatagttgtcatagtgctatgtttgctaagaaggagagctagacgacagggtaagaaaagagtctcagattgaatataacctttcattgtatctctttctcaacacaatcataatcagatagaatctgatttagaaattttgtttcaaagttctgaatgctgaaatgctttagttactgacacaaataatgaaattataaaaccaggaaacaaaaaggagatcacagagcgcattgatttgatacgaaatgacaacttgaataatcttcaattttcaaaacagcctgacacctccgatcttcctacttttgacttggggaccattttacatgtcacaaacaacttcagtccaacaacaagcttggacaaggaggatatggctctgtttataaggttgttgcagttttttcttcatgataaactaattaataatcactattaaaatttctttgcttacaaatctgagtctatctgcaggggaaattgcaggatgggaaggaaatagcagttaaaaggctttctagtagctcaggacaaggcacagaagagttcaagaa

SEQ ID NO: 225007 - DNA, 4193 bp, Cannabis indica
ctcctcgagacaagggtcaaggcctccaaacatggaaccttgtactcaaatatatttacgggatggtgcttcactagaaacatatcttggcacaaaggtggaagaattgtagtatcttggaatcctaattccttctccatcaacatactcaaatgtacaagtcaactcatccaccttgaagtctcttgtttagatggtaagaagttctttactacctgtgtttatggatttaatgatgtagaaggtaggaaaatactacggaaataattaatggagattgttcttaaagacccttggattgtggtgggggattttaatgatataattgcaaaggatgaaagggtcggctgtaaaattagacatattactacattagatttctcttactgtgtggctcactgccagctagaggatatcaaatatacacgaaactttttcacatggtgcaacaaacaacaagatgcagctagaatctattcaaaagtacaccgtgttcttgctaattccaactggattgatgctttccctggagctgaggctatctttttaaatgaaggtatctttgaccactcaccagcacacttacatttaaccataattttcaaatgggaaagaaaactttcaggtacttcagaatgtggtcatcacatttaaactattcagagcaagtaagaagagtatggcagctgacttatcatggcactaagatatgtaaagtggtatcaaagcttaaggctctaaaggtcattttcaaagagataaaccagtagggttttcctgacattcaagctgcagtaatcaaggctaaagaaactctggctgaatgccaaaattagatgcaccaagacccttttaattcagttatgcagaataatgaaatggaatcaaggtaagcttacaaagtggcacatagaaactgcctctattttctaaatcagaaggccaaactcacttggactcgtgatggagatgataatattgctgcctttaagtcgagcatcatggccagaaggaatcaaaacaaaattctatcaatagaggattcacatggggttagggttgatgacctgaaccaataactgatattttttatcctattatcagactttgcttagctccaacaaagttgatagaacatcagttaacagaagagttttaaaaaatggccccacagtcacacaacagtaagctgatggccttctagctgctgtaacaaatgaagagattaagaaagccttttttgctattccatgaaccaaagctccaagtcttgatgggtactcaagctacttttttcaagataattgggaattaattgagggggacatatgtgagacagtcaggtctttctttcactcaggacatattctaaaagagatcaactgtactacacttaccattatccccaaagttagatgccccaactctccaagtgacttcaaacccattgcctgttgctatgtagtatacaaggcagccacaaaaatcttatgctcgaggctcaaaaacatcttgccagatctcattgcccaaaaccaaggttgctttgtccaaggaaggttcattgaccacaatataatgatttgttaagatgtggttaggcactatggaagaaaatcaaacaaggccaattgtatgatcaaacttgatctataagaagcttaggacacgattgagtaagactttatagaggaggtactcacgggcttaccttttcctgacaagttcatcactttggtgatgaattgtgtcaaaacaccaaaattctctatcttttttttcaacggtaccttacatggtttctttgaatctaagagaggattacgacaaggcaatcccctatccccacttttttttgtcattggaatgtaatatctatctcgaataatgaaggaaattggctgcaaacaagatttctcattccatgaaatgtatgaatcaccttagcttcacaaatgatcttttcttgttttgtaatggagattataagagcattattctaatgctccaagggctcaaactcttctctaatacatccgaattgcaactaaacaaatcaaaatctcccatatattggagcaatatggtagatggggatgtcaaaagggtgctcgatgcctcgggttactctcaacaaagcttccctttcaagtacttgggcatgcctatttgctttaagaagatattaaagcaagattgtagcttacttgctgaaaaaatgactactcgaattcgaatatggagcacaaggaacctatcttttgcgggtagggttgttcttataaactcagtcctctttgcgatccatttatattggtgccaaatactcaagttaccaaaaaaattcattcatgaattagaagccatatgtagggctttcctatggaagggccaacacgttatgcaaggggctggtgctatttcttggagcaaaatatgccagtccaaaactgaaggaggggctggtttcacaaagacagcagagtggaatgttctgccctctttaaatatgtaagggccatagcgaatgaagaagattatctatgggtgcgctagattcacaatgtttatctcaaagaggaggaatggtggggctacaatgccccaacccaagggagttggtattggaaacaaatagtcgctgcaaaggatcaactcaaaaacttgatcaacattcagtaattcacctctaacaggtactcaatctcctttggttataaactattgtgccctattcagactaaagtcacatggtgcaacgatgtttgggggagatttgacatccctaaacataacttcataatgtggtaattagattttgactttgattgctgccagacctagccgactcatgaatgtgcagggttgttctatagaatggacgccttgcaagaatcatgtagttgggctaatgtgagcgatactgatggcaaatggaaagattgggatccccctattactcaaggttgtgaagagacttttagaggtggtcacgaaaatcaactaaagattcccacagacttggagcaaaatttcattgaaatggaagctaggattcaatgacaagaggaggaaattaagagattgagacaacaaaggtcctctattgtacctttatctcgatgtccaattgcttttattctgatgctcttagcagaacagagaatggctggtaaccgaatggaatcaaccgttggggattatgtgatgcaaaggaaatcaattattttgagaaacttagatgagatgaatacttttctagctgcatacactttagaggttgttcaagagccctaagggactcaagatgttggtggagccactacttctcctacctctggttatggtagaggtggtagtgacttgaccactgactagaaaaaaaaaagacaccatctgcacatggtggctcaaacctgaacaagaggttctgagggaaccagggtcgaggtattcattagggtggctttgaaactcaatatacttaccctgaatgttccaattgtaaaaagcactatttaggtgcgtgtagagggcgaggatgtttcaagtgtcattttcctgggcattataaaagagattgcccacagatcaagaaagaggaataaaagacatctacaaaactcgctctagaaagggtgtgtgctttaactcaagcaggtgcataagctagctgctcagttgtatcaggtcagctctcagtcaataactcttacttctctatattgtttgactctggggcaactcactcttatgtggcagccataatttttagtaaattggatagactacatgatagttatgataaagggttttgaaccgtactgcctggtggagaactagtcatctccaaaagatggataaggtttatgctgattagaagtgaggatagggagttgcgtgctgacttaatagaaatgttttagcaaattttgatatcatacttggaatggattttttatccaagtactcagctaatattggttgtaaacagaatatggtgatcttcccacccgagggcaaggaaccgtttgtttttgtggattggttcagggatcctggattctagtgattttagtattaatagctaaagaattgttgaaagatggatgtttagggtttctgactgtggtattggataccacatggcctgagacggttcagccagaggatatcagggtggttcgggaatt

SEQ ID NO: 225008 - DNA, 6177 bp, Cannabis indica
catgagtcagcagtctcctccggaaaatgtacatatcaacctattcggcttgtagagccgagttgtcaggggatgttttggcgttgtatgtgtatagtattttagctatatattttgtaatacaccttttgtaaaaaaaatacttttgtaagagaggatccccaaaatataatatatactgatgtgcttttttagtttaagtttatttaaatcacaaatttttaattaaattgttagtttattattataaattaatttgtaaaagtatacatgtggcatccttagaggttacgacgttacagttctcttatgctcttttctatttctaatggttttaatattattctccttgatcagctaattaggtatgcccatttatgaatgcaagttcaccttataccattcagtactaggtcttttaaacttgctcaatttataagtgatgaagtgggggatcttattgagatttatatccccaccctctatgaggtggttgctcctttcatgaggattaggatcttggttgatatcactaagcctctgcatagaggtatgaatgtttaatttcaggaaactttccattactaagtgacttaaatttctttatgaaggcattcaagactactgctatcattgtggtatgcttgatcacacattcaataagtgtgataagttttcgaagaattgtgattactcagccaccctcctactttgatttataaggacatccttagagccccctaccaaattgatttttaagaggagtatttttgaactctctaactttgctcctatagaggaaatgtctgggactgctatttcctccaaccagagcctttaggattttgctaaccaatatctggtgccaagtatagctaacaccacgttagttaataagattccctaatatgactgtgttgggttaagtctctcccctgctataaacctacctaatgtctgtctgaatagtatcattccaacctcttatataatgccccttatgcattctgttgtttgttctaagggttcaagtcctatcacggttactgttgttgtttcttctacatccaagggtaaaagtgttattctctcttatttgctgtgaggtactcctcccctttactctcaaaatcctactaaggttgtctctgggtcaaaagatctttctctagataaaaccagcaagttggctcttctgtgagaagcatgctgaaaaagagctcgtgctaccagtgatgagtttgttgttgtccctaccatttctgatctagatgctcaggagggtgttgctcagcaaccccgccaggaaaaatgagtcttataagttggaatgcttgaggtttggggagtaccgggtgttctgaaatcttttccttctaattaaacaacctcaacctcaaattctttttgtgatggagactaagcttgttgctaattctagtactaaatttaaacctaaactgtcttttgatattgtctttgaggtccctaagaatggtttaggggagatttatttctttttagaatgacattattaatgttaatcttttgtcttactccatgtatcatattgattgctattaatgataatatcaactatcacctttcttgctattatagttctccttatcaggataacaaaagtgattcctagattttgttgaatcgtttgtataatgcggctcatttgtctccctagttgattattggtgatttcaatgattatttaagtttgaataatcgtaacaatcatagtaccccttcttatgccatgcataattttcaaacttttgttaataagtatgatttgtctcccttaccctttaatggtaataggttcacttgaaaatatagaagtcttttgaaaatacttgattggtgttttgctaataaaaattagctcgaccttttccctcacgaatctttacttcatattcctttttttgagtcgaatcatagagctttaaaagctacccttaatgataataacaataaaggctctcatcataataggttttttttttttaagaattattagcttacgtacccatgactttatagtttgattaaaaataaatagtatattaatactaattatactaatagtgaccaccttgtttcttttcttaatatgcaatctaattgcattaaaatgttgaagattggagtaggaataataatgattttaaatgtaagttaggcatttacaaaatgctttagataatattttctcgtcttctcttattacccaaactgatgttaccaaggctaaagagatccaatcttctttggatgtcgtgctttataaggaagagttatattgaaagcaaaggtctaggactgtttggcttaaggctagggatatgaacaccaaatatattcacaataaggcttcagttagaaaaaaaatattttattagttctattactttagataatgattttactattaatgatttcaatgatatttgtgataactttgttcgtttctacaaaaatcttttctctttttaaggttcgaatgtcaatcctattgataatattcttatgggtattactagtagaattagcagccgacaacttaaatttattgccaaaccttttgctactgatgagttgaagaaagctttgtttcagttttatggggacaaagttcctggcctttatggtttgaatccttatttctatcaaaagaattgggttattattggtaataatttttgcaatgctgttttggatgctttgaataatcatgttgatatgtttttgattaatgaaactattttagttctaattcctaagaaaataaagccattagaattagtgagtataggcctattagtctatgttctactatttataaagtggttgctaaagctattgctagtagacttaaatctgccttcaatgatcttatttcccataaccaaggtacttttctctatgataaaattatttttgataatatttttttttattgataatgaagttattaatgctatcaataactaaaaaagtagaaaaataggatgggccgctcttagcttgacaaggagaatgtttttgataaagttgaatagagcttcattgggtatattcttcataaatttggttttcctgctagttttgtttctattagttttaaatgcatttctactgtctcttttaagttatgtattaatagaaattgtcttctgtcttccttccttcaagggggtattagataaggtgatcctctgtcaccctatcttttcctccttgttgttgaagccctttatgctgctattacaattaaaatgcaagctaatcagtttaatggtatctctgtttgtcgttctgcctcttctatctctcatcttctgtttgctgatggtagtctgttttttactactgttaattcccataattgtagagctatcaaggacattcttaatacctacaataaatctactggtcaatttgtgaattttgctaagtcttctgtcctattttcccctaacactagttctcaggatagagtttttttcaataaatttttgggtctgtaggataaatcttttactattaaatatcttggtgttcctcaatattttagtagatctgagaaaacccccttttcattacctctccagaaggctagtagcaaattaagtgtttgaacaacaaactattttccagagcgggcaaagagattctccttaaagctcttatccaagcaattccttcatatgtaatgtcttgttttaggcttcttttacctacttgtaaaaattttgaaaaacttatggctgacttttggtggggttctatggccaatcacagaaaaattcatttgaaaaaatggtctcttctttgtgactctaagtttttctgggggtcttggtttttgtgctattgttcaccattatcaatctattattgctaaacaagcttggaggatttttacgaaccctaactcaattcttgctaggttgcttaaagccaaatgtttcaaacacaatgatttcctccatgcttctcaaggcattattcttccttttcttggagaagcttattatggggaagatatcttctttgtaaagggctttccttgaaagtgcaaaattgtaagtctatccacactcttaattccaaatggctccctaattttagagttcttaattataatattgacacttatcctcctgttaatactgtctcttttttattgataatgataggttttgggacattgataaattaatacctttttcccaaaacagttgttaattccatccttaaagtgcatgttgattcttctatggatgaatatctcattttgggacatcatctctccggttgctttactgttaactctgcctatcaccttgctgaatcctcacattcttctccttgttcttctaatcttgcctttcttaagcgctggtggaaatttatttggtcttctaagattcctccgaagaataaacacttcatttggaaagctttcaatcatatccttccttcaaccttgaacctttctaaacagaatgtgcttgacaacccttactactctttatgctccaaccatattgacattatttctcattcactcctagagtattccagagcagttaatatttggaacaatactaagttctctcgattttttaatagtaatttttggtgtgatagtaatgaatttctcttgagagggtttgagaatttaaataaagaagacttccgttagttttttggtattatttgggctatatggaattattgtaataagtctctttttgttgctcacaagccccttattacaaatatagaacattgggtgagctcttatttgtaggattatgtactgcttaagcaaatccctctttggctcgaatggcaatcaaacgtctgttgcaagttttttttttatcatccaaagactgcaactatttaggacactctcttgccttcatctggaagattcaagctaagtgttgatgcttcagttagggaataaagcttaagaattggctttggagcagtgattcaaaactattatggggaagttatagcagggtgttattcttcaatccctagtggttttcatccgatattccctaaagtagaagctcttttaagagcaatcacttggtgctctgctgtggattttcctattaattgtattgtatctgattgttagcatctaatcaacaaaattaagcataaatggcgggacaaatcatccctttctgatttagttcaaaagattgttttctttttctcttattttcctaatgtttcacttcattatgtctctacgaactataatgttttagcttatagtttagctcaaaggattttaagaactgataaaaaaattatttggaatgggtgtgtttcgaacgtatagttgtttaatccttgtaacatgaattttattgtatatccttttggagaaaataatcaagattagaggtgattgttgaccatgcaacagtggctttggatgaatttttcgctgctaatttttctggtatgcagcagtgcctggggctatgaggaagggaggatctaggtgaggtgttggaggttggttgcaaggactcggggccgagctttgttgctggttttagcagcaggtgggttcctcctgaacccagtgttttagtgctgtcgattgatgcggcagtctcgctagtgaggggttttgctggttttagaggggtggtacgtgatgtagagggtgttgtgtggatggcttggtcaattggttatgctggtgagttttaagtggtgatggcggagttgttggctcttcatataagtctcctatgggcttttaatttgggtttcaaaatggggaggatggagacggatgctttaactatttgtaattggattcataatcctgattctaatgttgagttcaaacttgttactgaggagattatttctcttttaaatgcagttggtggtggctcttgttgtgccatttcacgtgttgcgaatggtgtagcccacacactagctaaaactgttactagttcgttaggagttcatgtatagacttatacttgtcctagatttttaagtactcgtataacaattgattcggtttaatatattaccactgtgaaagctctgttttcacagagctgaacaatgaagaactcgagagagaaagagagagagaga

SEQ ID NO: 225009 - DNA, 5100 bp, Cannabis indica
taaataaaatcacaaaaatcgtaaaaatgcttaaaattctgtgaaattgtatttttgtaattttttattatttttgtgtatttgtgaaacaatcccttaacaaaagcccaaatttctctacatccagagggcgtgaatgatcagaagagtttgttcagttgcaaaccccctcttttccaataatttctgcttacaacctcacgttatttattacacttaacaaatgtagtaaactcaccacaaatagtcataaccatcaccaccattatgtgtaaacacacataattatataaatatataaaatacacataatgagatatctgtaaatggcatggcactactagaatcagattagcaataccgcactttgagtggatatctaaatggctaatctaatggatacgcatacgcgtgacaacatcccaccaacgtccaagactaccttgcacccaactcattttcatattccttggacctctttatataagtcactcaatcagtgtggttctaattatctcttattaacacactactacttgcttaattatcttaataattaatacacattacacaaacggccatgaaagccattttgctctttctactattatttgtgcccttcattttctcactgttgagagaaactaaagcagctcaagctggtgggagcaataaccatggactttatatcgtatacatgggagcctcaccctcaaccgacggttccttaagagatgaccatgctaaacttatcaactctttgttcagacggtgataattaataacttctttcatttttttggactgcttgtatatctatctatatattcattcactctatttgttttatattatagtaaagcaaatgctttagtgcatacctataagcacggattctctggttttgcggctcgcttatcagaagcagaagcagagttagtggctaagaaacccggtgtggtatcggtttttcctgatcccatgctaaagctacacacaactcattcatgggattttctcaagtaccaaacagctcttaaaatcgactcttttcccaataaaaattccaacacatcttcctcagcttctaatgctgctgctgcttcatccaacggtggaggagacaccatcattggaatactggatacgggtatttggcccgaatcgaaaagtttcggcgatgaaggaatggctcccattccaactggatggaaaggaaagtgcatggctggtcgtaacttcaactcctccaattgtaacaagtaatatacataaagaaacaaaatgagtcttagttaagttagaaactctcgtgttatttacttttattttggttattaatcaggaagctgatcggggcaagattttacgacgacgaagacgatgatactccggaggagtaccaaacggcaagggatttagttggacacggtacacacgtggcatcgactgcagcagggtgcaccgtctcaggtgcctcctactacggcctagccacggggacagccaagggtggatcacctagttcgagaatcgcagtctacagggtctgcagcccacaaggctgccttggctctactatattgaaggcttatgacgacgccattgaagacggggtcgacgtgctctccctctcgcttggtgcttctgctgcatatcaacctgacttgtacactgaccctattgctataggggctttccatgctgtggagaaggggattaccgtagtgtgctctgctgggaatgatggaccctcaccatcaacggttacgaatgctgtgccttggattttgaccgttgcagctactacaattgaccgggatttcgaatccaatctcttgtgggtggaaacaagtgattaggtatcttcttctttcttttggttcaaagaaaacaggacatcatcatgtcctacatgttagctcaaagtaacttacttgttaagcatcaactaattcagggagaaggcataaacttctcagctcttaaaaaaactcctgagtacccattgatatacgccaagtctgccaagaaaagtgagggggatgacaatagagccaggtaatataaattgcttgtttcaaataataatccttgtttgctgcaactactaattagtcattaactaatctgaaaatcactgaacaatcaaaacattatcagtaattgccaagatgattcattggaagcaacaacgattaaggggaaaatcgttgtctgtgagaggaaagatggctattcaacctatgagaagattgatacagtgaagagtctcggaggaataggtgttgttgtcatcgacgacgaatcaagggctgtcgctgataattataaagcttttccagcaactgtcatcagttctaaagatgctaccgatatcctctcctacatcaactcaaccaagtaagaattgtggtgaaaattgaaaacgatatattctttagttccaaatatttctgttaatcaagaccagcttttgttttttttttttgttttcatgcttgacaatataggaatccagttgctacaattttaccaactgagacggtaacagagtataaaccagctcctgctgtggcatatttctcatccagagggccttcatacattacctctaacatgatcaaggcaaggctattcactaccgttccctgatttccctcgatggatctaacaccaaagtttctttctgatttctcactagtatttgtctttattttgtacactctgctctgcagcctgatatagcagcacctggtgtgaacattcttgcggcgtggattgctaacgacacagatgacacccctgctggcaaagaccctccactgtacaacgttatttcaggtacttccatgtcgtgtccacatgtttctggtgtagctgctacagtaaagtcccagcaccctgattggagtccctccgcaatcaaatctgctatcatgacaactgcgactcaattgaacaatctgaaagctccaataacaacagactcaggttctgtggccacaccctttgattatggagcaggtgaagtaacaacagaaggaccattacagccagggttggtttatgaaaccactattgttgattacctcaactttctatgctattttgggtataacgaatcgaagattaaactcatctcgaaaactatgcctaacaactttacttgccctgaagactcaagctctgagaagatatcaaatatcaactatccctcaatagcaatctccaacttcaatgggagtgcaagcaagacaataagcagggtcgtcaaatatgttggggataatgaagcagttttcactgctaccattgaagcaccaagtggcttaaacgtcacagtgaaaccagatgaattgcgatttaaaggctacaatcagacattgacttatcaagtgactttcacctttcatggggttatgaaaaagaattcaatgggggtgatttcttggacaaatgaaatgtataatgttcgttccccttttgtgctactcccctgaaactagattagaaaacacacagcgacaaatcatcgtatgatgatttctccaccaagtcaattattgaaatgtagtagtaactccgatgcttaacttccatcttaaataaaaattagaaagataaaaaaaatagacttttaccacttgctgtgatcagtacataatctaacaatgaaagtggggacccttgtaaagaatattaggaaaaacccatgaatttaaattcgatacgtgttaaaagcacgaatattcttaaagtaagcactaaagaatgtcacatcactaaccaaaaatctatggttccatgattccttcagattagccttttaacaattatgttaaaagatgtggaaggaagctctcttggatataagacaatccaaggttcaaacaaagattataacaaaatatgaacaaacaagtaaagaaaagaacaatggataaagaacaacattttataacattcatatacttgaagagatccagataaacatcacagtatctaaaggagagattgagaagatttgtaggagcattaaattacaaagttttatggactaggaggctttccccatgttggattgcaataacattcagtaacctcgaaatccaattaaggccaaaagagaaaaggaaaagaaatacttgagcacagaaacaaagtagttcatttgttgtaaacaagttttactcaaatgcccattggttttccctgcgaacttcctcctcttcttctggtgtaaagtcattcttgatgttgaaggtcttgcgaatctcctcaggagttttgcccttgatcatgtccgccaccgtctggcaagtcaggtccagcaagctcttgatgttcaaatagtttgcagcctagaaaaaccataaagggtcgtctcataaacttaaaatttcttcaaattatatccaaaatttcacaaataggaagagactatgcagtactatacatcatcataattcagagaatctatacaacaaagttgattctattatgaataaacacccataagaacaccatctgcgaacccagcaaaattaaataagcactacaaaccctaactataaaatcgatgcaataaaaatgaaagaaggtatatataaaattcagtggatagcagggaagaagaaacgaaccaagatgagatcgaaaagagtggcctggtcaaccttgacgaagtctgtgtcccaagacttgagttcatcgtcgacggaagaggcgcggtcgtcgaccttaggagcctcgacgtgttttttgcagtactcgatgaccttagacaagatcttgctggtgacgttgggaaggggaataccattgtcagcgcaatcgtcctcgatcatgtgcttgatggtctgcgactccaaggccaccgcctcatcgacctcgaaggtttcaccatcggagcttttcaacgtaatctttctgccggacgacatcgattgaaacgatctcgggctgggatgctctgatcgattcgaagaaaaagagaaggaaagggatacggattgggatgaagatgaagacaatagaattagaaacctaacttttatatttgagaataccaaaaaaaaaagaaaagaaaaggtaact

SEQ ID NO: 225010 - DNA, 4453 bp, Cannabis indica
tttgtcatttaacaaaacacatggtccaattggtaacttttgtaaaacagagggtccaaaatggtatttaccctttattttatgaaggatagaagtaaaagataaaataaatacaccaaatatccaaattatctttatactaaaaagagtttattgcggctaaattctctcaactatcactttacttgtacccgttaaaactctccaaaattactgaattgcttgcaatttcaaggtatcattcatttttcatagttaattgccaatatagagtacttatgtgtacacttttgtacatatgtcaaatttatattggtacacataatattattattttaaaattacataaattatttccaaatttataatatatttttttatttttttaaaataatttattttatatttataattttatttaattttaaaaataattttttaatactaatattaggtaactattataaatgtcatgtgtacaaggtgtacacataagcagcctatagtgacagttaaccgaatgacactttaaatttgctactagctcagtaatttggagggttttactgccaaaatttgaacttggaaggtgaaatacaagtgaaacgacaattaagaaagttttgccgcaaaaaactctactaaaaatgatactttggtagttttaataattaactttctctccatctttctacctttattactattacaaacaacataaatcagatttactattctctctgtccattgtagattctacattcatcttcctctcgatccatctactaaacaattaacatagggagaaaaattattttttatttagtagatctaagaaaatctctaatgaaatgtcaaattgatgatacattgttaaaaacaatataccacaagtattgaaatcctcttattcaaagtgcaatgagaaaatttccaacaatatctaatgcatatattcgtattgaaactattaacacaagtatgttcagttatacaaatgtttgagaagattataggagtggtgatcttgaaggcgaatacaaaaatggtttgggtggaatttccaatgaatccacactcccttccaacatttcaataactcgactcataattggtcgatttgaaggattggtctgaatacaccacaagcttactattatcatcttcttcactttcacaccatcttcttcattaacaattctctttaattcaagattctcatctaattcaaggtgtttatatatccaatgtggaaaatatatctcacttgtattattaacttgaacattaatattcgatcttccacctatcatttccaagatcatcattccataactgtagacatcagatttatgtgacacatttccaaaatttctattaaaaacttcaggcgcaatgtatccaaccgtccctcttggacctaacattgaaacaagactttcgtctgtgttacagattttggccaagccaaaatctgaaattttgggaacaaaaccaacatcgagaagaatattatgaggtttgatgtcgaaatgtaaaattcttgtgttgcaaccgcgatgtagatactcgagtcctctggcaatgcggagtgagatttgatagtaagtttcccaatccaactgatgaatgttttcatcaattgtattgtcatcaaatataaacttctcaagagatccattgggcatgaactcgtatattagagctcttttagaaccatcaaaacaaaaacccaataaagtgacaacattaacatgggaagttctgcttatggttgctacctcattgatgaaatcttgcccatctttacttttggattggttcaaaaccttcactgcaacaaaagagccatcatctaagattcctttgtagacatcaccaaagcctccttggcctaatttttgagtgaatgagtttgtcattttcttaattttggaataactataccttctaacttgaatggggccatagttattaaggaaagcctcaacgttttcattagtttgatgcctcttccatagtgtgtgggttaggagtagtacactcacaataattactattccacctacatcatgcaatcaatgaaatgaaacctatttaacgtttgctctattataaaagatgaaaggtaaggaaaatgaaatggacaaactcacatgcatgttgaatcaatcaatgggtccacacttacatatcatttaatataaaagatatatattttatggatgcaaagaaatttcaacaaattaaagtgattaattgcttatatatcttttgtaataaattttttcatttataaagcgtgttttaagattaaatatgaatatataaggattaaaaagaatgtcaaaacgaattcaaagaatatatgaaagtgttttataaattattctttataaaggttttattagtaaaataacttaacaaaataaatattagcaaaataataatcttcttgtacatatggtcgcaaaaatgattaattatatattacatttgcaactataaacggttattataatctgaaaatgatcatagatttacattatatgaccattatgatcgcattaagtatattaagtgatattatcttataaattttaatatgatgtacattattagtttaacaaattttacaggatgtaaattttagaaataaatagaaaatgaacacatgtcactacaatactagctagtactattaggaccacaagttcacaaatcacaaatacgtaataaatactagagtattgttattaggtaccagtagtgcttaatatcttataaacgtgttattttctgattggctagcaatactctttaaaaattattactttaaactatatgggaccaaatacttataattgaacctttagtgatattaacacataagaaagtactgtccaccatagtacccattagcatttctctaaacaataatactaagagtaagaaaaaaaaatgactaaataaggagtattacctagtgcaagtccaattcctagtccgaatccatgcatctcttttctctctgaattcataaagcaaacacaagtgttttaaaaaattagttattatgaaaaaaaaaacactttcataatgactaattttattaagacatattttaatttaataaataataaaaaatttactaatcaattataaagcgtcacgtagcaatgctaatgagaaaactaacccttgggcagaagcacttaaaatgataaatatcccaaaagaaaccacacctcccaccactattgtagcataaactacagttactagctaaccaactaaccaagaacccatgcctcaccacatctctcattcccaattcattatttttcactaccaaacccgccaccgtcttaaccgccaccacatctcccgtcggaccggctacacacattctcaacgccttagccaactcatcttcttcgctctcataaaaagccaataccgaattcgttcgattctcctcataataaccaatcctgttcttcatagtagtcgaagaagattgacaattatacagcaaaaccacactgttctgatcaccattcgcatcggcgatcttgaaaccatgagagaaatcagttaagcttcttagagaaggtaagcatgagttttggtctttatcaagatctcaaaacgcagcgtttgatacgataatggagtggttttggtagaagatttgtaaaacgacgtagttttgggaggagagattgatgatggagcgaccacgtgagtcgcacgtgagattaaagccagggtaaccgcagtaaggttgttgttggttttgaatgaagaaagggaaggttattgtttggtttccacaagttttggggactatgcaagattcgtagtaagggtctgatgatgcagcttcaactactgagtaatatgaagaaatgaagaggttaaagaatattagaagaagtgataggaaatgtaaaatgatgatgatgattttcatattgaagttgaacatggtgaaagttgttgagagggtacatttattttggttttggctcaacttgtttgaaatttagtgggtgataaaaaaaaattatttttagaaccttatttaggaaaaaaaatatcttattttttcaaatcaataaaaaaatttgtattttgaaaagaaatttttttttgggtcctgagataggtgaaccttaatcacaagcttagcccgcctatatgctcagggttggacctgaacagagtacatgattggtgtgtatcacgaactatactgttctcaacatcataccaatttagcgagttgtgattggttaacaatttcttatattatttattaaataaaattgtagagatctaatattaatttgtatcaataatgatatgtatattttgtggtgtttgatatcttatggtactccttaacatttctctttatgttgtatttgttattttttgaaattatttg

SEQ ID NO: 225011 - DNA, 3543 bp, Cannabis indica
ctgagaaaagtcttttacaatggttagcattgttatcaatctcccatctagcacaaacaccattgacagtgttgataaccacactagagtcgctttccacaattacaaaatggtgaccatactccaccaccatatcaagagccaaacaacaagatacggccttgccacaaagggggtcaaaaaagcataatctcttagttgtcacccagatcacctcactaaggtggttacgagcaactaccgctaaacacatatcttccatccccacacgaacatcacagctcagcttgatccagtcgagagggggagggaccacttctacatctagtcaagagaagagtgtgggatgagaaaagcactgtaatctgcataacaatcagaaatggagtcaatgtagtattttatgatatcaagattattattatgtaccttgtcatttagggctctccaaataacgtccacagatggaatgccaacgaacagtggagaaagaggtgttctgtagattcctcttcacccccacaaataggggaaaggttgtcattgatctacagtctctttcttaattctgaacgcacaagcaaagcattggaaagaacactccaccaaaggatcttgtgacgctcgagaattctactattctagagcctattccaaagtgagggagaaacatcacaatgaggggctcgttgaagagcttggactaggtaagtcgatttactagagaatttaccattaggctccctagtccaaacccagtaatcattgccttgacccgaaggcctacccccttttaaaatggcatcgatcgtttcctggtcaaaaatttatgaatatcccaattaccatttttcagccagtagatcggcaactttgttaaactcattggatggaaccctcttagatttttaaacaaaatgcttcctatgagtcacccaaggatcttcctagatattcacgcctttcccctcaacaatcactttacaagcacctttcctgagaatgtcactgactttaactacatttttccaaaaccaagaatcagagttcttataatggcccttcaagaaatctttgcccctaagatatttagcttccaaaatcttgcaacagagagattggctcctggtcaaaaggttctagtcccatttagcgagaaatgcaagatttatttctttagttttacaaaacccaagacccccgcgagacttagggagacacaacttatctcaagccttcagataaatccctttgtttcccttctcaaagccccactagaaatctcgcaccatgccatctatatttgagaccatcttgttggacagttttgtggatgcatggagtacactgtcatagataatccaacagatttgattaacgtggcacacccagcctttgagagagttttaactttctatccttggagcttggaagtgagattatcaaggatgaaattaaaattagcatccttctgtcttgatctgaacaaggggtgccccaagtaattaatatttccttttggctcattgactcccagcaagtcccttatcccttttttcattccatcactcatgttcttactgaaaaaatagacgttttgagtttattaatacgttgttctgaccaagagcaaaacttttctaggcacttccagtaatccctagtttccacaattgtagctcttcctaccagaatcagatcatccacaaagaaaatatgtgatagacgaggcccttctcgactaagcttaacccctttaatcccccctttcagggcttcctccaaaattcttgacaacaattctacaatccagataaacagataaggggaaaggggatcaccttgccgaatgccacaaaaagggacaaattttccaacctggcctccatgaaggcaaacattgagggaagtagtggagatgcactgatttatccagttataaaacctcactgaggtatcaaagctagctaacacattatcaataaattaccaactcaacttatcgtaggccttgaccaggtctatattaatagcgaaaaaaccttctttccctttcttagctttgaaggaatggataatttcttgagcaatcacattgttatcctagatgtttcttcctagaacaaacgtctcttgagtaggacatataattctccgtaagatcagcttgattctatttgcaagtatcttggatatgactttatacgtgacattgcagagagaaataggccaaaattgagtaacccttttcgaatttgaaacttttggtataagcaccacattggtcgcattgatttctttgtgcaaataaccagaacagaaaaaaaatctaagactgaatcacaaaagtcactacccataatctcctagtaatacttgaagaacaaaagagacttggccttggggccttactactatcaatgttaaacaaagtcctttgaatttcttaagcatctggacaacaaatgaggtctttctgctctctactagagagttggtcgtgaataagaacctctaagttagtcaccacccctcatgtatgcctagagaaagttacactaaaatactcaacgtattctttccctattagatcaagacttttgatccaaacaccgttcttgtccaaaatactctcaataacattccaccttcttctaatggtagccgaaatgaaaaagaacttagaattattatcctcctccttaagccatgcaattctgaatctctatttccaatacaaagctttcctttcccaagcctgattcagggagttcctagtatcccactcctcttgccactttctcaaaccagaaggtagtttttggatgttgtgaggtctagattccaataaattatttatgtttgtgtatgtcgctactttaatcgtgaaatgtcgccacatatcgagatcatcacataattattatgttctaatatgtcgcgactaaagtcacatatcgcaaaataaatatcgcaaattgaaagccatgaaaacaaattatgtgtctctatatcggaaaacatatcatcaaaatgtcacaaaatgtcgatattattagaaactaattatgttctaataaaactatttatgtttttgtatgtcgcaaagtcaatcgtgaaatgtcgttacatgtcgcaaattgtcacgaaatatataaaaaaaaatttcgttaaaaacatacctagacagaaaaaactacaaaatagatttcataaaccatactaataatgcatgcaatcaaaatacaaaaaggatgctcaaaccctggccttgcatgtagcattgttgtgttccaagtgccacagtttgaacaatggcgaggttccacaactttttaaccgttagatggatattggttagtccgtattcttcctgcatcgctctttcttggatgacctgcgggtttcttctccactgttaccctgactctcatgttctgcatgtattctggaagcacccaatcatcgtccttgccgacaagattaatcgttgcattataagtattctttcacgtctcttttgtgtaataggggaggacagag

SEQ ID NO: 225012 - DNA, 4072 bp, Cannabis indica
tttgctgtttttacagggagaaagaagctccacgattaaccgaaagtggtttccagttcttggtatgaattgtaaacatttttcgatcatttaccactttatgatgtttcttacaagatatcatcattctttgtctgtgctaatgacagctgatggatacaaatgcacaactttggtatatcatcagagaatatatctctaactctgaggtaatgaaactcatgagtacctaatgtgaatgtgcggatttcgttgttattttattcttacactcttaactcttcttttttaacttgtataagttttttgtcttgaatatgaacagtaagctttgaaactgatttcttgattggattcaataactttactattgtaaaatttcttcaataatgtattattaatgttaagatgaataggatgtcttgcccccgaactatgatccttgtaaagttttcgcccctcaaacatttttctattgcaaaaattccccctaactttacattccgctctttcttaatatatttttttggcttatgtgaccacgagtcacatgtttagttgcattacaatggtcgatatgaaaactttatgctgcccgaaatgcagtttatcagcattaaatagacaaacattttctcttagaatgcatatatatattttcataattcatcattatactgctatttatgcaattattttttgtctaaactcttaaattgagccagataaacgtctcgttagtgctacatcaaaaaaattgtgtaaagagcagaatgtaacagaatgaagatatttacaacagtttttatcgttaagggggatttttgcagcagaaaaaagttgaggggcaaaactctacagtagtcatagttcgaaggaaaaaaatcccagttatttatttattaataaaggatggctttaaaaccatgtgtttcattagttgaaaagttggcggaatatgagattgcgatgattcgtattctgtatagtgctaactattcacaagttacatttcatctgtaatatattttgttctgttttattgccacaggagagggacattgattcagcagagttaatttcatttcttcttgagcttagttttcatgccacaggcgaggtacgagtttatatttcttttttacatttgattttttcgttacttgtagagtcattgaatcggttttgtttagctaactaatattttatcggttagtagctatctttcacattttgttgcattaattttcaggcgtataacctcaactcattgagtgacgttcagagggagacggtcaaagatcttgcagacttgggattagtgaaacttcaacaggttctttcgctttttattcttgttagataatgggcttatagtctctcagacgatcaatatgctttaccgaagttctaattagttttgggaatctttctagggtaggaaggatagctggtttatacctactaaactagctacaaatctttctattagcttaacagattcatcatcacgaaaacaggtttgaacttttcattttccgtaaagataactgctatcaattggtgaccgtttgcaatataaattttgttgatctcacctttttcgtcttcataatttttaggggttcgtggttgtggaaacgaattttaggttgtatgcctattcaacttctaaattacattgtgagatcttacgccttttctcacggtatgccagtgaatgttagcttatgcaatttgaaaaatcttgtgttatgctttgttttattttttcggtgttgctaaattctgagattggtcgatgtattcttattttttaacgttgtgcagggtagaatatcaacttccgaatcttatagttggagcaattacaaaagaaagcttgtataatgctttcgataatggcattagtgcagatcaggcaagtcgtatttcattgttatattcttctttcttttcttcgtatatactcgcttcatatgcctaatttgttaatgtggacgggaaatcgtgttggtttgagaaatgttcattgttataaggggctataaagtgtttagatcttcttcggtttgcttgaattattcgttttaacaagaatagggtgctacagttgtctcgtcacatgaacaaaatcaaaccgaaactggctcatatgtcataactaacatgtcttcaattatcgagaatgtgatattcctctttgtaccctttatcttacgttgttggatcatcgatttctgaacctttccatctacagataatttcatttctgcagcagaatgcacaccctcgtgttgcagaaaaactaccatctgtacccgagaatgtcaccgatcaggtttcctatactctttatcattatgctctacatagtccttctcaggtgaacgtattgcatactagaaaatgtactctttatgtttcagatcagattatgggaagcagatttgaataggatcgaagcgacccctgcatattattacgacgaatttccttcaagggtgacaaattcaacacttttctcaaactataacaaatacatattcgcttatactgtatcactaagattatgtctcggattcttttttcgttttgtataacaacaggaagtctttgaggctgcttgcgactttgcacgagaatggaatggtttattgtgggaagatatgaagaagatgcgtctgttggtcaaggcagaaatccacatgaacatgcgagagcaccttcgtcgtgcaaagcagtaagttaaagaaactcgggtttattgtcttgtgccatattcagtgccatcacagcttgtgcttgggaataatctcgtcggaagagtaaagcccgaaaaggggtggtatttcaacactgagagaatgatgaaatttgacaatttcggttttaagctttcgaattcgtctggagaaggcgatgatgatgatgatgatgatgatgatgatgatgatggcgatgattttacgggtaatgtaaaactactatagataaaaggagcattgttgtgtaactaatgaacaggtttgaaaatccaatatattttgtttggtaatgactaataatagagttggttaatgatgggagtgattttgataagaatttttttgttttgttcttgtattgtttatcttttgtatgttagtcttttttgtttgttttttgtgttatgttttattgccttatggggaaaagaaaataattcatcaaagaaacaaaaatgttgaaataattgagaggaggagaaataataatgaaaacttcaatttatttgatattcttcttctttataacatttcaatttgggaattgggaatatctaattctaaatatcaataaactaaattaaattaaataaacgtattttctaaataaaaaacagttttttaaaaatgaaagtatgtgtaattaatatttaaataacaaatgtttgtagcaataataataattagctgaaacacaacatatatgttttttaattaaaaaaattagggtgtctcgttcttaaatctatagctatcgaaagttattttttttggccaggctcgccgattttacttgggcttaaatacggtttagtcgaggttgtgttttgctattacaattagtcttgtctctgatacattcttttgagtattttaatcttatctttatgatatggtttcgagtgtttgtcttgtctatgtaacatgattttattttattttgttttgtttcgttgttggttcttctttatttttcaatggctctccattaaatcactgttagtggttgggaataacaagttttttgcgattgaaggaattgtttgtagtgcagttacgtactttgcacaatagttgagtcctcaagctacgaggttaaacttattgcaaccgtttctactgttgtgtctcctaagctgtggatgaaacagaatataagtgttcttaaggttaactgtctttcatctgatttttttataacttttttgtcaaatgatctgagaattagactactattatttagtttgtttttttaattctaatcctagtcgtgtatgtcctgattggattgcagactattattt

SEQ ID NO: 225013 - DNA, 4457 bp, Cannabis indica
taaatctgaatataaacagttctaaaagtacgtagtactataaacccaaataaggtagagggtatgtgtgaatatagaatgtaccgcttagcagtcataatcaaattcgcaatgccctggccaatgattccacaaccaaaaccaactgctccatacatgataccctgaaaggaaagggcacatcaaaactataaaagcaaaaataaacaaacaggagctacatatcattaatgagagagaattcttaccttgtagaaataagtaccaattctctgctccaaagaaaatctacatcccggcctttctgcttcaaatacactgcataacaagattatttgtcaataatttgaaaacttcccaatataatacttggatgattggcctactagttttcagtaatgattaaataacctgctaggaagagctccataagcgtgttgcaaacgtccaagcaaaccttttgatacattcggttgcccgatacgaacatatggtgctaacataccaactaatacaacattaactacagttccaaccaaaagatctgcaacatacaactcaaactctgaccagaaatctttgcccctcttttgaacttcagcaaatgtagcacaacaagagtcaatgactatctgtaaacattggtcaatagcaaaattatactttagacataataaaatttgccataacaaagtcagcgatgttgaacagtcccacttaatagttcttactgatgacaatacagatggaaactttgttgacatgtatacatattcatggaacagctaaagacaaataaaaccccactaatcggtgcatctaagccaggacatctggttaacatgaaaactggttctacatacaccaaaacaatgatttctacatacagccatcttactccaaccatttaatgagagaaaaataagttaactagaaagtgtataataacaatcccaactaacctccgttccaatcttgaaaagaaaggctggatcagccaacatccgattacgaagcatagagcatgacctcattgcaaaggctaaaatcccagaagacccctgcagattaaaaatgcttaaaaacaggattttaaagaacaaggctcttaaaagaaaaaagaagaagaaaacaaaaacactactactcattagaagcaaaagggtacctgcaaatctaagtatctaagcagaagcacttttcgaattcccacactcttggcagcttccaacatatcagagggaagagtaacccctcgagcctcagtctccttcataacctctgcaaatttcatcatgggcccaaactcctcttcttcatagtcatcaccgttttcatctcctcctccaccacctccaccacctccttctcctcctttaccatttgtaaagttcccattaccaccattaccttcaagtgcaacctcaccatagccaccaccacctactttgtcttcttccttcccagtcttaaaaacccctgtctttcccacagtactctcactatcttctttggaaatcgtaattgctgccagaggggattgggactcaccttgtgactccaccatgttcattatcacaagcctctcttttctcttcaaataaatatgtccagtcccattattcttactcaacagtggcaaaccaacctcttttatgagattctgattccacatcttcctagaaacaacaacgtttcgaaagttgacaacatgggtcaatccaaaactcgatgaacaacccgccatttgaacctcaaaagcaataaacaaaatttaacccagagaagtcgacaagttaaggaattgcactaaccaaaagctatataacgaaaccccacaatgcaatctaatcaaaagcacaaatattgaatctaaaaatcaaaacaactcgagcttaaacgataaaaatcacaactttttggggtgtccagaccatcaaactcagtttttgatctttaaatcgtcaaggtcaagggtatataggagtgaaaataaagagaaaggccagtaaaagtgaaatgtgaggtagtgggatagagtttagatgaagagaaagtttgagggagaatgaagcttactagtttaaaaagagaactagtaagacatgaagtggctcctagtttggatttgtgttgttattgtttgttgatgtgggcttgttcaggttcataattcattgtcattgtgtgaaactcacacgtgttctacactattctatgcgtgtgggattctctagggttttgctaacagacgctggtggtgtagctttcaaaatttaattttttttgttttttttttttttttctaaattacaggaaacataatatttatttaaaggtaaatattattttggattttgtgttttgcaaaagttattaattggactatttttttgttaaatgacaaatagactctgtattttttaaaattatacaaataggaccctaaactgattttttgtcaaaataaaacttaataataatctgatctacagatgttatgacaaagctaattacatttttttgtatttgttcgtgttagaaatcatcttaaatttggttatgtcaaaaaataaaattgttaaaaattgagctcagggtcctattttcactattttagaaaataaaatattcattttgtcatttaagaaaataaagggtctaattggtaatttttactaaacacggaattaaaaatggtatttactcttaatttaattgtttatgtaactaccaaaactttattataattagtgtaatttgtagtcaaactatttaatttttttgaatttgccatgatcaatcaactctattgaattttggggataaaactcccaaaatttcaattcggttttgtctccacttttttgtctactttagtctattaagtactaatatggattgccactatgtacaaaaaaaatatacacatgtcaaattttcattagtctacctaatattaataacttaaatattataaaaaataattaaaatattttaaaatttaaaatataaaaaaaaataattaaaaatattttaaaatttaaaatatcaaaaaagaaataattttaaaaataattaattttttaaatttttttttctttctttttcttttcttctacctcttttttattttgttgttaactcagatttttgttaacaataaatgaagtcttgtaaataaaaaactgattatttataattaataaatacatatatatatatatatgaaacactaagaattttacgtagttttataattaaaatttacatactccacgagtcattattatttttgagtatttcttgataatatgtatagattacaagagaattactatgcatattcactcaatcttacaaggtcttttcattccaaaaaggatcgatcccttttcccttaggttctatttctatttatagattttttaaggaggacagttatttatctttcaatcttatctaggtaaccgctcatgaaacgtggatgatccacacgtttcatatatacaacatgtggataaaatggaataattgatgctaactgctttttattcttattaggaaatagtttctgtcgccaaagatatttgagaatgactggtcgtattctgcaagacactagtcaggatgtgtgtcctcgttgttaccttttatgtcaacaactaagattagtctcttaggaatcctgagataagttacattttgcgtatttcccttagtatttccagatactcacgagtatgtggatcaatgagttgcaagctcttaaagaactcgttatctacccttcctagcgacattgtttcagttcttgcatgcatctgagtgatcctggttagctttgagatgaccccagaaagttgttatctcgcaatactgtgtactttatcgttgtcgtgttaatgatattgtagcatagcactaggttaatatctgcctatggttacttctctcaaggcaaaataactgttttaattatgattctcttttaatattcgtaaataatccacacatgtcttgtccatattatggctcaaaatatgggcataataatttcccccaacaaagctctttctcgaacaaaaagagttttttaaactatccttaattggtaatgagtacatttctttggtgattttatttcttccgagaaaggttaattaatcatttaattaaatgtctcttcatctaacggggttttttacctgtcttttcatctttcctagaaagatccccgaccgtttgataaaatttggaaccagataaatgactccccatttttcaatataaaagggtttttactattgtcttcctcattacttcatttgaaatacaaaaccagagagaaaagcccattttcttcaaaagattgttgcatgcccaacttttctttaacttattttttcatgtgatcaacaccattttttctgcaaccttgaatgtgtcaaggtctg

SEQ ID NO: 225014 - DNA, 6892 bp, Cannabis indica
ttgggcatccacatctttattcaaagtacactggaatagggatgcccctccctcccctggccaataaattaccaaacaccttccttggacattcttaaaaaatgtgaaagatgaatacttgggatttcaacatcaccccttttcttctttgttatcctggttgtcttagaagactctgcatcttctgactttttcaccgtcaccgattccaaattgtagaactgttaacagtaaatttacaggtattagataggaagaaaatacttcagtgtaatttctttgtaagtaattctactctgttttatcttctaggtggctgcaaaatgtcatataaaatcaactgttacccttcaaaacaataaccacaagcagaaacaataaccccccaggaagttgtttttgaagctagttacacaatacagtatgggatagattttccgaagaccgggaggaaagtaatgagaaaattaacctcacaaacaccatgcagcaacaacctatggaaagggtcttggacccgaagggtgaggacatcctcctctccactatctgcaatgtaagtccgtatgcagtcctggaaaaaatgagaaacaacaaaaaaaaagcatattcagtggtcttaaacaacagatgagccactaatgaaacccagaacaatgcacaagatggtatacctcatagccctcaataagtacccaaagggaactacgccgaagtgcatctctggtacgacaatcaattctacgccaagcatttaagacagccatcttatcaggatcaacttggcctttgctctttgcaggagaaccctttagagaatcaataaaattagcctgccaaaaaaggagtgcaggcgtgtaaccattaccgacaaacaaactgagtcaaatcacataaaaatgtaactttggaatgtaaaaaatggatatttggaaattaaaaaaggaacatataatggtgaaaaaccataacctcaacacaatagttgcattcttaatgatagtaaaagcactctatgtaagttaagtcataaatagctaagttattgctgctccggttctctatggccaaataaattttatatgcagtttatgcttaagtttataaatgcaaataaatttcataggatgaaccttggagatgttaaatttagatttgatggatataaattcaaacatacctctttgtccatgtctatattcctaaatttgtcccactctaccgcattagtcatagaaaatggtgactctggtacatcattacctgtaacagaagatatagaacctaagtacgctaaaacatatatctactgccaaaattacagcagcaattggacaatcaaacaaggaaacataacaggagctaattaatcccaatcacaatcaacttcgggataatacttcattcttaccgttctctctttacattttcttttttattctaacgggatcgttgtgttttataaaacaaacaaagtggtagttttagtttgcatctgtatcagagtcaagatttggaaactaaaaatgagataacagccattgttgaaaatcataaacatatctacggtgtttgtttgaatatgattaccccacggtggtggagaaaacaggcctctaatttcttctgcattcaaacgtgggacaagttccatcaaaaggcggtcatttaaccacctacgagatcttctgttgctaacctgccaaaaagatcagacgaaaagaaatctttatagtgaatcataacaaaaattacttcatgtatgattcaaccattcaatctgaatattgacacaattaaagaataaatgaaagcattgattaagtaataaaagaacagtaagggccacttataacccaagtggcataaatttcaaatgggatttctctgtcaatggtcaaaaaagattatatagtactatggttaggaacttcttccttaactaccagattaagtttcaaattgttatttggttttaagattaatattagaaaatacctttccagccaagttttcaagaaactctatcttcttctcaattgacaatccacgggattttgcattctctcctgccaataacaccagtaagagaaaaggccagaaatccaaagttcattttttttctgggattttctaataggcgcatcaacgttatgaactttaacaaaaatgaagataaagatatatttatatgtacatatttatataaatattaattaactaaatcccatcaaccaaagatcaaagctttgaacttttatgcactaatgtgctcaattttcgagctaagaaaagggttaaaatcaagaaatatcgaagtacctcttgtggggtcaataataggaggggaaagacgaaattcttcttctctctgaagaacatcaacggtcgccatgatcgaaagaataagagtagatctgctaattctggggtgaagcttcgtctccacctctgtttatggttctatggatggttgttaagtgttcgacgaaagtcctgtgaaaaaaaaaaaaaactaataattatacaagagaacacaacacaagccgaatatcctctcctgttatgtgatgctaaattgaaattttataatacagaaaaaaaaatgaaatattatattattacattaataatgccgtgatgcgcactcatgggaattgtgccacgtgtacctaacaggatttttttttctttacgggactcctcttttttttttttttctttttgaaaataaacgtgaacattcattaatcaaataacatagttagacctcgcggtcattacaaaatagatttcccgataaagaggagatcggaatagagccatacagttagtgggagaagacccacttagccacattatgggcaacatagtttcaagacctactaacattaaaaaagttacaacaaataaaaagagagatgactcgatacaaaatgagacatagttctctagagcccaatgggacatcttcccattgagcgcatttatagcttgtctcgagtcactctccacaataacatacttataccctaaatccatagccaacgaaacagccaagcaacaggccgcaacttctccacataacgcatccgagaagtccaaccgagacgtgttaacccgaaccaccttgcccagataattccttgctacaacagcaatgcacatgctctctaagcccacacttacatcacaattcagttttatccaatcctgagtaggagggttccaagtttccctcgagatcggagtaggagcaggcaagagagaatcatgtaactctgcaaaagaagtacaaatattgtgaatacatttcatcacatctggaggagtgctattgtgtaccatttcattacgcgtcctccagatagtatcaacaataatcgatgcataaagaaatacatcctcagcacggatccccctatgcctaagatcccatataaatttaatctagtcccaaacatgaattctagtatcgcacacagggtagttaccccaaggcgaagatcgccataagtgttgcgccacctcgcaggaaagaaataaatattcaatggattcctcccttaaaccatacaaagggcaatttgagttctcaatctgaaaccttcttcaaattactgatctcacagggagcgcattagaaaggatacaccaccaaagaactttgtgacgctccaagattttgctattccaaagcgctggagcaacagtaaaatgagaagctctttccaaggcttgggtcaggtaagccaatttacacgagaactgtccattactttccaagttccaaatccatttatctttaccctgccccgatggcttaccaccttttaagattgcagaaacagtttcccgatcaaaaagactgtttagcttgtggacatcccaattcccattagtcagcaggagatcagccacaaaatggtgatctggtaacacatcaccgtttgatttcgggatgaaacctttacaatgaggtatccaaagatccctccagatgctagtatctctgccatctgccaccaatatacaggcccttacgagatgaaacctttacaatgaaatatgagttgattaagatgtttggtttgttaatagaatgaatatgagaataaatgataaattgacaaaattatcccatacttaattttatttttatataaaaaacatgtattaaaattatttcagttttactttatttaatcttttgtgaagtaattctcgttatatagtttttctaatgtaataagaattctcgtatatggtgtaattataattacaatatgatcttattacatcatttcaaataaacactgtataaataatttaattccattacaattctccttaaaaacataaactacttgaaaacaagcttgtaaatggctatttggggactaatatgtcaaacctcgcataatttaaggacctgaaacacaaataagtgatgaaaattgttgtccgtgcgatgacgtgcgtaataaggcaacccaggggggtaaaatagtcttttgagctcgaccattccatctgatcgtcagctttgtacaactataaagcaacagtgccctcccggcccatttctctgtgctccaacattctgggttttggtctttcatgaaaccctagaccatctctgtaactttctaagctcaacacaacatctccacctgtgactgagtctcacttttcgatgagcaagagaagtaatgccgaaatttcttgcttattctttttgttgttacatatttccatcgaagtagactaatgcatttgttcgaaactatgttttctttttttttttttgctctgtttaaggtatatttggactaggttgggttttaatagttaatgttctaggtttgtgttctaagattgtatattggtgttttgtatcctaataataatcccatttcattgtctacgtgactagtcaatattgaagaagttttagctagctcagctctagttaaaatggagggagaaagcagcaagaacaatattcctatgcaagtgaaatcatcaagctttgttgggtattctggcaatgttgttactattgggactgctgaagaagatgatcgaaggggacctgttctaatggaaaatggtggaaggagttggccgaataagaacaatgttttatgtttaccttggtgggatcaagttcaacaccagaaaaatcataactatgtccaatctctaactgaaaaaagctctgcatttcctcaaatgaatttatattcacaagacattttggagaatctttctttagctgaaggtgaaccagcttctgcatatgctgtttccggggtttctgatctccaaagagaagtgctgttgtacaatcacctgggattggcatctggttctacacctacaaatgtaggtgcttggaaggtattatgtgtatattcaaaatgccattagtgaagttgaataatttgctatgcaatattgggtttcgtttgtagttctctgtgtttttatttttagaggttctaacaagttttgattttactcttttaacatatgttggttcctccatacagaatcttacttcattgaacaaaaactcatttgggaaaaactatagttctggagttgatattccaagtgcaaatgttgcttcacctggctctgtatcccaagaccagtccactatacagaggaaaagaaacttaagaaatgatcaagtaagaaaaaaagcaataactgtttgactttcacctgcctaatgagtttctttgtttcataatgaactgatgtagaattgcatgtcatggagaaatttttttggtttcttatatagttttctgttaaagactaatataattagataggatatcaattttgcggaggggctaagaacatataatagttgattaattatgtataggctttgtccaaacagcagcgcaggaaacggtatgctgaaacactcaacaagttacaagagctacttcccaaatctgctgaggtaattctatgtattaattgtgctgccaagagggattatcttaaatgagatgtagttgaaaatcttgccttaaattccttattgtgtgttctctttaccatacaagactcttatatgtggttagttttgaacttgtagggtgtaggaggtagtcaagtatctgtatttgatgatgtgatcgactatatcaagtacttgcagctacaaataaaggtaaaagcctttctttctctgttctcacaaaactatcacttgattatcaatcaatacaggaatataatcttccttacactgccaccaactaaaaccatgtgtgtaagtaatctaatgtcttatatttgatacgatcaactataacagaacatctccaattgcaggatttgagtgaaagccgattgggaggtgaatcaccaaccaaacctatcattttccgcgaggtatataagtatttacattttaatgcaagcttattttctttcccttcaactcatcaagtgaaaattttatctgttttctctgtttcccttacagggatatggccactacttttacgaccaagaaacgttgaatgagcctttggaagagataatcatggcgaaatggttggaggtaaactctttagctgtgaccaatatgctggagagaaaaggtcttcttctcatgcccattgaatttacggaagcactacaatgatttgttatgcacatttctctcttgatttccacccaaaatagttaccagtattacgtatttttgtaatgaaattaaatgtctctacctctttcttgaagaactttacaatcaatcgcacctactaactctctttcaatttgggtaattttggttgaatttaggcaattttattatgtactcgtttatgtgtgttctgtcctttaatttttttttttt

SEQ ID NO: 225015 - DNA, 1676 bp, Cannabis indica
atcgttcctcttttattttgctagcagtttactcaacagggacggcagctgcggtatgatcacattcgggattggattgctttgataatctgaaaatgttttttccagtgattcaatgtcttttttcgcttggacgccgacgttgcttaggttagggtcactgaatccaccataaaaactgtagatggattgtattaagtcgattctatcgatcatttgggataacttggcgtgcttccctgccagacccagatctctaaatccagtgccaactaatatattccgatttaatgcgacggggttaaaaccgttgggaacgccgacaacgtgttcatatccggtcgtttcaaatgcaagaaccttgggcgcagtaagtttctggctcggaaacctgcgcgcaaaatcgaccatgtcttctcttttgggtaactcactgttcagacccaacatgatctgcttgaatgaaacttgtgtccgagctccctcaacggctcgatccagtttcccttgaaaattggcatcgagcgttccaaacttgaatattccatgggctttaagctccgcttccaagttgatatgatcactttcggtttctgtgtgaaatgagtacactccaatatattctccgccggtggtgatcgacgaaacatacgagtcaccgtaatggagaaagaactcgcgcatatcgctgatcggagcaacgatatcagctgatgccaatcgagcgctagtctgaaacttctttccttcaacttgtctagcgtgtacaacaattatcaaacacttgtccgtgattttcagcatcttgaaaaaattcatcttctcatcaattgatcccaaaatgttcatcttcatgcccagcgattgctttatgtcgatcgtttccatcagtgacttctgacctttacaaattgtgtacgtaacttcgctttggacgccgtcggtcttgctttctcccgttactgcggtcgagtaaccagcgccggttatgctcgaatagccttgaaaaagtataaccggcgtcatcggtatggccaaatcaattatcaggtcagttaatattatagagttgatgatatacatatatatatatatatatatatacgtgtgtgtgttgaaatttcttctcttcctttttcctgttagtaatacacaagtggcattatgaatatgatataatatgtgttgaaatcttctcttgtgtcattctcatagttatggcttatgctcaaaccagtaatagaaggagtcaactgagtgagacaccttaattaaacccagtcatggagtcaaccaataccaattgtgaagaaagaataggaaatgaaatgatatgaagatttatttttaatttcagaattttgataatttaatgaagttaagtggattaatgtgagtgattattctacgttatagagctgttgttcttcttctcctttgcctcattttttttctatttgttttttcttagctatctaatatgtgtcatctccttttgaaactttttggtttgaactgtatcatattgcaaggtcatggacactaattaaacatgtatttaatagagagaagaactagagattgaatcaattttattgtgggcaaacacacaagattaagttatttattcaaaagttggaaacttttcaatttgataactaaggatgttcatcaaa

SEQ ID NO: 225016 - DNA, 2011 bp, Cannabis indica
cactttactaatatggtatcagattttccctctctctagccgacctaatccccttttttttttcagatctagatccactattttcggatcttgactggtcctctcttttctcactggttttcatggcttgcactcaccaactttctcctgctgcaagctccgacgtcacttcggtctttcctcctgcggctgctcccgttgcctgtcatctcgtggaagattcctccactgttcaagacctgatcgttcttgctcctgaagctccgatcgaaaacacaactgcaagctccgaccacgtcgccgtcgactccaccaccgttcccacggtgtctcctccctcggtccttcccgctgctaccacctttgtcgtcgaccacgtcgtcgtcaacttcaccaccgttcccgtggtgtcttcacctgtttaagaaccggcccctcctcttgttgatgctctaatcgaacgcgcctccactgctccagatcttttgcgcaatattttgtctccatctcaggtcgatccacctccggttggacctactttcatggttgcttcggtcatctcttcaagatctgtccctcccgtgacgaatggtaatgctcttctcactcattctgtcattcaaaatgttgactctatttttttgcagccttctcaagatcggggttcccaagtcaaagggtcggctgccaatcatgcttccgcttctcactccgttttggacaaacttgctttgctgcaagaaataatttaacaactcatccaacagattaatcatgctcaatagtctcagtcaaccgtggatgtcaacactccattggcatctaacctaattggtaaatctgtatcattctcaaataatctctggattattgatagtggggctacccaccatatttgctttgataaatcttgttttagctcttttgataatatccctagtgcctcacatattactttacctaatggcataaaaatctctgttactaaatttggtattgttcacattaatgctaatttttgtttaaataatgtgctttttgtacctaattttcagtttaatcttttatcggtcacctctattgttcaagatccaaaatattctattttattctcacattctagttgctctattcaggacacgagtcggaatctacagattgggattgctaatcgcgttggacaacttttctttattcaacaagaaaataacgctacttgtaattatgtttcttgtaatgatgtacacaaatggcatttacgcctaggacatccctctttacggattactaaatccttgaataaaattcttcattttgatgattctgactcatctttatctccttgtcatgtatgtcatttagctaagcaaaaaagagctaccttttaattcagctaataacatggctcctactgcttttgacctaattcatttggatatttggagtccttttcacaaaaccagcatagaaggttatcgatattttcatactattgttgatgatcacactagatttacttgggtttatatgcttaaaaataaatttgatgtcaacattattatacctcaatttaatgcttatatactcaatcaattttccatttctattaaaggcatacgatgtgataatgcaaaagaactaaacttgtcatcttttcacaactaaaggcattcttccttatcattcttgtgtagaaagaccacaacaaaattctgttgttgaacgcaagcatcaacatatactgaatgttgctcgctctcttgcttttcaatctcgtttatattttaggtattggagttactttattaatattgttgtttacttactaaatcgcacaccatctgttttacttaaccttaaatcttcttttgagttgttgtataacaggttgccctcttatgatcatttccgcacctttagttgtcttgcatatgcttccactttggatagctcaaggcacaaattttctccaagatctcgggcttgtacattcattggatacccagttggt

SEQ ID NO: 225017 - DNA, 13202 bp, Cannabis indica
ctaatatattatctaacaaatacctgcttttagggcataaactctaacaattttctttcttaccacgtgacaacatagatgtccatgtcaccagggtcagtttctaggtaaacaaaatggaatgaccatgtgcttgaatcaaaatctccaagtcaagaagcgttcaaaaatctactactctttacttacattcttgaaattaatggtttttccaaaaactataagaggggttggttacaaataaaactgagtaatgtcaataacactttcaaatttggggtcgaagcaacgacaagggcacgatgaagcagcgttagtaggatcgtgcctgataacgttagagaaagagcagaacaaaatccagtgaacttgaggaattttccaacttgaactctaaagaaacgacaaataaggtaaatgtgagaaaggagaaggctaacagtatttataagccttcagccctcgatccatgtcacttatgatccagcagtccccttaaaatcctagttaacacattttgatctaacaactaaagatagacataaagaagcacatttatgaagagacgtttcgagtactcgagtatccgactatcactctgcatttattgcacatctcggaatttggtttcagaaaatgaatcaacttcattagaattggaaagaaaaagcatgtaggcatacgagctgcacattgaacaacacatggtgtgcttgtgtaaacatgcacgctctatatagtcgtgacatcataatacaacccctccaggagggaaccgaaaggttaaccagtggtaagtcccaacttaataaaaatgcaatctggaacttaaggagtaaatgtttccactatttttaccaaaatacatggtcgttcaagagttagtcacatgtctagtggacccctattgaaggagaactaagagttaatattaaagtctaaatcatgtaaggtttaggatggtgtattggcatcctggagcaaggcgtagtactagaggagtttccaaatgtcaactactctagcctccgggaggggcgagaacctcccagagataaggcattgttgctgactcttttcatatggacgacaaaaagggtttatgtatataaagaagatatctttaagattttgcccataatgttctgacatcacgtcccccatgaacgcctattgacgacttgcctcagtgctatcccatcaatcgtgaacacatctagttttatctcactaaatacctatttcaaatcctacctgatacactcatgaccacatgccatttcctaagcccatgggatgattgcatagatcctaactagcaaggaagaatgtaccagaaccaccaagacactttcccatttccaaaggagaagggggggtgaaaaagaattccacaatgattattacaaaaaattatattagaataattattttaaaaatattaatacaagtgactcgtagatttaaattaattaacgttctaaccacgtaaaaatttcttttatcttgacataattaatttagtcaacaggcattcaaaaaaatattatttataatgaccgcaaaatttaattagttttaaattcaagcatgcttatttttctttttaaaagtttgagaagtaaatagtgtattggatttaggagaatgatctaatgttttttcatctatatatttaccatgtgtatttattggtatggtgacattggaaatggagcaaacataaaaataataagctataacatgaaccccaaaaaaaaaaaaatattagaatattctaaaagtgtaacttttaaaattgtgtacctcattgaacttttattataattttagtttcttatttttttttcttatatataataaataattacatagttgattataatgatttgtgttaaaaatacaaaataagtatgctgatatactttttgtgggtgcactatatatgaacatttagaaaaatgaaattgttgaatgtttatatatgtatgtactatgtagtgtatatttttaccataatttggttggataagaggagtaagcgaagaggcaatggtgtgtggatgactctgtactcccaaacctttcattccttccctccctttactctttatcttccttttctatatttttaaataaaacatcctatttgtaaaaaaaaaaaaacaagaataaaaataatttaatttaaattaatttaatcaatgaacattttagctttataatttttgacattgctttttaaattttaagtggtgaaaaagttgaagaatggtaaaataaagcaatttttatatttatgagttatttttggatttttaaaagataaaataaaaatgaattaataatcctctctcaaaaaaaagaaaaaaaaaagaataaaaataatgatattatattttcacttgaaaattgacaaataaaataagataattttaatcttccattaaaataaataataataataataataataataataataattattattataattccgtgttagcaaattgaatcttggagttttttttggccccaaatctgtgtgtgtctgcaattttatgttcttctcttctgcgaaactcctgtgcttttctgttgattgctttctctttgcttcgtttcgctcgtgtctattttcgcacgtgtgttttccataaattcgatcttctatacgactcaatactatcaactctcgaccgaccttaattttttccctttcttgctctctttctctctcttattcactttctcactctaaattctataggggttgctctgaatctccgatcgccgtcgtgtttctcaactttgtcgatactttgtgtttcctttaaaagccctctgtcaatttgggcttacgatgtttttctgaaaggtatgacttaggtgcctagggtttttttttttttttttaattttgtaatctgattttgatttttgtagctgttgactcttttttcttttcgttaggtttatccaatcgcgtttcttaattgttctaatcgcttaattattattcatactacctatcctcaaattgggggttagagcattaacgatctacttttgccgccttcaatttgggcacttcaatttagtatttgctgcatttttttaagttgaaattggtgtaaagtttagttattttcgagtctatgaagcattttgattttttctttgacatataggcgtttgactgtttttatttccattctttgaagtataacaattgttacattctcggttgtgaatttattattctctcgtagggatattaactagagaatattgaagtgggacagttagtagcttttttagtttgatcatattgaagtattagtaagaatattatgtatttggattggctctgtagagcactgaggcaatttagtttgtgtagcctgggttacatacattgttgataaaagcttttgttgtaggtggttcatttggaaattcccttgtgtttttgagtaatgcgatacttggtacttaggggaactgtagtgaagaataaagaagatgaatgtgcaagctcacatgtctggacaaatctctgggcaggtacctaatcagcctgtaatgcctcagcagaacgggaacccccatccttctcagatgcaaacattaacagctcctcctcgtactgggagcaatatggagcctgatgttgtacgagctcgtatgtatatgcaggaaaagatgtaaggctcaattttccaattgttgattatgtttcattgtcaatgtaacagattaataagtaaaaagtgtgtaggaaaaaaagtgtttagtaaaatcccgaaaaatttaaatatggattaacttgggccatgtttggggcagctttgactatcccaatgtagcaggggtcttcatcagtttagtggctttttcaacgagcatactcaaaatggcttaaattaattatctatgattatatggaagaaaatagttattattggacttaaagacatagtatgtattaagatatttgtggaaattagtttgattgagacagtgttctgctattatcagtttattacttttgggcccaatcatctaatgagttttctctatccagttatgataccctattgcagcggcatcaacagccaattaatgaaccacagaaaaagaagtttaaagatattgttaagcgcctagaggagggtgtatttagaatggctacttcaaaggttagcctgtttgtcataagttgatgttttgtatgcatattactatccagacaatttagtaagatgcattcttttcctattctgctgttgagtatttcttgcattcatagttcgttcaattactattattatcttttattctcccctgattttgcaattatcattttaggaagaatatatgaacctggaaacattggagaaccgtttgcatagtttactccggcgtccacctaaccaacagacacaacacgtaaataattcgtcttctattggtgcaatgataccaactcctggtatgtcacacggcgggaactctaacatgatggttacctcctctggggacacttcaatgctttctgcaagtggaggtggtaatatagcttctaataatgtcaacactggaaacattttgtctactggtacttttgctggaactgctttcaatagatctgatggtaatatcgagttttattatgtttttgagttatgcttacctcttgctttggagcaacttgattgaatatggttttgcaggttcggtatctaatgggtatcatcagcagtctccagccactttctctgttggtcctggagcagcaagtatgttatcaatgaacgggcaaaaactcacaagtcaaatgattcctactccgggattaagtggcaataataatcagtcatacatgaatcctgaatcagcaagtaatggtggtgggttttctactgttgaatctcctatggtgtctcaaccacaacagcaaaaacagcatattattggtcaaaacagccggatattgcacaatgttagtagccaaatggctggtgggataaggtccttacagcagaaaccttcttatgggttctcaaatggggctctaaatggtgggctagggttgattggtaacagtctaccacttggtaatgaacattgcacctcagaaggctatctgactggcacatcttttggcaactcacccaagcccttgcaacatcagcgtcaaattatacaaggtatttgatctctgcctctccctttcttcgtcaagctgtatgtggacaaaccttatgcatgatttgcacatttctttattttgtaatggtaaatcttcaatatatattttgtccaatagtagaattttctttctataatgacatcagcaagcattctcattatgaatgatttatttatcaggtgatggttatggaattagcaatgttgattcttttgcgtctggcaactattatggttctgcaacatctgttggaccaatgatgaattcccagaatttgaattcagttaatttgtcacctttatctaaaacaaactctactctcataggtaatcagtcaaatatgcaagcacaacaagctgctcttataaagtctcaaccaatggatcaaatggaaaatatgagtttccaatcctcagtatcttcaagagacaatcttcatcctcaccagcagcaacaatttcagcaacagcaatcgtatcaacaacatcaacagtttgtgcaccaacaacgtcaaatgaagcagcaaaatcagcaagcccagcattttattaataatgacgcttttggtcaccctcagatgacatctgacctaagtagtcaagtaaagcgtgagcctgcagaactccataatgaagttctgatgccacaaatacctgaacagttccagttgtctgagatgcagaaccaattccagaactctgccgatgaccatatgaggaattctcaacatcatatttctcttctgtctggacagcaagatatcacctcatcattgccgcaaaattctcagcaaatgcaacaaactttacatccacctgagttggttgcagaatctcaaaatgatttaggctatgttgcggctggaacccaaccagaatcagtactgcagggtcagtggcatcctcaatcacaagacaggagtaatagacagggtaacatagcgcatgaacatcatttgcaagaagatttccgccagaggatttcagggcaggatgaagctcaacgcaataatttatcatcagaaggagctatcattggccaggctgttgcttctaaaggtactggagatctctcatattcggccactactgtacgcaaatctaccaatacaaattccgagcgacagtattttaatcaacagaaatggcttttgttcttgcgtcatgcacgtcgatgttcagctcctgaaggaaaatgtcaagaacttaattgtatcactgttcaaaaattgtggaaacacattgagaaatgcatgctacatcagtgtccgtatcctaaatgccaacctaccaaggtgttgcttcatcatcacaagcgctgtgtggacccaagctgtcctgtgtgtattcctgtgaaaaactactttttggcatccaaggcacgcctccgtgtgacatctaattctgctttgccaacttcagttagtggaccttccaaaccctttgataacaaagacaccccggggaaattgataccaacgactcctatagttgaagcatcagaagaaatacaaccttctatgaaacgaatgaagatagagcagtcattacagcctcttgtttctgagagtcacaatgctgctgtttcagtttctttgattgatgaagtaccattgtcacatggtatacagcaccaagagttaaaacaaggtgacattgagccaataaaatctgagttggcagaagtgaagtcggaacttcctcctagctctgggcaagagatctttgatgaggtaaagaaggatattataattgataacaacaacctaggtcctaccgaacctgtcacatatgatgattctactggtttagctaaacaagaaagtgttaaatatgagaaagagattgaaccagctaagcaagagagtgttcctcagcctgtagaaccaactgtaacaaaatctgggaagccaaagatcaagggagtttcattgactgaattgtttactccagagcaagttagacagcacattactggtctaaggcagtgggttggccaggtatgtatatacacatatattttatatatatttatttttccttacacattttgaactttctcgtgtctttattttgtagaatcacctgttcttgtttaggatacatttttcaattttctctaacgtagagcagaaggaaatagcagaaccaggacattggactactgcttttcaaactaaaaaataaaaaataaaatagttgaggaatgattttaaattttttgtagatgaaggctgacaacaatttcagcatttcaagtctttgctaaaatatattttttattcattttcttaaattaggcccagaaacacgctagttatttgttgttatttcataaacctaagtagttgtcaaccaaaaacagctgcattctagcacgtagtaagaaattgttttctacaatcaacttagtcatctacttacatcctctattaaagatttgttttggattagtaagtcatttcttcctttactatatcagagtaaagcaaaggctgagaagaatcaagctatggagcatgcaatgagtgagaactcctgtcaattgtgtgcagttgagaagcttacttttgaacctcctccaatatactgtactccatgcggtgctcgaataaaaagaaatgctatgtattattgtatgggtgctggtgatacacgccattatttctgcataccatgctacaacgaggcacgtggagaaactatagttgttgatgggacatccattcctaaggcaaggctagagaagaagaaaaacgatgaggagacagaagaatgggtatgtatttttctgtggtgtatacaaatatgtttccttggacatttttttttttgtgggtcatttcaactcaatgcctgtatttgcagtgggtccaatgtgacaaatgtgaagcttggcagcaccaaatttgtgctttatttaacggtcgaagaaatgatggtgggcaagctgagtacacttgtcctaattgttatatacaagaggttgaaagaggagagcgtaagcctttgccacagagtgctgttcttggggctaaagatttgccaagaactattctcagcgatcacattgagcaacgactgtttaagaggctgaaacatgaaaggatagaaagggcaaaacaacaaggaaaaagctatgaccaggtactttattatcttccttttatttctaattggggatgtggtgaagatacttgatgttctttgttaacattatttattgaacctgtttataaattgaaatgagtggatataaaattgggttacatgctatccatgctgataatgttactgcactttgaggacatgggtggttaatataggtggatataataattatgattaccaaatgtccctttgggctttaatatattctaatctagcggctcaagattcattgttggagctgtttttgggtttcttctttacaaagcaaacataggatttgtttgaatgtttttatatatcaatattttttttattttccaaatgatattttcgggttttatatttggtcgatgtgccatttctcaacataataattaactttggataaccagatgtatgaatttaatcgctaatgttttattttgatcagtggattactctcaagatagggagaatgagtacttaattgtagcagttttgtttttgaacatgatttgattataattttttaattttgtttctgccattaggttcccggagcagaatcacttgtaattagagttgtttcctcagttgacaaaaagttagaagtgaagcagcgatttcttgaaatttttcaggaagagaattatccaactgagttcccttataaatctaaggtttgtggctggatattccatcttacttcttttgatagatgatctatctaattattcagtactggagttctaatctatttacacttgtccactctaggtggttttgttatttcagaagattgaaggtgtagaagtatgcctatttggcatgtatgttcaagaatttgggtctgaaagccagttcccaaaccagcgccgtgtttatctttcatatctggattctgtaaagtattttaggcctgagattaaggcagtaactggagaggctctccgtacatttgtttatcatgaaattttggtaaattttctgggtactatatatctccgtgtatgatatatctcggtaatgacttgtgtaatatttgaatgagttggtgactttcatacatgatcatgtttgcagatcggatatcttgaatattgcaaaaaacggggttttacaagctgttatatatgggcatgccctccattgaagggagaagactatatattatattgtcaccctgagattcagaaaacaccaaaatctgacaagctccgggagtggtgagctatagaacttttgtatcatttgttaacaaaattccagttttactaatttttttttgttggattagtaaagagtgatcttgaaccatctagaaactccatactattacagatagcatgatagtcttttacatacgttaatgtcttttaattgcaggtatctagcaatgcttagaaaagcgtcaaaggagaacattgttgttgatctcactaacctgtatgatcatttctttgtatctactggtgagagcaaggccaaggttactgcagccaggctgccatattttgatggtgactactggcctggggctgcagaggatctaatttatcagctctgtcaagaagaggatgggagaaagcagaataagaaaggaacggcgaaaaagcctttcaataaaagggcgttgaaagctcagtctgacctctctaaggatctgctactgatgcataaagtaatttctcaatcttcaccttttagctgactcgtttctgttgttgttattggtgttaggttgtgtacaatagtatctgttttttttttaatgttatgtcaccctcagccctaatgtttttatgcactttgtgcaaggcatactgagatattctcttactaatctaaatactattcttcagcttggtgaaacgatatgcccaatgaaggaggattttataatggttcatctgcaacatgcgtgcagtcattgctgtactctaatggtatccggaaatcgatggacttgtgaccagtgcaaaaattttcagatatgtgacaagtaaggccctttataattttgtagggggtgttcattatatttgttttcttgacaaagactcctctgcttcccgtttcagtctattgctttttattatttcatgacaaagtacattcagtagtttggtcttttgttttgaaacttcatttttccaagtttattaaaggtccgtttgcatttattgatatagtgtagcttttacattttattttttctctatctttatgtcgttctgtgtgtgctgatttgtttcattatgtcggtatcaagtattatagacgggtctgatgcaatgtagtatataaatgctattcttttatttaatcttatttcatgtttttcattgtgatgcttttattattgctaggtgttatgaagtagagcagaaacgtgaagaaagagaaaggcaccctactaatcatagggaaaaacatgcacttcgcccggtatgacagactattttttgttccccccgtttttgattgtttgtttatctattaaagttgtcaccatgaatatttatttataacgattcaaatgacatattccggcaggtggaaattactgaggttcccgttgatacaaaagacagagatgagattctcgagagcgaattctttgacactagacaagcatttttgagtctttgccaagggaaccattatcaatatgatacccttcgacgggctaaacattcatcaatgatggtcctttaccatcttcacaacccaactgctcctgcatttgtcataacttgcaatatatgccatcttgacattgaaacgggccaaggatggcgttgtgaagtatgtgctgactatgatatatgcaatgcttgttatcagaaggatggaaatagtcagcatccccataagttgacaaatcatccatccatggctgatcgtgatgcacagaatcaagaggctaggcaattacgtgttcagcaggtactcaccttatttcaattaagaacttctgtttctgagtttttctctgcactaatctaattatgattggagtacacgagattgtattactaatgctgaaagttgtttctgtaatatttgcttcttcctgtgaatattttttgtgccctccgcaaagttgatatccttagtttactctggttctggttttcctttttatattttttaactcaaaatttgacatattgatgtttatattttgcagctaagaaaaatgctcgatcttctagtgcacgcctctcaatgtcgctctgcacaatgtcagtaccccaattgtcggaaggtgaagggacttttccgtcatgggatacaatgcaaaacacgtgcttctggaggctgtgtcctctgtaagagaatgtggtatctcctccaacttcatgcccgagcttgtaaagaatctgagtgccacgtaccacgctgcaggtacatgacttaagctcttatttttttttaataatcaaaagtctttctctcccatatggaagtgggatttggtttcttactaaaaagatattgcttttgcttcactcttctctttcgtatttgtttttagtctttattaattgtcaaaagtttaaaaactataattttattttattcagagacttgaaggaacatttgaggaggctgcagcagcagtcagactcccgaagaagggctgctgtgatggagatgatgagacagagagcagccgagcttacaagcaatactggataaccaaacgaatttgttattgtaaatattagtgtttctgagaaacccttcagaacgtggggaaagatttgacaaatgacaatagttttctactgccttgctaactgctggaaaccgggcagtctgcagaaacagtgggaatgaagattatacagttggttggaaggggatgacgacgacatcacactctgcatcactcaacagagtttttacgtttgctttgtttgggaaatattctcctttcctggttatcatcattatcatcttagttgacacaaagaagattatccctagagaggaaaaaacgaaaacaagtgaagtaatatgaactgaagctgtccttcctctttcgacaacggctaaccatgccttgctctatcggcgaaattgtgtagcactgatgcaaatctgcctggtagcccaatttggtgattctttgattttatggtctggtagtaatctgtgaagatgccatcccatggtggcaagtgtactataattgtcttaatctgtctaaaatgttatattttatacagagaaagtttgaggagtagtttacatattttttgtctccttttctctttataaaagtttcctcctttctcttcctttcagtaagtatattgacccattttgtagaatttcccccgtattttaaagatagaagaaataagtagttttttgttctctttattttgtagaagtcacattttttcctttttgctaatttttaagttatgtttattgcatcagtccacagtttaattaaatgaaaaaagggaaagctttcgattacttgtgtcgtttactaaattaatttgaagtttagtggatttttcaaatgttttgttttgaatgactagctaaagattgcctattaatcatttctaaatacacttagaatattttagctagttgtattaaaaaaaaatgagagcaattattcatattaaagttttctccaatggataatgaatttttttgcatatatatttaataaataagtttgaggattgttattagggaaaacaacaggaaaattccagaaagggtaaaatattacaatattaatgtgggctggcccaatcaacatttatacagccccattgaaaatattacaaaaataccacctg

SEQ ID NO: 225018 - DNA, 4350 bp, Cannabis indica
gtactaatatatatatatagatatatatacaattaaattgttagttacaaaaaaaaaaaaattaatggtctatagagacaagaatttagcccatatggaccactctaaatttaatggtccaaagaaaataagaaagaatgtttaatgcttaatttcttattcagaagtctaatagtggaaactaataaatgaaatttaattagtacaaaagaaaattgtttgcatttatttgcatagggctaaaattatataccatttttttttatgtcggtaaagccttgttggtattttggatactttaattaattcattctaatttgttatacatttttatgagtgtattgttattaggccaaatagaaatattaatgatgtggacaatcttacaattaattttagagcattattattaggttaataatgtttagtattctctaaacgtgtcacttaacgatactttctaaaaattattacattaaattacacgtaagattgaccctaatataagtagaaacttgtatctaggactaacaattttcgagaactcaaaatataaattgaaaagacatctcattaagtttttatttaactaatattaagtatattgtaatcaacaaatattaacaatttagttagttgaggaggaatatgacatattatttccacaacaaatatcttttggctaatttaatattaattattatataaaataaatgccaaattaattaatatccatgttactattcaataatatcatgttaatcatctattttgttttgtaccatctatcacaaaaattgtgaaagtgaaacactaaaaaggtctacgtacgaataagacttttttttttggtcaaatatatgcttattttaaattcggataataaaaaaaatatgcttttctcttttcttaaaaaataaatattttttatgaaattgtaaaataaataaaatgtaatgaagacaagagaacgtgagaattggtgtggtcatatagtgtgtgcatgaacacatgcatgattcaagcctttttttctttatttggaaaaattagttttttatttttaatatataataaataaatatattttttagtaaaaaaaatattttactaaaaaaatattatagagtattataattttctttaattttagttgtagctataaactgtacactaagttaattttttaactgtttaccaaatatttttacagtacattatttttaaaaaacaacttttaatttttttaaaaaattgtatcaaatgagcctttaataagatttttcattttataagatcttatgattcctatcttatataaaaaggctttttttattcttcttaatattctttttattttttactcaaacattctcaaaagtgtgttatttttctaccaccaatcatggtaaataagtacactattttcttaatttttaattttatgataattcaactagctttgtgcaatttattctactatagttatagttgaaaatttattattttttattttatttctcaagaagatttttatttttatttttatagatttattcttgaccactcactatactcaagaagattcactctattaatgaaattaattaatttattttctacttaattatgccctttactttacgccaaaggcattccctagactctagaatctagatgatataccactattttatgatatttttctaatttttttatattattattataattactattttactttaaaattattcttttttattcatttttactatgagactttttttctcctctaagcttctattaattgagaccattaaagacataattggagaccacctttattgatcctttgcattctcatctaaacccatatcttaacccatcagataccaccagtgtttcttcacctttgcatgcctatctaaacccatgttggaaaatttatcaaactaactatttaaaatactaaaatttgtaaaataacctgacttaatttactttatgcgaccatcaatgtaaattcatagtcgttttgcgatcataatggtcgtttatggtcgtacagtgtgattcatggtcgtttttgcgaccatagaagattattttgctaataaatttttttataaagttattttgctaataaaaattttcataaaggctattcttacaaaacattcacccatgttgcaaccctaaatcataaatttctctaaaattgaagcctaatacgtaaccataaatcctcatctaaacccatctagcaatattctcaaaattgaaacctgatttcaaaaaatcgcaactcatataacagttgcaagaacaataaaatttacaaggtgttctttctcccatttctccatcatctgccaggtcattggagattgcaaaggaagttgatgaagattgatgatggggtaacaatttgtgtagtgtagattgacttacgacttgagtttctgaaattgtgactcgactgcaagcttaaattgcagattgggttacgatttggactgagactggtgtcgatttgggttgcaacttgagttgtaatttgaaatgcagtgtgagttgcgatcatttgttacatgtatatttatgttttttgggttgcgacttgagttgtgattatttttacgactttaattgccatttatgttgtatttttaaggttgtaaagattaatgatataatagggttttccaaagtgaggggattatgggtggttgttgatgagacaaacctaattttggctaggaaagaatgagaatggaagaagaaatatggtatggtttcgcttttgagagaagctgagaacaagacatgtttttgcagttatggttaaaaaaattctaacatggatgaaagttcaagggacatgatttagtacatatcaaagtttgaggggcatgatttggtagatatcaaagtctggggagcatggtttagtacataaataatcactgaaacagtaaaattgaatgaaattagacaaaagtctttaaatttaacaatcttaatagttcgcgggggaatttttaacggccaaaaaagttgaaggagcgcgatttagtacatgtcaaagtttagggaaaaaaattactaattagcctaaaaataatatatagagtaattgttttttttttttataaaagtaaatgagagagaaaggagaaaagcatattccattagtcggtcaacttgtttgatatttgtataataaaaatatatatttaataaaaggcttattaattaatttcttgcaatatctaaccacatggttacatgttcccatgtctagctactattttgttacttatttttcgacaataaaaggatcatatactcataatgtagactatttaactcttttgtatatggaccacaaattttacttataaaaatacataaataaaataggaactaacctattttttttaaaaaaaatattattatgtacttgaaaataattagttttttttttttgtgtgtgtaaataagcttaaattaattatgtgtacttaatgattatttatttatctattgtagcttttaggcttaattagtttggatatgaaagctcattttacaagtccttgttttattttatgtatatatatggtaatgtaatacgagtatattttgaaaatacctaataagtaataagttttttttagcaaaataaatatatattatggtaagtaaaatttttattaataggtaaattaaatataatttattatatgtagtttattgagcagaattaaccatgatagactaactaaattgtttaaaataattagaaattgaaatcgatagcttactttctgtctaagtcattctttgtgatcaaaggacgcgattgctctttggtttaactatttatgattgccgagttttattattttctttaaatactactagtttacattttattagacgattatcaaatcaataagtagcatattttgttgtgatgtcgcccaattagttacactgcggtcgcggtagtaaacgggctatgtcgtatccacagggaggcaaattactactaaaaattagtataaatagaaaaagatagaaattggaatgaattaaaaataatgaaatgatgaggtgaaaaagttgatcagataaagagtttggtaaggtagaaatgtagttatgcaaatcttattctaataccgatattaattcaaaacacagttgtaattctacaccattaattacaactggaagatatatatatatatatatatatattatgagcacaatttaataatcttgaataaattgaatctcacctctaacttaacagcatatcatattatatatcataaatcg

SEQ ID NO: 225019 - DNA, 6530 bp, Cannabis indica
aataaataaataaataaaatgtagctgatatttttaaatgttatttacaaatctagtaaaagtttatttcacaaaaactttccaaatttcgtaatttgcatttcaagttttatgcatttttaaaactttccctctctttaacggtctgggccagcaccaacggcccatatttagaccaaaagcccaaatctggcgacagttgcaccaccaacactttagcaagacttggcatagtaatgtttatttatttgcaaaatcaatttcaaaattttcataatatatatatttataacatgttaaagtcctcttctgtcttaccatgaaaatacaagaacatgtatctaagctaaaaatagatattagctatgacttaattaggacaaagtgcagccctgcctgacctaaaaaatttccaagagaaatgggaataaaaatacaaaccttacttacttctccattgagatgggaaaggacataattgtaattctgacttgtggccaataacatgcacactacaaagaaagacccttcatatttcttttacaacagtatgctacagcactttcgtagttcaactccacattgtcaaccaaaaacaaatcacataaaggttgaaatggcaaaaagaggacacagagagaatcatacatgtcgcgcagtaggctacaaggtccgttgtttttttacacaaatcaacatttttttttctttgcctgggacaaataattgtactcagacccctccatatcatatgatccttctaaggcaccaagcaaaggtaggcccatttttatctatgggacactatcaaaaaaatcacaaaagaaagcaagtaccagatgggcagaaaatgatacagcacctcttttgtatccatttccatacgttgaacatccaaccgcatcggtgtgtgcttcattcactactaactaccccaaatttaaagaaccatccttcatcagcttcatgctaagactgttgaatcttcctcttgagtaatgccgagaagcctttctccaatctgttccagttttcatcattgccacgaactcatcgtagctgatacgcccatcctgtatccattaaataaaaccatcagtcgttttattctgatcataaatgtttcagaggttagctgttggattcgagacacaccttgtctgtgtccacttccaggaaaatgtcattggctacatctgtacaatcctctgctccatcttccatcaatgcatctctgagctcatctggctcgatgtaattgttcccatccctgtcgaagtaggaaaaggccttgcgaagatgctcgtcattggccattctttgtaggtgcaagaaaacagcaacgaattcaccacagtccagcgttcccttcccattcgcatcaacctgtatcacaaaataaatgcctatcaaaatgagaaccaaaaagactaagcatatcgcatatacaagccaggtacgagcacatagcattattcctacaactaattacatgaatatgtgaaacaatagcaactcaacatatccatacgtatgattactcagtatgattacacacaagagaaacacaagtggctccattaactcccaacagtcaaaagtatccattaataattcagaacatacatatggcattgtctaaaatgtgtctgcttgcctcagatgtccatcgaacttaacaaaacaacaaactagagaactaatcctcaggagaaagaaattagctactggacaatatccatagttaattaattatatatttcaactacagttcttgtaaatctaggggatggaaagatttcgcttactagaaaataaatagcaccatatgtaataatgtgaatggtcccgattgcataacaataagtgcagcatataagatatgaagtgagagtcaacagaacatgaatgaaagacactcacagcttcaataagcgtctgaacttcagattctgcaagctgggatccaaaatttttaagtccagatttcaattcttcaattgaaacaataccatcattgtcagtgtccatctttctaaacagttcctttacatcttcaacttcttcagtggataggaattctgctataacctgtttaagggacaaaatgaattatctttcgataatctaacagaaaaataaaagtaacttcatagaaataggcaaccaaccctcaaggcctttctcttgaatctgttcatcattgaaaattgttttagccttgatttgacaacatctccgagtgggacatttggagctttcttagcattttggagccacggatgctctgcatacagacatgtatcagataaaacacaacccctaatctattgaaattgaaaattcaagggaaaaactactgtaagtcataaattctacattatatccaatgctggtcaaagaaaagctgcagtttagcatccattatgagaatactttgatccctaaaattgtagagcatggacaatttaataaataattcggaattccataaggcatcctacatcctccatatgcaaattactgtctcaacatcaaaataaacctttataactgaaaattataacagatcagtgatctgagtaaacctattcatttaaataccaatttctatcccgatgtatatctgggctttattgacactaaacttccattaatgcatctacgagatacagcattaccatttacaacatgaacttgcagcagcataaatcaatatgtgtaagcatcccttctaagagcccttgccacccactaaaaaatgcaacctgtgtctacttaaatatgtaaatgcacaagatttcacagtattgggattggatttcatttagcaatgccagatctacattcgtactcgagttcattttagcatatggaacttaaacttttatcttacttttctaatctgtaggatgactgtaccagaacggaataaatgatacagaaacttaaaatggagccaaaaaaacattttaacaaaatatggcctataagcccaaaaaaaaaacattgtaacaaaatatggcctataagccagtataagacacattcccctgcccatttcaaatatatgataaagatacagaataaataataacagcctatttaataagagattgtttaacacagtaaggcagatgatcgtgagataagagagacaataccaagaacttgttttgcagttagtcttgccttagggtctggctccaacatctgcctgactaaactcttggcactttcagagatattgggccacggatcacgtttaaaatctattaggccacgaagaattgcctgtgcaacaccttgttcagactctgcattaggagcacaattaagtcatggaaacacccatctacagtaacagagaaaaaataaaataaatttggactaagaaaacatactgagtaaaattaagatatcaagctaacaaatgctaaagttttcaaacagacaaacaaccaagattaaaaactaactggggggataaatttaccagcccaaaaaggaggaacaccacataacaaaatatagaggataactcctgcactccatatatcaatttctggtccataattccgcttcagcacctctggagccatataatatggactgccaacaatctcagagaacttctcacctagaaacttgaaaaagttagtgccttacccttacgaattacaatacaagagcatcgcaaaacaagtcacaaaaagcacaaaaaagcaatagttgaggaaaagtaattcactaaatgatttcacaccaaaggtcatttaaacagcactcccttgtgaactgttttttttttttttgtcacttaaagttgaaaagattcaaacataagataagtgaaaggagaaaggaaagataaagatgaagctggtattcaaaaaaaaattgaagtgtgtagttaaactaagtcacatggaattattcatttccattatgcatgttccaaagggaaattaaattagcaaggaatagaagaagtcaaaatacagaacatgaccagtgaggatatcaagttatacgtatgatctgaatattcatgacaggaaaaatgaaacaagattctaagatgatgagagaagttgataagaaatgaatgaaacaagcacctgtatagagtactgcgtatcaaaactttaaattatacaacaacgactttccccctagcaggtaaagaaaacctaaactcttttactaagaaaatgggacatgcattgtttcactaacaaataatgacaacattaattttaatcacatatttatttcacaaaatatggaaccaaatagcttgtttcaatttaatgaatataaatctgatctgaagccactgaacaaagatattaaacaaaaaatgcagaggccaaagatgtggaaaatcatatgttcacgcagtttgaacaactgatcaatgagactgtattacatttatgtatgctaacaagagtttaagaaatgcaactagaaacattagtggcaactggattacagttaatgaacatacagagatattaaagcatacaacaaaccataataaaacgattaaaagtaggccataagcattaagctcaacctcaaataaatccctcttatcccttttctcaattttctaaatttagcaacacttgaaacttatttcaatactcatatcctgtagttactagttaccgaaattagtaaagtacgacaactaagtataaacattgagatcaaagttcatatttttcagaataataatagaaaaagaagtgttttattacctggtttgaaaaatatagacaacccaaaatcaatagccttcaaaggagaattctccttcttgttcgcgaacaaaaagttctctggcttcaagtccctatggatcaccccatgtttatgacagagctgaacaacctccacaatcgtcctagtcaccgccgcagccgctcgctccgtataatggcccctagcgacaatccgatcgaaaagctcgccaccctcacacaactccataaccaaatgaaccgcattatcgtcttcacaagcctccttcaaggtcacaatactagaattcttcggcaaatgcttcattatagcaacttccctcctcacatcgtcaatgtccactgcagtcctcaacttccgcttcgaaatactcttacaagcaagtaactccctcgtctgtcgttcaatacagagataagtaaccccaaactcaccacgaccaagctcccgatccaccaaatacttctcctcaatattctccttcggaaccccagtcaacacagtaacaggcgccttcttcacagcattcgagtccctccgtccatgatcttgaccggaaaaactcgatttcacatcttctctggcaacggccgccggagatctgcaacaattccccattgccctcccccttctttccccttactccagatcttacaaaaaccctaacccaaccaaacccccaccccggctagggtttcacatcataatgccgaaaccctaaccctcagagaacactacacagaactccacaaagctcccaaacccaaatctgagcgataaataacccaaaaatatattttttttaacaaaaaagagaagaagaaaatgaagctgaagaagagaagaaagaaccgtagaaaaacagtgaagtgtacggtaacggctctgatactctgtatagagattagtagaaagagagagagagagagaggagtgttatggtctttgaaggatttatttaatttttatttaattaattaaatataggaaagggagaatatttagggggtttaaataataatttaattttggaaataaataattaaataaaatagataatattataattgaatgttcttcttttggttctgtgagctttgtcggctaatcgaggatggtttgaacggtcggaacgggacggtgacaataggaagacactcttctttactctttcaaaaaaaggagatgagaatttaaattactcatattaatattattattattattattatggttgaagtaataaataataatccaataaagctagtcaaattttttattgaaatgtaataagttaatttttagattaaaagtaattattctgattttaattcggtttgggttagtaaatattttgtatagcggatagagtaaaaaaggaaaatgaataaccatggtcaaaatgaaaatagttgggttgtaaaagattgtgaattaataaataaccattcaagggacagaatgataagtgcttattaacttcttgactttgcagatccacccctactcttttgaaaattttatattaagcctttttaaaagagaaatttgactttgtatgcttaagaaactaccacaaaacaaaaaaattcccaaacttaaattcattatcaaataatgctattggttcccactatacccaaaatacccttctcatttattttcaaataatctctttctttctttctcggtttccttctctatctctatctctttctcgtctttctatgttgtacatgttagaattattattgtgg

SEQ ID NO: 225020 - DNA, 5264 bp, Cannabis indica
aaaaaaaaaaaaaatacaccaaattactcaaagtaaatacatatggaagattatattattagtaaccgttcatgaatttgtacttttaagaaagagtctattattacttttctcaacatacatatacattgtattgtagggtttttttttttataagcaagaaaattttattgctatctcaactaatacaaagccaattagcaacaactatacaattaagcgatcaatgctaaaattcttctttggcaaagttaattatagcattcattttctctgtataaaagagagaaaatctatctacaattgttctttttaattctctttacaactatagatatagtataatgataaagattgttaaatctatttgcctccacaaggggagagctgatattagaaaaaaaaaaaatcatggttaaagacttaattaagactaaattagacagagatgaattgatgaatatatgaagtttacagtctctagtttgcacaagaaaatctggccaaatactcatccaaaagtgtggaataggatgagtcttcctaaacattagttcgttgcttggttagcattttggatgaggattcaaactagagatagacttcattatttagttgttcaagaggactattgtttggtatgtgatagagagagtgagacacactctcatatatttttcaataaccatatctgggaggctataggaaagttttgtggaatcaaactttatatactaatcttttagttttgcgatttcacaattgaagctcccgaaccagatctgaggtgcttggaatcgaaagcagcaacgaattttaatttgtactaggcttgctaggaaggagtgggagatatagcctcaatcggtgctgaactagaagttgtggctgcttcttcagtagtgctggactgagatgtgatggattgagtagcttgataatcctgtaataaattccaaacatagctttctgcatcaaggaaattgttagaactatgattgaaaagtttgttattcctcatgttctaaatttgccaagacaatcccagtaacaacataaactatcttcgctaaggatttcaagacctcttaagtaaaaaaatttgatgtcacaattgtgattatagtagaataaaattgtttgagtgaagatttcttccagacagacttagctatgggatattggaggagggcatgggagactgttttgacctgggtattctaggtggggcagtaagggtgcaaaagggtttttttttatgatggacgttaagggaataggggaggatgtgattgaatgctttctaggtgaagtgtttcattttgggagttattttggcattccagattgctttccaccaggatttagaacaattagtattggaagaagaaggcaaaaaagggaattgaaattggcaagatggtatgtcgagttaactgtgaagatcctaaaatggtaaaaaaaaccccatgtgaggttgtcctgctgggtgggatcaattgggatcttaaggatctcatggacttgataatgtgataaatattgtttaagggtagaaatgtcctagttgccattattgtccatgaaaaaggagattgtctgaacagtagggtcaaaattgttaaggaaagagagggagtgaagactaggaatccagttatgggcttttaaggatatggacctgtcatcccccactttctagacgtggcctttcttgagtagttatcttctccagaggagacttttacaagtatgtgaagcgtagtgacccttaggagtattaaggaaatcattatttttgaaatatctggctgtgaggagggagtgaagtagggttgaaggatttgtccaaattttccaggcctgcttagcaataagagcttgattatgattagtgagagatttgaaaccaagaccccatagaattttgaagtgcaaagagtagaccaacttttccaatgaattttgttgttattgttacaggaccctaccaaaatttaaaaatcaaacgctgcaaggattgacaggtggctttggggagtttgaaacaagacatggaaaaagagaaaatagcctagaccacaatcttgataagggtttctttgcctgcccttgagaaaaatttgacattccagtcattcatcttggaggaaaccttttgaacaagatagtggaagtgctcactattcatcttacgatatttgctcacaaagctctcatagcctaggccaagggagtttttgaatctatttttagcttcagatgtgttgtttcgggaaaacataataaatgacttggcaaggttaatagtttgcctagtggctttgtgataaatagtgagaatgtcaataatggcagcactggagctttcagagacagggctaaacaaaatgttttcgtcggcaaagaggagatgagaaatgataggggcatttcaacaaatcctaagaccaacgaagtgatgactatgctccttaacacgaatggcagttgagagaccttcagcaactaacaggaaaatgtagggagagagagggcccccttgtctaattccccaagttggagtaatgaccttagagagagtattattgatagatatacgatattgcatagtggaaatacatttcatgatgagagaaatgaaattgcaagggaaacccacatggaggagagcagccttgacaaagctccattcaaccttgtcaaaagccttttccatgtcaagtttaagagcagcctaaccttgtttgcctttttttctatagtggatagcattgatgagtttattggcaatgaaaatattgtcgaaaataagttgatcagagagaaaagcactctggttactagagataatagggtgaaggacagttttatgtttgttggccagaaccttggaaacaattttgtaaagtttagaacagaggctgatcatagtctaaaatcacaaagaattgaggcattttttcttagggattaagaccagggtagtttcattgatagaagaaagatcagaatagttgttaagaacatcaagaagggcagtgtagaggtccttgccaaggacattctaacttttttgatagaaatgagcattaaggccatcagagccaggagctttactccataaagggaaaaatagccttttggatctctttagctgtgaatgggttggccaggtcagaggaatagctgggggagaggttattagagacaccagttaagatgctagatatggaggcttgatcctcccatgagttgtaaagagatgggaatagaaatcaacaaatagtggtaggatagagagggttcctttagcaatggaaacatcctccagggtaatggctcggatggagttgttcttttttctagttgaggctttgtgatggcaaaattttgtatttttgtccccaaattttagccaatcaatacgagatctttgttttcaataaatttcatttttatgcaaaagattgttaaggttagattgaagagttttgacttgggaaaggtcatgctcactagagacatcagtttgaaataatttatccagagcatgctgagtgttagagttttcatgcttcagagaattttggctagtgctccaattttttatattagccacacagttttttttggttagaaatgaagttcgatagagtctttgtggttctctgttggttggaagagtgccaagaagattgaaccactctgaattttttttatcatagagctaatgatttttaaaaaagaatttgttgttggtcctagaacctctggggtcttcctctaaaatggttttaatagctctatgatcaaagccatagaaccctaaatggaacagggaggcaaaaaggaagagtgactgccaagaattattaaccacactccaatcaagacgttcaaggaggccaccatgcttccaagtgtacttgctgctagtgtgagtgagaggaagcatattatacttgttcaaaaaagattaaaagtcattcatggcataattgggacgcctagtgggagtgttccatcattaaaagaaagatagtcattgcaatcaccacttatgcaccaaggcagagtaggagcagaaacaaaaatcctaccaagaagagtccaagtacaatgtttagaagcagggtaaggggaaccataaaaactaataaaacgctattttatatcatcatttatattaacaatacaatcgacatgattaagggaaaaagttaagatattgacattgacaatattggtccaaaacaacaaaagacctctccctaaacaactccgaggcactttgaaaacattatcgaaacataatctattattaatatgcattttgtggcctagaaggagcttggtttccatcacaaaaaacaaaataggttggtgttgcttcaccaatagggagagatttcaaaatgctcgaggattccccaatcctcgagcattccagctaatgatattcattttcctcggtgggattgtgaagcaacacccgccgtttcattataagcagagagagttgagacaacaacatcatctccttgagaaactctggcccttttaagcatacttctgacagagttgctaactagagcatgttatcgagtgaaaggtcgtttcactccagccgtagtagtagtggcaacattggtgggttcctgtatagtaatgactttggttgagggcttgggaacggtgggagtgggaagacaaacatcatcaggtggagtaatacccttccccttatctgtgtgagtaatcaccgatgtgaccatgatagggaaatgggaccacaaagtctgagcctaggttgaagaactgatcaaccgcttgctgaagccctgtttattagagctgcttccacaacttagaaactcttcaatgggggtggagttggacaaatcaaaagggttcttcttaaaaagatttgtagtcaatacacgaaggttttctttgtagctatgttgtggagggacagcgaaattatctcacctcatgaggtatcgatcgcatttgttataggtgttgttgagagtaccacaaaaataacaaaaaattttcaatccctcatacttgaaggcaatccatttggttttagcaattttttgaaagcggatgttcataccacgtcgaaggggtttcatgacatccagaaggacacaaagttgaggcaatttttggccaaagggggtgttgtgggcgttggatccaaaatggaacgaaacgaaatggttgggcaacaagtgcaagccctcagggtt

SEQ ID NO: 225021 - DNA, 4492 bp, Cannabis indica
ccggttgaattatgcatgaatgagaacattctctgcaattcgaagagaagatgggaaatgatgtctgcattgtttgggaaacaaaccagtttgctattatcactcgtacttttagacttctcaaatgaaaagttggaatttttatttttattttttaaaattttaaaaaaaattgttgtttaagttgtagtttccccattgtgtctatggttctgagtttttcttggttgtgattggttaaatggattcaagttactttcctgataactattgaattgaattcggtactgaaggcttaaattgaagtttaccttttcacattatctttattaatgttgaattttaataatagttataatccaggaagtttctatgaggcaaatcttacctttccgtttcttttcaggtcgtagaatgcacctataaacaaataaagaagtgtgtatttggctttattccatatatattgtatgtagtcacagactcaaattgtcaattcattctttctcatcgaatcatctaacaattgaccaaaaattgacaactgcctacatgtggaaaaatgatagacaccatttttcccggccaaacaattgagagaaggaaaatgcataaaggtgcgaatcaaattatatagcttttttttactccatataaaaaagtaaaagaaagaaaggaataactttatttaaacttcgtttctaactattggctagcattgttgacagattctgtactttgccgtttttgtttctttattccatttttcattcctttcagttgatcacaatcataatggctctgctaaagtaagctcaagttgataataatagttctctctgctgtgctgtggtttgaagtcatttaggcgacaaaagcattttccacaagacaacagctcttcttgtatgtagtgatagaaatgctactagaaacaaaatagcaaacaagtacaataagaggtcgattatagagcaaaaaagattttcacatcacaactgcacacgcacacacatatataaatagtaggtatatatataaatagaagaaacaaacaataagacattagtgttcttcttggttagaagaagttaaatcctgcaattccacatggggaagctcaggaatcttgagggaagggagtgaaggagcttcaaattcaaatgggttgttgtggttttcttcatctttgctattatttgtatcacctgagcctttcaacatccatgttaatatgccaccaacggatttaaaagggtggttaaatccttgtttaattttcaaaatgagagacacctcagatatttgccaagcaatagtgagaacaatcatggttgaaagaagccagtgagttaaacggttctgattcttaaccttcttaagttcttttacaatctcttctttgtccaaaatatcagaggagccattattactgtccgattcatttgaagcctcactctttatctcttcatctatatcattattatcacctttttctcctagtttctttaagcccactacgtcttgctctagattgttttctccttttagtgactccaactgtaaataaatttaagttgaaacaaaccaataaatacccgattaagtttcttcaattgcaacaaaccaaaatttaaattcaaaatctttataccaagaacatgtacacatagattgaaaaaagaaacgagagagaaacctgagaaagcaatcgggagagcaagagctgatcgtcgtcgtcatcttcggagatttctttgatttgtctctgttcctccttgagcttctggatggcgacattgacgagctctaagttgggatcttctgaatccatggctctggttggttctcaaataaatctttggatttttctctgtgaatttcagtaatgaaaattcagatgagtatgtcacgcatgattctttatgaggaccacgtggcattttgatatctggacacgtggtaatgggcaagttcgatcaaatccacgtgtagtcatcatgtccgtttatctactttctcttccataattaaacaaactcaatagttgctttccttttgagaaaagaaatggaacttttctacataaacacaaaaattgacctccaccttattcttagctgtataatgcacaacttgttaacaaataatttctgattttattacgacagttccatatttatactaagttacaaaataaaccgtattttgtctagtaataattaaaaaatataccttaaatcaaaatttaattttaaaaaaaaaaaaaaaaaaaaaagacactttgtgctctgaggcagttaccgtcctggggttctatcagtttttcttccagttttactcagaatttagcagtttctatcagtttcttgttttctcctttctccacgctcgttctttatctactcttctgctttttctttctttttctcttctttcactgctgtacattggttattactctcttattgatccattcactaacaaaatcaaagcaaaaataactttaactgaggatgaggagtctgtttctgacttcgatgacactgaagctatttctcccctggcctccgtcgactcagtcctttatgctaaattttttacaaagaaaaaggtttggttttctacattgcaaaaagaaatggctgagcactgagatgggagatttccagttaaaatttctgaatcctcagacatgtttctgcttacttttgactgtgaaggagataaaattagagttctgcatcgtgagccttaccactttcagaacaccatattgtactacacactccggaggttgggaaaaattttacttcggatgatttaaaatttactcctttctgggtgcaattttacggcctccccttcctaagcaagaccaagtcaatagcaactgctcttggtaacataattggtacatttattgatgtttttgaggattccctcaatgaaagttagggccctttcttgcgagtcagagtaaacattgatgtctctaagcctcttaagagggaacgaatgatttctttgactcatattcacgattttcactatgagagactgcctgaatattgtatggagtgtaagagaattggccattcttttaacaaatgtttgatttatctcgaaaaaattaacaatggtgaagaacctaaacttgagtaccagccatttatcaaagatgatgctcttccaatttcgggttatgatcgatatagaaaaaaaaaatttaaaggagatgcttggccgttgttgacccgacttgcaaaagaaagcttaatctcaaccattctcaattacaattaagaggattgcctcaacctcgacatttgtatggtgttgaatcttctcaaatccatgagaattctggtgttgatgagaatgtcggcaatgcatctactgtggatagatcacttaatggtgatcaattagtttctagctctgaagaaccatttgttattttaaactgtccacgctaaatcagtattccattataagtcaccaacctgttgggggtaaggtgaataaagtgacagccaaatcctccatcgatgacccctcaaataattactgatctctcagcaatttacatgctaatgatatctttaccattgtccagtaacacctttgcaacttaccctccgcctagccatactatcactatccacaacaacaaacatttggtgaactctccaattgtttttcccatgtctgaggctacttcaattgcttctactgctgctgaattgccaattgaaaaggaaaatttgcatccaaaccagcaaattaaaagacacaacgatggaattttctgaggcaaactctaaaaagatgcagaggaaatacaccaaatgtattcacttctaccttgttagttgatcctgaaaatcaccaccaagtttttgatgaagtcatggattctgctggtgctaacgacaaaattgcgaagactgttttatagtcccgcaagcagccatgaaaatcatcagttggaacgctcgtggtttggggaacccgagtgctatctgcaaactctatttgcttgtcaaagagcaaacccccactgttctttttattatggaaactaaattagcttgtgattctatttctcgtatttgtaatcttttacattttaataatggacttgaagtcccaagagtagactttaatggtggtttgatgttactttcgaatgatgatgttgatgtaactttacaaaatttcaatacaaatgttttcgattgttatgtgggttttcataatggtccaaaattggcacttttctgctttctatggggctctagctacaaaaaatcgatgccatacttggactctgttgaaaagacttaaagatgttgctccaatgcttccttggatggttattggtgatttcaacgaaatcctttataaccaaaacaaacggggagggggcgatgaatttcgtcatgtattggatttttgcctcttaaatgagctgccttttgaaggtgat

SEQ ID NO: 225022 - DNA, 3711 bp, Cannabis indica
ttcatttcctctgtttcttctctacctttccactaatagagatattaaagaccctaaaactaaaaaagtttgatgagtttttctttacatgatcatcaaaagagtagtaatatttcttctcatgatcaatggataatttcatagacttactaacaaaattattaccaatatcaacatataagaaaatactatataaaattataatgtctgattaagaaaatcttattgaacctcaaaatgaggagaaaatatacattacactttttgtaaccaagtatttatcccactaaatttctaacaaagtttttaatgagtcaatatccaactaatatttatatatgaatcttcatattgtatttacttttagttacttgattttcttattcgtaaagctacgtgtgtataaaaatgaagatgaacaatgagatacaagattacattctcttttttactctctattttagtttaatctttatactacttttactattaattctgtatcaattaaaaatacaagagaatgttttgatcagtaagtttcaaaactggctgaatagaacatcttcgaacaatagacaaaatttgctgccttctaaaggcaaaatccaagattttaaaccaaatgaacaaatagggagaaaccaagaatttactgcttctacagtagtaacttctttttacatgcttctattttcatactatggtttaaaaataagagtcaacttaccatacaacatatttctaattcatatttatatcaaaagagaaattgagtaactacagtttgttataacatgacctgttgaacaaaccaattaaccgaatatccaacgtcgaatcgaatcattattcttcttcggtagcttcagctgcagctatctcagaatccaatttgttcattagctggtggtcactgacatgtcttgccaccgaaatcatatcaagaatgatgcttggatctaagcctgcaccaccacgtttggtcaaaccacacacatggccctttctattgatagagattgaaacagctgagctcatttgagattcttcttctgcagtagcatccacaatgtagtgcttacccacctatgagagaaataagagaagttaaccatgtgccaagaactaaaagctctaaaatgataagaactttctgtttaaatttagatcacctttgttaatgtgactatgacagggattccagatgtgtcaaactgcatgaattcttcatcacttatttcgacctctggttgatcatcaccagctgaggcacttgaagcaacctggactcttgggatgcctgtattgctcaaagcagcctttcggaacatcagtttcatatgttttcttcttgtagaatcataataagaagtactttcagttgaagtttctagcagattttacaggcgattaactcaataaatcctgaattctatgaaaattgaatttgtaaacatcactggtttagaaggtatcacgtagtaaaaatgtaagtaataatacatatccattctaaattttaccatgtgctgcatcggaaactttaaatgccaattggtgaatgtgacttcaattactattgacagaacagaaaagtaatttttcaattgagaaacagtttcactgtgatacataattactcagatctatacaacacccatttgtaagagtgctggctaaaatagaaatatgtccagaattaagtctagatgttttaataggaaaattgtccgggaattaagtttagatgttcagcaaaaaaacgtctagatgttttactagccaattgtgacatattaaaccaggacaaattacactaaagatatcacaaaaacaaaaacattaaaagattagatcggaagaacaaccaactacctttatagcagcacctagagcatctagcagattcccatctgaactaacaacaaggccgtctatatagagatcccaacaaatttttccttccaccactattaaagatgagggattgattccagcccctgaagaaaaattaattttgaatggcatatcaaattctaatactgtctcatacgaaaaggcaagtacaaagaaatacaagtatcagccatatttttccacagacctgagccacttttaccacccaagagacaacattgtagagcaaatgagagttctgttgacaattcctcacctcctctgccctgtgtaaatgtaacaattagttagctttcatatacaaatatacatccatgaaacataacttacatacgtgcagttagcgagtaaaacacacaggtgggtgttatctaatgcaatgtgtgtgtacatgaaaaaatattactgggtgttttaaatttcattttgttcatacattaagctctcatgcacaaaaataagaaagcaacaaattgaaagtgcacaacctcaaacactggggctgcggttgaactgcaatcaacattaatagcaacctttcctttatcaggttgcaattgactcggcctcccaagctcagcctacacttgaacagtcacaatacattataactcaattgcatcaggggaatgaaaaaaggaagagaatctaagccaataccatacggagagttaggtaccttcacactggcaataacatctgtgccacctaatctgaccctggcagaaccatttgcctgcaataaggcagtgcaagataaggattcaataaattttgttctcaacatcaactgaagaaaagtaatgcaaaaaagaataattcaaactaaatgatgacgaagcattttaataatacaaatgtacctgaggaatgactcctgtttcaacatagataggtctgtaagttaatcttttccggccatcagaacgaaggtcttgagcaataccaccctgtatgaaatgtttctctcccagggatagtcccaccatctttacaagcgcacaaaaaacagagcggataataatggagcagccaatctacaacaacaacaacaccatgctctaatgaaaaaagtgagctaatatgaaacccttttgtcctttgaaaaaaacaaataatactccaaagaaatatttcaaaatacagtaacaagtaaaacaaagttgttttacacatgaaagtataatagtcagattttgaacaatgatgcactctcatcttgtttcagttcaaatgcaattgtttctataaatcatcaaatcaaatgcgcaaaactattcggtccaaatgctttaaaccgaacatcattttaattgacaatgacatagaatttataaattcaatattctaatgttacatacagtaatctgaaatttgttgttctagaaatctttatgaattgtgaaagcttaatcatgttcttatgaactatttgtgagaggtatatcgaagtttgattactaaaagaattataatcaagtaacaaagccattgttccggaacagttcgtcattacacacctgtgagtgaagtagttgtttgatcgagcaatgagtgaagcgcagagcagccgtgcagtgaacccgagttcgacaaccaacgacctatgctcaccaaccggaagaaatccaaaaaggggccgatggagagagagagagagagaggggttttggtatgagaaagagttgagatttaagctaggttacgaggtatgctatgttaattgggcttctgggctaactcaaacaacaaactaaaggacagcatatatactaatttttctatttttttttt

SEQ ID NO: 225023 - DNA, 5427 bp, Cannabis indica
cccatctacagcagaagaattgaaggaagaaactgaaaaggacccatctacagcagaagcactggaggaagaagctgaaaaggaaaaagagcctgaagctccatcagatctctcccatcaggttgaggcggtcccagtgcctacaccagtagcagatgtgctagtatcagaagacgtggaggtagctgatgagcctgcggttgaggttgaagaaggtaatgagacacaaccacttgagaaagctgagcaagatgtaatggaagcagtttttgaggccgctgatgaaaatgaagcgctagtattagaggacgtggaagaggtagcttatgagcaggcacttgaggttggagaacgtaatgagacagaaccacttgagaaagctgagcaagatgtaatggaagcagtatttgaggctgctgatgaacacgaagcgctagtatcagaggacgtggaagtggtagctggtgagcaggcacttgaggttgaagaacataatgagacagaagcacttgagaaagctgagcaagatgtaatggaagcagtttttgaggctgctgatgaaaatgaagaaaagaaaccagaggaggagaaagctggggtcttcaccccaaaactgactagcgatgaaaactctaattattcggtaaaccttgaggagaagatgtcacaggagcccaaggcttcacaagttagttgatgaaacctataaataggccactttacttctctttaatattttttcttttgtggaagacaattattatgttaccagttaggatatcttactgacagagacagtaatatatgtttctggtttaattaggcgcattagggtctcagttcattgggatggttagtagaaacccgttactttttattttcttccttagtgctttgacacacctttatttctaacttgtgacacactattcatttaccgtaccatttggtgatttaatcgatactttatatcaatgtttggctatttctattattagtgttgtgaatcacttgattctgctctgctactgtatttttctttccataaattggttcgtagtacttactattatcggcaaaatgtacaacagatatgaaagtgttgaatattgaatctgttttattatgcaactttactttatgacagttcacaacaaaaatagtatattacatgattgattaaagaaattctcgagcaaggtgtattgaaaagttggactccctcaagtttctagtgacaatttatttggttcctataattagattgcatccattgcttatatttactccaaatagtcttggcaaacgaagattaagatgagattcaacatttttaaactacgaaacactcccatttcggttgtaagtgtaaccaacccgctatgaaaaatatgaccgaaagaaaaagtaaaaaaagagctccactattgggacagaacaagcagaagtcaagatgaaaggcccgagttatttacaggacctacagaaatgagtggtttctgcaatttattgccatcaatggcagattcagatttgccattctaatgcaccaggatgctatttgggatcactagtggtattggttatgtataacttcttacattcaaattatttacttaatttatttaaatattaacttgtccaaagagtagacaggcacaatatttacagcggattttatgcaattgtatataaaaaatccccttttgtgcactttacttaacatatcatagaaaccacgttcttaccaagtcgcatgccagcacttaattatcatagacaggaaataggctgattttgaaattgaactttatacaagtcaacaattgatttttatcttccattgtcatcttcagagtgtaggagccctgtaaattaggaaacaatctcagcccatggtacacaccagagaaattagtaattggtcatattctcttatattttaccacaactttaacttccaaattttatttaacaatgcaatgcaggttacaaaatgtaaacctcaaataagagatatgcatgtatacgtgtatgtgtaaattcaagataaacaacttcacatgataaccacacttgatacatgttaaatgccccgagcatctctttcatgcaaaaatgtcagaattgttttaagatgtgttctattggcttgttactacttacaaccacttgggtagaatcaactccaaaaagactaatcgatgagagaagggtacaagaccatcagatgatggtgcctgatctaagtgattataaacctccaaccataccaattgttacaatttcttgactagaactcactactaaaagactagcctatgcgaggaggatacccaagtgttcataaactaccatcaatttcatacgcattcaacaagggatccaaatagtgttctattggttttatttaaacttgtcaggcctgtttataagcaattgaactcatgaatctataataacatgctaccagaggttccacaactatttatgtattcacatctgtttcactattttagcattttcatttaaattgcaaatgttaacaccttataattggtttcggtcattaagaaacccccctttatggtctgaaaggatcttagtatttactgcattggctttatttacaccagtaggctttcccccatcaaaacaaaatttttggttggtttcggctcaccttctgaggatgaaaaataatatgaaatgggagtttttcggttgaatataggacaggatttcattgtttttaaactacctaagatttttatctatcttttatagtttgaaatatgtttgagtaacaatctttatcctagattaagattcaacaattaataactaacccctttcagcaaccacagctcttattattatttttttatttgatcacatagaaaacaagattgagcaaaggggaaatccccaaaatatttcagtgtaaaacagcaggattgaactacctgtattagtaatttaagcctagtgaaacttacaggtggagcaaatccaggtaaagtttgagagtgggagagcacaaagtttccagctgcaataggacaggaaatctcctcgcacagattgtgggtttctgtatgaacttgcagtccaaaataagaaactttgatcactacttttcccccagggatatcttgacctgaatgcaattacagtgtaaattagatagcatgcccaaggttatctctagaaattactatcacaaaaggcagctctactctataatatgtaatgatttgaccatgactaaaactctgaaatcccctattttatcgtgagtattttcatctcagttcagtagtccaagccacaaaaaatggaaacttaggctttaagaacaaacacagtgatttgcatcaagtatgaatacttaggtccttctcagttttctgtctttagagtgcagaccataaccaaaagaacgcctacatataccaacaacaaacgaacacacacactgactgtaaatgaactacaaaacattgagaatcgaactttaattctttttattaatcaaatgctcaaatgcccaactccatactcaatttagcaccctctttcaagttgatgtaaatgagggtaggaggaacttggacaaaccttcaaaagagagcagttagtgaatagggaaacctgattattgctatctcttttgagcatgtcctgagccattaccctccacaaccgttctaaactagtcaacaatgtaaacctcctaccctttaattgttttttcatttgcaacatgcagtcataaaagaaagcaattagtcttatttcatgctgcactctcatacttgtatacagttcacaaaactaacccgaggttttaaggcaactcgaatggcgaaaaacggtaacctcaggttttgcaggctgatgtttacttcttttatataattaaaatagaaaagctagatgcaattaacaccagaatcaggatcaaactagatatagtaaataatgatgaaagaagctaaaacaactattcattatcaaaccctaaatgcaaaccccacttcattacatatttatatatatacattttcttattattagattccagacccaaccaatgctgagattatggcatctcccaagaattagtagcaaagcaaaaatttgaacttttcaatttctgtgttatgtaaacatgctttaagcagataaggaatgtagaacacaaagcataaactaaatcaaagcatttgatcaatggttttcacctgttgaggctgatataatgaagctaactggcttgcctattaccacaggatcaggggaaatctctactccatggaccttaatagcatagtcaattttattatctgcaattttaaattacaattccaagaagaaaaataattaaatatacaaatttatcgaatgttttacaaaaacagctattctattcaagaaggttattacactctcacacacacacacacataaatgaagattgaaaagagaaataccacagtgtttgacatcggtagctgtaattggatgaaaaatcagcaaaagagtggggcagagcacaacaaagaagaggttaaaattcttcaagcgaaacagtgaagccatgagtgaacttatagtcccaatcccactctcctagaccaaacaagcaacatataagccataataataataataataataataataataataataataataataataatttaatgggaaaatcattaattcacattaattttttatttactttttaaaatatatattattaaaaacttgtacgtgcacattatatttttagtatttttgttataaaatagagaaataaataaagaaagagagaaatcaaagagaataagaaagtgaatgacaattttttagtagtctattccaataagttaaacccataaaggaataaaaaattaagtgaatgacataaaaggaaatacagaataagagagaaatcaaagagaatgagagagtgaatagagatgaaaatttataccgcggggatgggtaatcgcagggatccgcctttaatggggtggagattccccgtcttggtggttaatgggagggtggtgggggacaatttcaatacccgaagcaggaatggggcgggggcggggataatactatccgcaccatatccgaccccgatatagatatatataatttcctttttattcttaacatatatatagtatatatatgattgataatcaaaattattttgattatcatccataatcaaaattatatatcatatgcttaaattatgaagatctaatgacgatagtgaactgatgatcattgtggattacatgtgtaaagatattttcttctcgattcttaatttcatctttgtttactttttaatttgttgggaggcttgagaggtatgagactatgatcctatacttg

SEQ ID NO: 225024 - DNA, 2926 bp, Cannabis indica
tctctctctctttccgatctctgtgtgtgaaaagttctaaagtgattgtgaggggtgttgttgtaattaaactatatatggtcatcaaacagaatacaaactctcaaaatagaaaatcaaaatttattttctcatcttcctcaatatatatatatgttctgattattatttttcttatacttgtccagaaccgacgagagttttttttcaataataatgtatttatcgttaatttttgattcgattaaataaattgtcatgacacaattagttacttagatatgtagctaaaataattatatcattaacatcaatttcattatattatatatacatatttgtacaaatatatattatatatcatcgaattgctgcaaatctcatcactacatgataattttcattctaatgaggaaggcatagttttatattacgctatctggcctactaccttgttattttattaaaaagtccgttcaaagctggataatactgaattatttgaaaccttgattataatatttacttttgctggttatgcagttctttcttagcataattattctaatttgtgtggttatataaaaaaataaaaaaaaaattgaatgtccttgaattgataattaaatgtaaggacaaagattgagtaaataattatgcaaaattaaaggttggagcttttcatacatacacatgcatgaaactttctcatgccactagaatatagatatgtatattaattaataacaaagtatatcagaagaagcttacataaaattctgtacatgtagtatatatattacataaagctgtgctctaatagtaatatataaataaatatatttttatatatatagatagtataacctatttacatatatgtgtgttaatatgaatttgttattaaaaaactcaggaaagttatttaattacttgggaagacatatataagattgaaattagtacaaggtatttcttgagaatcgaaagaacaataaagtagtatatcttctttataatcatatagaatgcagaatataacatttagaaaggcccacagatatccaatcatgttatcaacatattttttaaacatcttgcacaaaacaaaaggcaactaagctcattaaacaattgaagaagaaaataaaaaaacacaactgataatgttgtagagagatgtcccttctcttttttggccctagtgggtttgatgatagtacctacctagctagctagtaacaaacaatataaaagaaaaacattaattaaaataaaaaacttggataccccaatctttaaacatatttaatattttataaagataactaaaacttatattttaaagttcacttgtgcattttctttattttaaacatattttatttcttccatagagattatattctcattatatatatatgttcgtttggctcaacttcttaaatgatttgtggaataaatttggtcttgtaacttacaattagttaaaataatggctcctttctcacgaagagttgcatataactcatatattttaataatttggagcaattctatctttttcaacaacgagattaagatttttatgttaacatttgactaaattaatttttcgatgagttatattttgcatctgggtctcccaatatattactacatcatctcttaacatttgtcataatgggccgatgagaaagattgttccgaaatacaccaggaagatcctttttacccgtatatcttaatctaggtggccgaaattctttctaaaattattgatgaggctttggggagtggtaaaatcaagtagataaaattgaataggactaaaccaaacttatctcaaattttatttacggatgaccttatcgttaagggtagccaatattgaggaaactcgtaaattttggaattatttggaaaaacattgctcttagttgggacaaaaatacaacaatcttggaacgttaatttttttaagtaagaaagggtaataaataaagtctaggcatagatagcccaaattgaaacatcaaatatttgggccttcctatatttagaacacatcgaaaggatattgatttcaactttgtcttgaataatctttcttctacgcttcgaggatggaaacacatgaaaaatcttttcgaagtaggtcgtgccaatatcagtgggtctgtctctcctaatttattctttgaaaacaacgaaatcaaaggttggcgttcaaaattaatcgcatggcccgagaattctggtagctagggaagtgagaaaggtaaccatggtttatgtctcaaagtgtggaataaggtttttctccccaaatctcgaggagggttgggcttctaaaaaactatagagaagaatcaagcatttttctagcgaaattggggtggcaactcatatcaatccttatgttgcaaagtgctaagtgttaaataccttatagagagtgtgtcgggaccaaaaataacgaccaaaaggtttttacactttttccttctttaggtctggttgggcataatctgagtggtattggggcttatatctgagtttggaatcatgtaaaaagtttgttggacgtgattgtaaggtctggaactatagtttacaagagcaaccattattcacgttcaggattttagttgtcgaaagagtttgaatgcgacaaagtttcttcgtgttttggatttgtggaaggtcatattcgagtctaagacaccctaaggagtaggttggacgtagaaaaatggtttgaaatagtctaaaacgtgaaatcacagtttggaaaccattttcgcctgtgtatcgtgttcagagagccattacgagacaaaatacaaacggtattaagtttctttaaggtattggaatctatgagaatgctctcttatccaaaagacgcatctaaacgaactgt

SEQ ID NO: 225025 - DNA, 1967 bp, Cannabis indica
atcagaacggatcgtttagtctcgctatcatttgaggagttcttcatctggttatgcaattgcaatgatgataaactcatcattttcggggcttgtctgtttgagacggtttggaatagcagaaatggagtggtattcagagctgtatccccgagggtggatctcatccttaggtccatcctgattcgtgctgaagaattttataactcagaggatgtggatgagagtctccgagatcatgaggctgctgatattctcaaggattgtgatcggtgggatattaagttggctgtggatgcttctatccttgacaactcggctggattgggagttgttcagatggatgtgcttagggatgaggccatcacagtaatgcaagctctatcgttgtccgaggtgctggaggctgagttactagcaatccgcgaggccctgcggctagcactggaagaaaactgctgctctgtgcaaatttcttctgactcagctcaagctgtccaagctctgcaggtgagggaaattccgtttgcttggggttcctatcccatctttgttgattgtttaagtttaatatctctttttgcgttctgttctgttgtttttattccttgtgcggataattctttggcggactttgtggctagatatgccagaattaatcgtttgaactcgagatatgttttcagggaggttgccccttttgtggcaatcagttagtgtgtgttttttgtgttgaataaagttcttacttaccaaaaaaaaatatacaactctagcattgtctaacaccttaataatgtctcttaatatcaaattcattagtgacagattttgtgaatgaaaactacagtgtaaacaaaaatgattgctatacaatatgaggagactaagtttgtcaaggtttacaagtatttttgccaatacctgtgcactttgacgaaccccttcacctcaaacagtctaacaatattaaattactaatccatgaatacataaacactactaggtctttgaataaaagtgtagcaaattatacattcatcattatcttcacaatgactccaccataataagcgtggaggtggaacaaggtggtaaccaccaccttggctggtttgtgttagaatatattaactgtaaaaattaggaataattgtagttatttagtttcctattttgtctctctagttttctatataaatatattttattctattgattaatatacacaattgattaccattttctacatgatatcagagcaatttgattagggttgagaattcaaaatttcagttgattccaaaattagggtttatgtttgaagtttggttctttctttattttaggatttctttttcaataaccctatttggagtgtgttttagttctcaccacctacacaggagggctgcctagctgttcatcgtgaaaacccaaaagtccaaccactagaaacatcgcatgtgaggctcacatgccacccctagccgcactaatcttacccatgcagtagtgcgtaggtcgagtgggaccatgaatctggcaccgattcacttatgctccttatttgacaatctgttattcttttctctttgttattcttctttgtttgtggtttggtaattctcacttagtgtttggatgttctttcgtttttagtttttccctagtcttttttaatatttgcttttgagattatggccgagacaaaaccatatccaaaactagtggttgtttctgatctggttcccatgatgtctaatatcacgaactataaattgattggttcaaattaattagaatggagtaagacgatttaactttatcttaaaagtattgacaaaggtaatcacttgatttatggtcctccccaagaaaagatgattcaagaaaactggctacaagaggatgcttacttgtttcctcaaattcaaaattctattgataatgaggtaattagtttg

SEQ ID NO: 225026 - DNA, 4606 bp, Cannabis indica
gctcaaattttggttaacaaaaatcgacgttaacaataacaattataaatggtcagtaaataattttaaagataaaatagattgtaaggaattgaataagagatagagaagaaaataagtaccgcattaatccacaaaagaggttcaagagattcacataacaaccctaaaagataatttagttcatactaatcattctaaagcacaatgattcaattacaaacatgaaaaaagtaaagatagatgaagaaaatacaaaatggaatcctccaatggtgttctccactctcagtcgtccctccttgtttagaatcgatccccaactttgaataaatttcaaaaacctagcctccaatacttttaaggaagaaaatagttgactgccaaaaatagccaagcaccacgacattacttcgagagtatgggactttgtttttttttaatagatacgcctatttttttaatttctcaagcaccacaacttccaggggaaggttgcgactcttggatagttttcaaaaattgctccctgtaagaaatggagagtcgtgaccttaattcaagggttgcgacttttgaagctaaaacttggaaatttgaacttttacatcttccagattgcgccaagttgagaaatttagccacaaggttcctttttgcaaaatcgatcatttaaataccaaaaaccccgagaaacactatgttttcatcaagaaaatgtgattctcttcttcaacaaactaaaactaatataaaaaacacaatcaagcgtaaaaccaaataataaaacataaaattcactaaaaacaaccttaaaaataggctctaaaacacaagaaaataaacctaaaaaattctcccaaagttaagatttgctcaccctcgagtaaagatcaaatcaaactgacaaaaataacataacatgaacaagttaagccaccattacaatctacactgctttgccaaaattcatgaaatctcaattggatcattaactagaattttagtgtaactattttaaaattaaccttaattctcaaattagagaaatttacaatatagttcacaaatgatcttaataattggactccatcttatatgctcaactcaaccaaatagctccacaaactaatttttaatatacttgcatcattcaaccttctctactaatgtcaataacacatgctttatcaaaaggattttattgggctataactttgagcttaggtaaaagtagttgagaatgtcatttaggctcgaccatagcataagtatttacacttcaagctacccaattttccatttcaaaattatctcaagcctctctttttaaaacaagatgagagaactaattattaaaaatgcaacatctctaaacacacttttttctatctctttctttttttttattttatatatatatttagagatattataactcaactgattcaacacattatttaaattttcttaacttgtgttttacttttattttccacatataaaaattaaaatacccaaaataattcacacttatgttatagttaatgacaaagaaagatagtatctaggttatttcttggttcaacaatatgtatacaaacaaaaataatagttttatagtacaagaagggaaaacaacggataaacatacaaaggtaggcttgaaaggtacaaaatattctaatgaaattgcctaaattatttttcaaagcatgtgtccttaagcatttttcctcataggccaaataatgcaacttctatccaattccaatttaacatacctctaaccctagtcaagcatataaaataaaattcaaaaattttacatttgcaaaaatatattcttaattttctacaaacatcgcaattaaactccaaaacagttaaactaagcatatatttttaacaaattcattttcacaagtgacaatgaaccagcaatagacaaaattaatagcttaacaatttactaaaaacaaacactacaaacaacacaaaataacaaaagatttaaaaaaatttaaaagccctgtccaaaactttagttgcacattatccccaatgtgatatgaaagtacaaaggaagagaacttactgatgccactttagtatcgcagaggaggtggcggtgggaccactagtacagagtgtactacaaagagtatgggaaaaaactgttgaactaattcattcaactaatccacttgaataagctaatcctcatgtctaaaatccatataatttttaaaattggcattcattccttgctgagcttaaatcatgtattaattctggacaataaggtactgtatgtaaggatctaggccattactcccactaggcataggggctaccttccctctacctccagcttcttgatgagaacccaattctatagcaactactttgtcttctacatgcacatcacttttagtgcgtttggacatttcaggacgggtggcagcaggcaaaggatgaggagtgggattaggaaacttactcatataaatcagtgtaatggggccttggattttcctgggtgcatcaaatttatcttcagggaccctattcctttgacataagttaataatgagcaagccatggcctaaaacataagatgtagctaaatgagataaatcgacaatgctcttatgcaccaagtgctccacatatatattgatttgtttcatgatgccatacacacaacgaagctgatcccgacatatacaagtgttattcgtgttttatgcaagacatgacacattgaatttaatggaaaaagtctcagtttatcctccgtgaattagggaccctaaaaagatacatagtcgaagaaaggtctccccgtgttgaagaatcatacagggtagagaaataggtgaaagcttacttgcagcaccattttctttgcaagagcgggacaagaaaatgtctctcccagacctggaaggatctactagaaaggctcattttggatggctccccaaatgcatactagagaaacctaaggcagatactaaacctcatgggtgtttgtgcatgtcaaattttctcatgcaccacgtaatcaacatgaagattatgcttttcctgataaaatccaatcttgtctcctacatccaaagatgacagtgcacgcaccaccaccatcctcatgccagacagatcttatgaaatactacctggaaaggagcaagcttttaatgacatgtgtctgttgcttttaaaggttcaacctttgtgtgacatgtgtccaagtggtacaaaatagtcgccattatctaactgtagcatgcacgagcataacgctacccacaaggccaaatagttagctctacattgcatatattttacccctatagtggaatttgagcagaactccttggtgtgtcatggggaaatccatatctatcacttagcctataactacccctttatttccatgcaaatggggcaagctaaaacactacttaaaatcatccgtgatcttcttcttcttctcagaaaagaaattaaggaaaaagacttagggcttcccgggaaatcatgtaaattcatccatattaccctttgaggctaatagaatgactcatggactaaggttaattaagacatgatgtaacaccctattctacagggacgccacatgtgtaatttttataaaatagtttagtactaatagattaattaattattaaaatttatgaaaatattaaaaacttcaccaaagtaaaaccctagaaacggatattatagcaacactaaaaccttcatccgaggatccatgttataaaagttttacaaaaagacaatattcaataacaagtcaaaatacaaaatgaaaatacagagtagatacaacccaaaaaaactcctaaaaacttgacacacaggccagtagggtcaatatgtaaattgctggagaagaccgtcacctcatgtctactttaactttccctagccaaacatacatctatcggtatccaatacaactctacgtatattgatattgctatcgatgtaatctaacaggcttaaaaaacatgtattcttgacatgtaaacacatattcatattattatacgaatcttagctcgattccaaattcaggtgtgccggtcaacctgagtagagctactgcttgacagtttataagcccctaagtcacaatatacgctaaactaatttttcagggacttaaaattggaaactaaaggtttccctatcaatatctacaagacaaagcactaagagtcaagaaaacacgagaaattcatcgaaatggggaacctgactgaaaaacggcaggctgtttttctaggtcttgcactaggaaaaatggtaagctatttcttcagaaatggcctgccgtttttcactatagaaaaataacaagccgccaaatcgacttaaaaccaccccaaatcatccaataagctccagaacacctaaacatgctatagtgaaccatatccaagcaatacaactccaaaaaacacagtaatacaaaaaacatcatggttgaaccaagtttgagttcttcaactcaaacttggtcaacaccacaaccaagcctcaaattcacaatcaacatgcataaaca

SEQ ID NO: 225027 - DNA, 6889 bp, Cannabis indica
tttttttttttaataataaattggatggaatggaatgacatgaggataggaaaaaaccagaggaatttcccccacaccgaaaaccggagcagttttttcgtggagtacttttactcttcttttctttgttttttcttttctttgctcttaggattgcacggccagtctctgcaaatgttcaaagaaaacttgtagactcacgtcatcggtaaagattacatccgacccagcagccatttcgttggcgttattataggtagctgacgggttcagtttcgctaataagaaacgtgcctgcaaagtaaaacgtaataagagatttgccacgtgaatatttttcctaatcggcgactatggataagagaattatttcggaaatcaaatatatatggaggggaaagaaagcacagcagcacacatggactttcaaaaacaaatcgaatgatgttttgaataaaattgagcctaaaagttggaaaccgattaataaaactggacatgcttggatttagagactaaaattattcactggatttttggaggcaatgagacaaaagcaacttccatcttcttctactatcttgttgcaaaattctttaataaactgagactagaaattcagaaagatactaacctgggaaccatgttgatcgcataccaccaatcttgggacaggaaaacgttcatggatgatcatatcggcatcagcatgaggagctcgcaacaattctgcaaatgcctgaaaatatagaagcaaatataagtacatgaacaacaaatgactacagtatcttattaagtacttaaaaattatataacgagaaatatatctaataatttctaaagtacaaacctggtgctctggctgagtatggtatcccatattacgccactgagcaatggtcattccgtggaaaatgacaacactaaaatatgaatctaacaaaagaatttgatcggcagcaatagatgctacatctagcaaaacgggtctaggtggtgaattgaatgaatacgacattagtgatggttgaatcatgacagcagcattggtaatattctcacgattgagtaacatacggaaataggcagtctcatcaggactgttgttgaacacctgaaaattttcatttgagaaacaaatgaaacattgaaaatttgaatacacatgtacatgactagaagaaggaaaaaataaatgaaggggaaaaagggaggagggaacacgattaatacctgcacaaattgtgaccgccgtagattaaacatgaattgagggaacaatgaaaagcatggatttaacataaaggaggaagggtcatcctttcggtattcgccaaatttggaacacagacgaatcaaagacctatccaaccatcttgtagcatcaaatgattcctaattgaaaaacaaacatctatcatcagagattgaattgaagaataaaaaacgagtattaaaattataataataataataataataataataatataataagacaacaaaagatgttgaaatatacctctgtctccatctttaaagatgtctttctagccattactacagcagctgtctcttgatcaaatccttgcaccagttcctaaagaagcagacatatttctttccacatcattttgaacacataaaacaccataaagtacaaataaagaacaatgtatcgactctaggctaaaaattgacaggaagaaagtatcatgtaattgcaaatctagctttaaaaagaaaggtcttgctaacactttttatacgtatttatgaaaaaatgaaatgaaaactggagatcgtctcaaaaaattgctcaagaaatttccgactttgttgttcaataaagtatgtaccgaacgagcaaaatatgtgagtcaagaatcaaatatggacaataatttcgtggaagaattattcaactatgatgtgtaataaatagaaatgtgacttcccttgaagctgtcacctaagaaagaatcaaggtagccagattatcaaacatatgagagaggcactactctcttcctttccgttatgattatttgggaatattgcttacttattcattccaaactaagaaatcacatccaaatacaatatgttttacattcttggtaaaattgaaatagcaattaacttctataaagtacaggccctgataattttgaagcagtgacccaactaaccaaaagaaaaagaaaaggctgaagaccgtacactaaattgaaaataaaaagacagttacgaaatgtacacacctctgagcttatggcagtatctatccatgccctagaaacagtggtaactcgaagcatcatttgaccgtctgtgttttgatacctgcagagccaaatgacaataatcaaatcgccatgcaaaaggagtaaaggcagctatgcaaatactttcacctaataaatagatgatgataccctatcatctcttgtaaatctttagtatttgtttcccctttccaatacaatttttgtttcttattaagtaaaatgacaacctcatttttacctggtgagaaattgcaaatacagctgtggatttacagctcccggtgtatttgaccgatcacttgatgacaaatcaaagaacactgtcaagcaagtactcttgtcaagaccgcacatcttccattcggttgtatttccttcaccaattgtggtatcagcaacagaaggccctttctgcaaaccacacaatgaagaaattaagtcgagaatgctagttttggatcaaacatataattaatacacaagctccgaaaattaccatcatcaaaaaaataaaatctaaccttctctaaagaagtgacgggaccaattattccctgaattttgatgtccttcgaacagtttatctggagtgtaccactggaataaaaaagttcagtaataagcctcacgttaatagattaaaccacgcgtaataattggaaaatgtaatagtaaaaaagatgagccccatgtttacagttgcacactctcaattcaaagctcacaaagcgaaaaataatgtagtaaaatcacgttaagccaaacaaagaaataaaagatgtctaatggtaatttcataaaatttctgctatcattggatgaaacaactctctcaaacaaaccaagatctccaactcacaaaactaatataataaaccagattcctctaaagtagagcattggcatcataataatactatgtttctcataatgcttctctcgactcaactccataatgtttctcataatataatgttgtataccaaataaaaacaatcctacaaacataccatcatggatggtgaaaacttactaaggtctagtcagttaataaagaaacaaacaaattaaagaattacaatgtcaaatgagcaattatatgattatgcaggagagttaacaacagagcaaccgacatttaatacctaaaataagagtaaagctttaaaaacatataacagacaattgaagacaagtggcaagcattataatgtttcttaatgactaactcacttgaaacaaaggccaagagattgttctcctccttcaaaaatgcgcttaaatgaatctttaaatacagagtgaccaaaactttcagatagaacaacaagaccaccagttttctcaattgcaaccttcatttctgcaacaccaacctatgacatagcaatgcccaatagttatttgatagtcaatagcatataatataatataaatttatttaataaactaaagttataaactaataatacttcatagtttacataaacaagacaattaaaacaatacaattctcttaaataatcatagatgcagaaatgtagcatctgattatactgctaaattgtcatcacttacattctagttaagcacaagatcaaataaaagctacattcttggttttttggtacataccaggttttcgttacacatacatcacgctacattctttgattgattaagatttcataaatgatactgtaaaacaattcacaatgattgctccaaacatattctttggttggtggaaattccaaaaatacttacaacaaaatgtgaacaaaattgtccaaagttttctactaaagtagttggaaatttatggaagacttcatacaaaaataaataaatctgagtagttaagaaataaaaagagttacaaactagacacaaaagattctactcttttggcaataaaaagacgatataacagaatactactacagcttcagcagagacaaattatatgatcacaaaatagtgaaagaaagtgtgacccaacacatacctgatcaagggcagatgcgaacacatctaaaacatgaccctggctaacaagctgctttccaagaccttcataaaatttgactgctttcttaaaatatggtgcagcatctttgtccagatctttatgggagcgaactggatcagacaaatcctttgatacaatctgcaataatgttgaaattcaatatatatatatataagatgaaaaagtgatcaaaagtaagttaaaataaagtaattcaaatcatttcaaagataggaagcacaattaataaacaaaggtattgctttaactgaatattactacaaacataaagacacagaaacacattgaggcatgacttgtaatttcttagcacaacataacgttcaaaatattcagcctatacaatcatcaaagctaatcatgctggtttgtagtcttaattcaggtactttcaactacaattgaagcaaactaggcataatggagtaacatttcaaaaaccaaaacaaattgcccagactagttgtatggcaataatgtctcctaacaattagttgcaaataacaatgtctcctaattcctaagcaccccataaagacataaatcataagaagattttaccgatccaggcccttccgtgcatggacctccaaccaaagcaacaatgcgagctccagtaccaggcaaacaagctccaagcaatcccgctgcaacactcaacgccaccccagtgcaccgcgaggccctgctaccaggtggcacaggccactgatccgtttgcaactcgtccaatacctgaatttcaacccaaatttccaatgttcaagactaattactcaaaattcacaattgaatgaaagaaaaaaaactaattaaattaaaaaaagtgcataccgaattgagtgtatattcgcaatcagaagcaggcaacaaaaaccgatcaataccggaaccagggaacccgttttgaacaggtttcggctgatagccaccggcggtggcccctacaggtctcctaccgggaatcccaagacccaattgttccaaaacctgttcttttggaatctccttattacctctaaaaacatagaccttagacatatcactgaaacccaattcatgaacctgaacttgagtaccaaacgatacaaatccaacaagtgcattctccggcaaaagtccaatggcccttaacaatgaagatttaacaaaccccatctcctcctcaatcatacaagtatccaaaacgaataaaaacacaggcggaggtaaattcgattgcgaaacaccaccactaacaacatcattagggttagcagattcaggaagaacatactgaaccgtagtgtattgaggataaagctcaccaggtaaattaatatcagagatcataccataatgaggaggaaaatgattcctctgaaaacaaaaaggacagatccagatcttagcagtgaaatcaacacgagcgtaagggttaagaaccgaagcacaagtcttacaacggagaggagtataaggaagagaaggaatgtcaggatgaggtcggatcggagagatgcaagccgcgagtggaatcacgcacttgcttgcttcaaccttggttcgtggccatgcgttccaggtcatccgtactccgtcgataccctcgggatctgtgttggccatctccgacattttttttttcctgaagagaagaatttggggattgattggatcgttgttgattatataatcaaaattgtgaatttgatttggatttttgattttggatttgacctatcaaagactgaatcgatgaagaagaagaagaggatttctttctcgatttgtattcaacgattctgaattaccagaaaatatatatatattttttctttctattatttgtttttaaatttaactttatcatatatatttctacaaattagttttattttatttatatactcaccataataatagaattaaagatttttttttttacttttctaaaaaaaattttttttacaaaaattcacataccaactttttttaaaaaaaaaataataagcgtattcgtacaattaaataaataaaattacacttcacggtcattacataaaaactgaagaaaccggaatagtaccatacaatttctaaataaaagtccaattagtcacatgggcagcaaaattacaagttctactaacatacacgaaattacagtaaataaaagagggtgatgacttaaaacaaaaggagacatagtaactaacaaaacaatttaaatcgtaaacaaaatttacataacaactcagatagaaagggtaactcaaaccataaatttaaagaaaaaaattaaaaagtagcataatataaaaggcaattttttttatataataattaatatttttaattttaattttttaattgttaaagtataaaaggtgaaaagtatataatttgcatcaatttgttaactaccatccaaattaatgtaaaagttatattttgaaaagtattattaatgagccataaaatttaatgggggtcttaggtgcaaattaaaattaggtcttttactaaaatgaaattatcaatcaatacttcaaaaatttaa

SEQ ID NO: 225028 - DNA, 8172 bp, Cannabis indica
cggacatgtcaggattgtacaatcccaatttctcacctgccagagctgcctctccccagattaggagcaccccagatgttgacaggtactactctcttctgaactatatatatatatacacatacatatttacaaaaataaatataaaaattgaattaaagaaaccataatcttagtctaaaggtattcaatttgtgtttttttaacatctgattgacttggaaaatctgtttgttttgatctgtacgtgggtttttgtttttgtagccagtacttatcagagctcttagcagagcatcagaagcttggacctttcatgcaagtgcttccgatatgcagccgcctattaaatcaaggttgttgatttgattagactttgatttctggatctagaattttctgggttcatgtcatcttttgtttttatgtctccacaaacatcatttaggtccttgcaaatgtgcttctttgtgttttagatccgtttggttgggttttactgtttttcagtagagtgtttttgtttggaggcagatcatatgtcatattttgtttcttttcttttttatttttcaattgggcggaaatgccctagcttcacagcatactaaataattgtttgtttgttttaagacaatggtggaactgtctttgggatttgaactcttggttttgtgctgacgagtcttggaactcccaccatcagttgtacctgctttgaatttttggggcagtgcgtttaattaactaataaacatttctgtctttggaaaagctttgtgtaataccttgatgtgatgtggggttaatagttacttgacataattaactatctgtactgtggttatcttgaagttttttgttctttggctgccattaactttgactagagttgctggtgtttgaactctttattgctttgaactcttttttaagagtacttagggagagaagaagttgaaagagtagcaataattcagtattattagatttcatcttccaaacaaaaagttctgagaaaattcagactttatttcactgatcaagtgaactagagtaacaactaataaaggtattagttttaagagaaaaggaaacttacaaacataagactgaatccttctcctacatagctttgacatattacaacctaattattattaaataaatacttccatggaaggaataatttacagcaggcatccttaagtcttgctgtgctttgcctgtaattttaatttttcgtaagtttctatgtaatcaagcgtgtatagatatgtgatatttgtaattaggaaagttaagataaacagacactataaaaactgttcttaaattaagatggcattaaaatcgctaattatcttatatcatgtatcatttatcaacttcgtcctcatatttctttaagagttcaaaaatctgactcttgagagtttaaatatattgtgagtattcaatattttaaattctaacagagttaggcttctttgtttgcttgaaataaggtatgtttagcatttcgcctattctcatatgagatttcaacgtttaatcttgtggtccattttaaatgacttcaaagtttcaattttttttaagcttctttactttgcagtgcctgtctttcttgtgctttgctatccaaattgtagatcactttctgattagtcacacaatgcttctttatgctgcagagattttacgcgtttctggaatgatgtccaaccaagggtttggtgactttgacaggcttcgacatagaagtcctagtcccatggcttcttcaaacctcatgtctaatgtcagtggaacaggattaggtggctggaatgggcttccccaagaggtggttaagatttctatattaatgtgttcatacaaatgcatgtttttgattcttgagttcttcttcatgtaaacttttatctatcttccttatttccgaccaaaattcattcattattactagtataatatgaaatggtgttgtcagtctttctgcaattgaaaatatgacttaaagatgtcttagttattttaatttgatctcttctagttatgatgtttgacatgatcatgcactttaaatgacggctactgtcgacttattttgcaagtatttgtttagaatcagcttctggttttaagtttctatgtcattatataacaagcgtcaacagttgtcctgtttcctattccctgtatgtctaattaccaaaataataaaaaaaaattaatggttaccttctttatctgatcagtgttaaattaatgatctatggcctcttttagccggggtaggacaggatagtattgtattagaataacaaaaagagaaaaataaaaaagaaaaagattagataagaaaaacaaataagaaagaatgagtgagcatatcacttgcaaataataaatttttatgaataaatggatacaaaatgtaggtttttgtgttgccattgaatgtagcgggagattgtgtaggattaaattgtcttatgtttctcaatgagagaaaatgatttttttttttatccattttaggtggattaatttagttgttgaattattccattttaagtggatcaatttcacaagtgacacattgtaatccaatcaattctatttttataaacatggcctaaatgcattgatttgtatatctgaagtcttaaatcttaatatggaacattaatatttgtgttgtcttatctaatctgtgttttcagtaatctactatgttgtattcagtattcattatatctgtcctcccttttgaataggtttaaactgcagcaaagtagatacgtaacaaaaagggcctactaggattcaaatgttctcattaacttgtgtgttcatgaattaacttaattcttttgtgactttaagtgtttcaagcattacatgaaatctctccaacttcgcttcttaattaatttttcctacaatgcaatttaaattttctgatcattgcatagaatctttccacctcatctgcttcttccttttattcttctccttcataacctggttttctgttttgtgaatttaaatgtctcagccattaattcattacataaatttctccacttcctgtagtatgaaaatgagtgtttatgacatactctaacctttgggctaacattatgcataaatattttaaaaggtgattctttgagcatttgggttaggattataaataaagttataaaaatgggaagttttatgggttgatcttgaagaaaaattgctacacttatgacagtaatttatttaagcatatttaataatgtatggtttataaggggaaaaaaatggatacatcatacttgataattagttttcaattccataggtaaattttgtaaagaatcagattataaggtgtctgtttctcaaattatgagttatatctcaacacttacagagggactttattgcagatacattgtataggttgtgtacattctcatcagcattttaagtagagttcactttgtgagctcaataggggcataccactgccttcgttactcgtcagtagtctgcatatttacgcgacattgtatgtttatcaagtttcattctggttgattacatggatgtgaaattaaaggcttctctctataattttctgaccatattatttacttaattatgcattatattataagttcttatgttttattttcctgttcattttatttcttatgatttctatcaaattacgaaatgttttaaagagagttatgctcaattccttcagagattaagtggaccacctggaatgacaatggattggcaaggtgcacccgctagccctagttcttacactgtgaagaggattttacgtttggaaattccggtagatacctaccccaatgtaagctttgcacaaaaatgctagtgtataaagagctgtctgattggatgggattgagttatcaaatgttataactaattgaacaatgaaactatgtagttcaattttgtaggccgacttctgggacctagaggcaattctctgaaaagggttgaggctactactggctgccgtgtttacattagaggaaggggtctataaaggatccagacaaggtaaaaatctacctgaacttttttcttattctttcttggtttaatattggatttactgttcttcaagctgtctgtaaactgtgatagatcatgatttttgttctagatttgtttgacacatttatttcttaattatttcctatgtaggaggagaagctaaggggaagaccaggctatgagcacctgaatgaaccccttcacattttaattgaagctgatttacctgccaacgtagttgatatgaggctcagacaggcacaggaaattatcgaagaattgctcaaacctgtggtaatttctgcaaccttatttgtcctgttactaattaattttttgtgttgaatattggtcatggctcttgctgactttttgttcttgaaacattatcttcttcacatattacatgtttagtttagagatatttgtaatagaacattgttaatttggttggttaagctaaattgagtgtttaatgctgtctgataatttttagtcttaggtgcatttggagagactaacgaaaagctaacctggataattttgtttgtgttacattttcacatatcttttgatctcatgatccaacactttcctgccagaaccacttgataatggatgttatgtacagtcttcaaacttatattgactaagttggcctcattgtcatagttttgacctttgctcttccttttggaacaaaatcctttcccacgcaggacgagtcacaagattatattaagaggcagcagttgcgtgaactcgctatgctgaattccaatttcagagaagagagtcctgggcctagtggtagtgtctctcccttcaacacaagtggaatgaagcgtgcaaaaacaggtcgataagagctcaaaattattattgttcttggttcatctctgctccagaaatttatggctgagaaagccctcctttacatcaaaatttatcacagcttaaagagattatcaggctaacagtgtttgttggtgagctctatgcatggtgtgttttcttttatggtctttcttaccttatgaacagtagacagaagaaaattggaaggggcaaaaaaacgaagcaaaaactgaatatacatatatattcatatacttggttattgaatttaggtttggtgaggtcagtttattaatgtaagtttaatacattaattggatttattcttgtgttagtgacaaaatttgttaagtgtggaatatatatatgtatatatacatatatatatttatataatatttttaggtagagagaggatcgcttttgtaggtatatatttattcattattatgctccatattctttagtttttggttttgactgtatgtaagaaaagtccgaatctattattctgtttctatttacaagtatttaaattttgtcctttttaaaggtctattattatggttcttggacacattcacaagagctctggttgctttcaaaccctaatattgtgctctgttatcttcactcttatgtcttggggagctcccatcaacgtgaccccaagacaaggaaatattagcaaagcccacatggatgcacgagagtgctatattttagtgtcatttcagtatctttcctttttatttttttggtagtctttgagtatctttccaagtcttactatggtctatttattgagaaatcttaaaggagacatctttgatgtatagcacttgtgatgtatctataaccatctaggtgcaatttcatatttcacatcttttaatttaataataattatagaacattgcatcatgttagctcatgatgcaatgcttcctatttatataaaggatctccaagggtgatgtaaaatttatattatatttgattaaaaaatattaatttttaacattgtgtttcaatgcacaattacaaaatttaatcaaaattcaatgtttaattagtatttttttaaaaaaatataaaaatataataaaaaataataattttatcattagctttattattaatttatcataaaaaataaatagtaaaaagtttataatttaatacaataactaaatttagttgtaaaaaattcaaaaatgacagtgaatataaaagtattacacttgttgtgatttaaattttgcatcatgctatattatgattcaaatttagataagttgtgacaaatttagatcaatttttggctcatcattggagtaaacttttttacaagatgagttatgttttagcaatagattactaatggaaatgttcttagggtggtgattttggtctcttttaggacatgtcccgtttcatcactgttggtgttgactcagaaatctggacatagatatctagctcacattctctcgctagattaacgagaataaattatgagttaagtataagtagattggcacaacaatttatagtagtttactccctatgtcacgacaataatggagcaacatctattttaagttttatttcttacgatatggattacagaaaaatagctaagtttggatactctaatttttatagagagaaactagagagaaatattatgaccttatggctacttttctgaacttcaaaaataagctagtggagctctcattttttaggtgaaggagtacctattaaatgggaataaaataattcaaaaaatatgaaaaaaaatacatttatactatttttgaccgtagatgatgatctaatggtgaaaagtaacttttgtggttgattgttaatttttggagtttgagtcatgttggcgagacccactccgggtaagttgcaacttaaattcgtaactcacttggggtaaaatttggagttgatagttcagaatttcgattgaagtgtgagacatgacttgataaagcattaaaatagcttcaaaatgcaagttcaatcgcgtaatcgaatcaatattgagtaatttatggccattttactgaaggttgttctgggcccagtgcccaggttgacattctagcacccaagttgacatctagttgccatgttgacatgtgatgttaaccaggaagctagtgagtggaaaaacacgtcggagatgtattttttgatgcctaagtgatattttaacattactcagtccatttatgtgttctggcaaagctaatcactagttcttgaagatgttgttctacggaaacaaaaaacttaaaactatcatgtttctgagtaattcaccttgtcgggaaagtgaaaatataaagttctgaatttgactcttttgacttcatgactctcaattattgtgaaaaattagacaaatggtcgagaaaaaaatcataatcgaataagcagaactcaacacaccatgccatttgtcaacctgggtgttaagtgcttatttcagagcttctgtgatgtcattttggcactttcgaggttcttgaacttgaggacgagatctcctatcctgtttttgaccattttggtgagaatcctgagagcataattggcatttgagtgatcaaaatcaacgctccaggatgattgccaacctgggtgttgggctcaattttaaggcccttggacttgtggttttctccctaagtttacttgtatcttcgtcatttctgatgacggaaaaattcccaaaacgctttttcagaaaattgattggaaatagcccaagttgacaatatgtcaacctgggtattaggcccagtgccaggtgtcaacttgggcgtaggccacctgaaagttctatttggtccccaaaaataattaagtcttaatctttgctgaaaatggagaatattttaaaaagattttttttaaaaaaaaaactccttggaattggcctaagttgacaaaatatcaacccgggcactggaccaacactaggtgttatcttgggcgctggtcccttgttctggcacccaggatgggccgtttctttctcaaaagcactaggttccccatttttgatgaagacgaagaacttgcaagagttggatttttgatctgatgcttggaagtggcccaagttgatagattgtcaacctgggcgttggatagcccgcgcactaggtgtgtaacgtccccgcttca

SEQ ID NO: 225029 - DNA, 2879 bp, Cannabis indica
agaaaaccctaatttcacaacgaattcctaccattaaaagggttttcttctctcggcggaataatcaatcaaatctaatctacgcacggatccaacagagcaacaccaatcgggaggttcagatttcgagccgcctttcgatccaagagcgttttagagtgagaaaacgagagaatttagagagagaaagataaaaattaaaaatataaaaaaagaaaaaataaccccaaaaattataataaataaatgaaaataggtctttggtacttggtaaacggcaaagagagagctaaacggcaaaaaggaaaggtgtacttggtacttggaagagagcagtgggacgggcaggcataagggcagatcgggtagcccgaaaagaggagaatgataggaccacctagtggtgacacactaaaaatattaaaaataaaaagatgtgtgtacttgagaaaaaactctttatagaatagaatagagatgaaggttagatatgttgacccgtcggaggatggggatttgactttttctgtctctgagatttcagcgaatgaattgtgattttttataattttatttttttaataatatttccaaaatgggtgtggaggaaattgagggttacctgcgggtgatggaagtgagtgggccagagtttgtcataaaagggcaaacaagtaattataaaggaagtaaaacattgaagaggtgagaagtgagggggggcatattatgatagagaagttaaggttgtcttgtgttgttccaacacacattactaaaaagtaagagaaaaagagggttgaagttgatgatgatgtaaattggttctgtttctctggcaggaataagccctttgaattattaatattatttttgtttttattttagaaaaaaatttatgtggtctttctttggaagataggattgtatccttcttcattgttgtcagaacattcaatttttttttagtaaggtccacattaattttgattggttaagctttcaaccaagtaaacaaccccttatttttctcatgggtcatttttttttatatatgtatatcttgtatttgttatagaataggtatcttacttcttatcccaaaaaaattaaataactggttgtaacaagtaaaacatatttgctaaacaatttgaaggtgttaattaaaaaaaattgttttatttgtcaaaatcacaactacagcatcttaaggtgtctctttcaatttaactttttgaaaagcttatccaacctgaccaattaatcaaaattattgaaagctacaaacaattcttccctctttccccacgctttaatgtcaaataattcatattaggattttatttttttgctttcgttttaatggtttctgccaaaatttgtcaattttcccatcataatttttttttctttttcctgaaaaactgtcataagtacaggttcattatgttctttcccaaacaattactcaaaaggatggggggaccaaatccagcctagccattggcaccagaaaggaatgacaaaacagtagatagaaaacaatgcaaaaccatcatattcccatgtataattggtacttaagggcacaaaaacagtaataaacagagtaaagaggccactgagcaataagccagagacttaaagtttaaggtgtccaaaacaataaaggaatctgagactcattgtttatcttaatttgtcttagttataaatagactattcaagggaaggtggtctagttggttggggaacctaaagtattaaatgcaaatcaagcaatgagattggtttgaagaaaatactgcactgttgttttttgcataaataaaaaaataaataaaatggtttaaaagagatggttcaggaggatgcaattttactgcaaaaagaaaagtttaactgatatatatatatacgtttggtttggtcagatctaaccgtaagagtagtgaatttcaagtagtttatagaagagtcttgggatgaaagaaaataacagctgttgaaagttgatgaaatatttcaagtaaatcaagtacaaacagaagagtgtggtgggatttattagcatagatttgaccacacaagaagagttctatattgatgtgtcaagcaaaagtaaatctcaaactgataataggtgtcttattatagatgaaaaagaggtacaataaaatatatttatatatatataattattatttatataatagagaatatccttcctccaagacaaacccccaatttataaacctaacatcaaaacacaaacttctcaatcatacaagagtaatctcttagagaaagataactattggtatttaaaagcaagacgctagttgttgaaagtttactaatctaaattccaaaaataaggcagcattacagagtacagacctaaacattagtgactatagttgtagaaaagagaaccagatgccatcacaaagcatttaccatcctcttcatctcagcagacctcctgggatcaggttcttcaattgctctctctgtcagtacttgcttaatacgacacatcgactttctcacctgagacattttatattaacatcatgaagatagtgtcaaaactgaattggatgcaaaagcttttccaagattaaaaggtatttaagttcaaatatggtatggaggcattatctgaactatcgtggtcttatgccttacaattcaaatatctagtagtcacaacagtcaacatgatgagcaagttgcatcatcagaacaattaacagtaattaaaacttagatccagttaataaatttaataccaatcaagtttatgcatatacccatttataaaatgagatgtttgctaacaaaattactttgtaattttcagaatgcagcca

SEQ ID NO: 225030 - DNA, 8498 bp, Cannabis indica
acggactttactaggacaaagaatctttcacaaagaaaaaaaaaaccaaaacaaagccaccccatctaattttctctgtaaaagactcttttttcttggtgggtttttgaagattagtaatggctatggctgtggtccaacacagggagagtagtagtggaagtatattaacaaacatcttgataacggtaagtatgtccgttacaccaccgaacaagttgaagctcttgaaagagtttatgctgagtgtccaaaaccaagttctatgcgtagacaacagttgatccgggagtgtcctattctctctaacatcgagcctaaacagatcaaagtttggttccaaaatcgaaggtttgatttgatgatttttttattacacaactgggttttgatcatttttgtgtttagatcattaaagttggtaactttaattgtatttggatttggattttaaacaaacaggtgtagagaaaaacaaaggaaagaagcttcaaggcttcagactgttaatagaaaattatcagctatgaataagttattgatggaggagaatgatcgcttgcaaaaacaggtgtctcagctggtttgtgaaaatggatatatgcggcaacaattgcataccgttagtgtatgttttctctctctttatacttatttaaatataaaaaacttgaaatttttaaggtatgttctttggtgggtgggaagaaaatgatatttttattattaaaggaattggaatcaaatttggtatgagaatgataatgttttttgggttttgtttgtttgtacttttatacttacctggttccaaaatctcttaggtgtgactatatttggatactgtcatatacataatatatgtgtatatataatataataagcataaaaaatttgactttggtgcaggcatcagcggcaactacagatgcaagttgtgactctgtggttaccactcctcaacattcccttagagatgctaataaccctgctgggtatataatatatatagctctcaaaatcagtgattttaatttcatgtattgtgtggtttttgatttcattttcatgtgttgtgttattggcagactcctctctattgcggaggagaccttggcagagttcctttcaaaggctacaggaactgctgtcgattgggtccagatgcctgggatgaaggtttgtttcttgtcttatatctatcaatctaagaacataatttgattttgctatataaatatgttatttacagtttcgtttgttgttttagcctggtccggattcggttgggatctttgctatttcacaaggttgtagtggagtggcagcaagagcctgcggtttagtaagtttagagcctacgaaggtaaataatttgaccgagctaaatgttttgtctcagtacccttttttagtttcttatgttttgttgaattcttaacagattgcagagatccttaaagatcgtacatcgtggtttcgggattgtcggagccttgaagtttttaccatgtttcctgctggaaatggaggaacaattgaacttgtttacacacaggtaaacaaacaactactgagatatcttactatttattatctgaatacttaatgttatgatatgtatttacatcaatgcagacttatgctccaacaacgttggctcctgcacgagatttctggactttaagatacactactaatctagaaaacggcagtcttgtggtgagtgtctttgttccttgtccttgtacttgttctcctatgtatcattgcataagtagttgtatcggttatgaaggagactaatgttacattgctttcttataggtttgtgagagatctctgtctggttctggtgctggtcctgattcagcttcggctgctcagtttgtaagaggcgaaatgcttcctagtggatatttgattcggccatgtgagggtggagggtctataatccatatagttgatcatctaaaacttgaggtcattacttctaggcttattgtaaaactcttagttgattttctgaattttgaaggcttagacgagcccgtttaaaatccatttttagtttcttgtataacatttatataatatgttctcgctttgcaggcatggagtgtgcccgaagttttgcgccctctgtatgaatcatctaaagtagtagcacagaaagttactattgcagtgagtacaatttttctggaatgaagcgttgcgtttaaactttaaacaagtgttcatgtgattcttgctggtttcggacaatttctctcgtctttctattgaaattatttgtcatttggtagaaacgtgttagtggggatggtgtcctaagcctaatagcatactataggcacaaacccgtgtcgtgtcctcgagtttttcagcattgaattctatttttggaagagaatgttctcgcttccatgtgtaatctaaagatagaacacttagaatggattgatgtcggtattcactagaattattttgtacaggcgctgcgctacatcaggcaaatagcacaagagacgagtggtgaggtggtatatagtttgggcaggcagcctgctgttctacggacttttagtcaaagattaataaggtaccgaatgttttttctttatttagctcggttgttgtctttcatgtggatgatttgttgttaacttgtggattggttatctttcagaggtttcaatgatgctgtcaatggattcaatgatgacggctggtccattgtgactgttgatagttccgaagatgttactattgcaattaactcggggaagaatttaagtaccatagccaatccttctaattcccttgcattccttggaggggttctttgtgcaaaggcttctatgctactccaagtaattttataacttcgcaatgttggtcatgttttcatatgttgtgacattgattctaatgttgtgtatatttcctgtcgtctaccagaacgtccctcctgctgtcctggttaggtttctaagggagcatcgctcagagtgggccgactttaatgttgatggctatactgcatctgcattgaaagctggctcttatgcttatccgggtatgaggcccacaagatttaccgggagtcaaatcataatgcccctcggccacacaattgaacatgaagaggtatggtttagaaaagaaagcgcaccctttcactaggaaaatttctttacatctttttttgcttacggtgcctttttatgtttcagttgcttgaagttgttcgattagaaggacattcgttggctcaagaagatgctttcctgtcgagggacattcatctgttgcaggtatgtttacggtgaagggcatgatatcagatagtttatggtttaaaatgttaagatcattgttttgtttgtttcgacagatttgcagtggagttgatgacaatgccgtcggtgcctgttcagaactagtttttgctccaattgacgagatgttcccagatgatgcgcccctactaccttctggtttccgcatcatcccattggaatcaaaaccagtaagagtcaaatcgttctggtttcgggacaacttttccacttgctccatttttatgtttcgttaattagtgcttttgtccatttttcagtctgattcgaaggatgcattgcctgcacatcggacattggatcttacatccagtctggaagtgggaccagcaacaagtctcacgggtggagatccctcatcgggtcaaaatgcaaggtcgttattgactattgcgttccaatttcctttcgagagtagtctgcaggataacgttgctacaatggcacgccagtatgtccgtagtgtcatttcctcggtacaaagagttgcaatggccatatctccatcgggatcaagtcccggaattggtcccaagctttcacaaagctcaccagaagctcttacattagccaactggatctgccaaagctataggtaacacttcttcgcttcttttttaatgtttgtcataccgaaaagaacccgagcaaatttaccaattaccaaaactctgtgatggggttaggttaagacttggtagctgctaagtgtaatttaaactacgcaaatagcactcagacgatcgatgtgggacattttagcttattaacatatcaattttttgcatattcagttactatatgggatcagaattggtgagatcagacaatttaggtggtggtgactcactattaaagaatctatggcatcaccaagatgccattttgtgctgttctttaaaggtatgccttatacaatttcatgacttggtagaacacactgatatcgaaaaataacctatctaccttttgtcgatcacagtcacttccggtattcatctttgcgaaccaagcggggctcgacatgttagagacgacattagtggctttacaagacataacattggataaaatcttcgacgagtctggtcgcaaggcattgtttaccgactttgccaaattgatgcaagaggtgaaatttcacactcgaaattttgtttattcattcgaaatatgccaatgaacattcttttttcttaacaacaatggccttttttgtttaatttgttaaaaggggttcgggtgcttgccttcgggactctgcatgtcgacgatgggacgccatgtttcgttcgaccaagctgttgcgtggaaagtacatgcttcggaagatatcaacagtgttcattgtcttgctttctcttttgtaaactggtcttttgtgtgaaaacactttgttatattttccaaacacatctttttccaactttgaatatacaaaaatgataaatttgaagaaaaaaaaaagaaggaaaaggaagaaaaaacaaaaaaaagagaatcaagttttgtaatatctgaacctaatcccaggtttgcattaatattaatttaatttaatttttacttttatttaccaaaacctttgtttctgcttgtaaattattggtttttgctttttttagttagatttgtaagaattttgaattcataaaaactttggctaagatttaatttcttataattttgcaaatttgaatatattcaaatgaaaaagttaagaccttgacttttggttataatagtttgaattcaaattggtcataatttatatattgaaataatgtttaatttagaatgataattataagactataatttatgctttgtttcaaatacaacaattttataatcaactcaaaacacatgattggagattgttactgtcaatttccaactttgtaggtatttattaattttagtgtgattgttacacaccaatttgcatttttaatatgaaatgtaatagttatatttatttagtatttgtgtacttttttaatttggaataattttaagagttgttttcggtaaaattcttttatgttttaaatttttacacttaatactcttacatctttttgtggtaaaatttttttatgtttttttaaatttaaagtgtcagttagataataccgttaaataccaactgaagtattacggtattgatttcaaagttttactttcacgtatacactatacacagtggttatctaattggtatttaatggtgatatttaaatttataaaaaatgttaaacttaagaatattttaccgccaattaattttatgtattgttattattttaactttttgtttttaataaaaagtgaggtgtaccttgaaaaaccccaaaattatatattgaattccttgccaaatcataatcttcatccacaatttttttaaaataataataataataattacataatcttcatccaccaagaacgagtttagcaagaatgagccgtgtgagtaatattagtagtcaaatcatggaattgtgattgaaaaatttgtaagtactaatatttgattagattgaagatgaataagaaaattactaaattaaatattatgaggaattaactatgattactattattaaagaaaatgctttgcattcttaatatataaattaatgaaggttagggtacaatgtccacaaatatatctttgttttgttatgttcttcttgtcctttgaattattccatcaagccttattcacaccaataccacatatataaaatatatttattaattttttctaatcatcaatattttatatatatttatatgtgtgtgctatatatatatatatatatatatatatgtatatagagtaatttgtggagaaaccctttatattttcagttttatacattcaacctcttgatattttttttttttggcaaaataccccttaactttataattttttacaaatttgaggtgtcaattaattcttacttttaaatatcgactgaattgctattgtgtacacgtatatgtgacatgttttgattggtgttatttgcatttctgaataagtgacacgtgtacattccgatcaacccattcatcttaacaagcatattcactgagactatgatgcattgatcactcggtccatgggtagatccgaacataatgttcagatttaattggtgcttcagaatgactaagttagacatatgaatttggaaggttaacacttgttctattaacaagtatacaaagagacgaagacggataccctcaggggtcatccgggaaggagattcgaaaaggatttcgagaacgaacgaatatccgggaaccatcctatgtggacgtccctgacaagaatctagagaaatcaagttgcatgtcccctatatatatcaagtcttggaaaagctcacaacaaaaagaggattacttttttttgagcaaacacccactactctaacattctcacaacagattgacggctcacgcccaactatcaccatcattcgtacatgtgtgtgtatggacgacggttgtccccaattgtaggcctcttcaaattggccaaaattcaatattttgatgtaatttactccatcagtagacttttttcaatttacaaacactaataggtccgagtcagcccgttctattagttaaggagcctataaatatgacatttttccgtgcaaggggttagaaaattagcaagaaagacttgtatgaaaatatactccataacttcataactaataatattaactcgtggaataagatttattaacatcccaacacgtaaaaaatctccttgtcgagtttaatctccttgtcgaggttaatatttatcggacactcacataaatatcaacaatacaaacataccttcagaatgtttaaaccctaaattcatcatcctatatataaattatgaaattttttgaaaatttatgtagaaaatcccctataattatatctatactactttaattagcaattattcattcctaaatttatatataatgcatatgtttatgtatagggaatggtaaaataatttgaagccttatttgttacaatagttgatttaaataaggtaataataatgatgtttctagtgcgaaatataatagctttggctcctgatgagtgaactaaaaaactttttgtcgtgttggtgaggaacattaatgcatatatatatatatatatatatacacattatcataattattatgtatattatgcttaattacttttgtttatcaaattaacctacctacctacctattaccttgtgaaacttttaatcattaggctacatattaacccactaattatccatctttttcactcttacgtttcacaattttagaggtttcatacatattatattaacaacaattttacatatatttttagttacaatattaatatttactgtgctatacataaattagtactaatttatgtatagatattatgttttaaattctaaaagtaattctttttttagtgttactaacaattttttttttccataattacatataccttatagctatttacaaatacttgcatcagcgtgtaataaaatatttacactttattatcgatattgtaaatattcaaaattttctaaaactttacatgtaatcttaaataattatatatccaataataataataaaataaattaaaaaatcaccatccaccaaaacaaatataaaatctaatctcaaaaaatatacataaatacatactatatagggatatgattttgtcctattattgtactttcacgaattgtaatccgtgatgtacggcagccgtcagagttttttgatctgacagttaagattgatctagatgtaattagagttaaagagtagaaacgtaccctgacactcatttaatgtactttgagctcatctaatgtaccacgaaatacattccgtgaaagtacatcacgggacaaaatcatatataaatatatatgagataataaaagaaaaatatgttggttttacgtacgtacgtgaagtgtgaggtaacatcatgggaagaaaaagctggaaaagcaatgattgaaataaaatatataaatacatatttatgaatattattaattattaatta

SEQ ID NO: 225031 - DNA, 3577 bp, Cannabis indica
tgctcttatgaagtatgaaatagtttatatacttcttgaatctacttctttgattatgttgaattgtaattaactcgaaacaatctttccttggtcttcaatgttgaatcgaaacaatctttccttagtcttcaatctatcttgaattacaagccacaatacaaagctatgcttcagagtatttaatcttccctaacttctctactccaattaacatgacctggcagcggacaaagcaatttgtatccataagctattttgtatttgcttgctgtgaaggaggatacattcataagtgttccaactatgtctttgattactactatctttctccaatacaacctaccttgttgggaggcgagtaactccaccaatcttcttcttttatgcatgcactatgtacccacttgactcataagttgtcctctttggttgcaacagcccaaacatacttgaatattgttgctttgttctactcaactacattcttgaagccaatgcctccagcaactttaggcttgcaaatattatcccaggctatttgtcctgcaccagtcatcatatgttgtcccttccataaaaatgctctccaaatagcctcaatttcttttaggatcttcttaggtagtaacaatgtctgactccaataagaatgtattgtaaggagcattgagctaaccaatattgccctgcctgcaaaagaaatgttcctagtgctccaggatctaattctattggttattttatctaccaatatgttgcattctttagaagagatcattttaccacaaactagaatccctaagtaagtaaatggtacttcactcctctagaaccttgaggcatcaagtatgtgctacacctctttgttggacatcccactacaatatatggtagacttagaagcattaggcttcaaaccggaggtttgagaaaatagtttaaggccctgtaagagataatatatgctcttataatcgtcattacaaaatagttgttatacctaaaattcggctatcatttcaaatgaggacacttgtcaaattgggaagaataggaatctatgaatgtaacggtaattatatttgaaaatagaataactcattaatgcagaattgacagagtatatttacaacttgctgactggaaggtcttatgcaaaataaagatatgtcaactgtcgatccatacattaacaagaaaccatacaaattcagatgtacaaggcgaggcataaacctcgctacgcattaggagacgagacatggtgactggtaagactcttagtgtataatacaccttatacaaactaagtataacagtcgggtaaatccaaacaactaatagcgaggcacccatcttgctataggaaggcacactcatggtaccttcatcaatcagctccaaacacctttcaatggggatcacagctccgtcgagtcagctctctcagatagaagttggcatacaaatgatgatgactgctgaagtccaccttgtcgccaagaactgcaatttttagatagagcattatgtcttcaagcgcaagaatgacgaggcttacatcattaaccccagaaagacatgggaaaagttccagctggctaccaaggttattgttaccgtgttcccagcgagatatcccagaacgttatggtttacaacatatttaatacacgtttaccttgacccggtaaaagcgaacctatcatagttgtgtaattttcaaatgttaaccacatttattttacgtggtatgcaatcaaaccccacgatttcaagggataattgttgtaagatatcagtcaactatgtaattaactgccttactatgtaattataaatacaggcaagttacactaaaaaagagaggaaaaaatcattaaaaaaaggcgtgagagtcgtatcagaaatctaataagattgactcgtggactatgtagaattttaactacaaaaccacgtaaaaacctttgtgttcatatcttattgttactgcttttattttctgtgcaaatctatcactatttaggctcaaatatagttaacaaaaatatgtcttagcagtaatacatcatttggaaagatgaggtgtttcaacttcagatctttgcatctatcatgaaagacaaagtcagccttctatccaattctccccgtgattctagtgaggtactccattcccagaacaaaaatcaatggtaacattggatccccttggtgtagccctctctttgctttaaaataaccatgaagtgagccaactaggatttcagtttttgggattgtcttagtacaaataggttaaactttgcattgggacatcaactagacataccacagacataattgaggcatcaaaatcagattcagagcaagttcatttttgagcacctagaacacctggtgcccaggcacctagcgcccaggttgacaatttatcaatttgggcacttccaagtatcagattgacaatttgcttttgcatcttcttcatcttcaagaaaaataaggaaatatgtactttcagggaagaaatagaacttcctaggtgccaaaagcaaggcccaacgcccaagttgacacctaggctggcccagcgcccaagataactttttttcaatttaggccaatttcgatgatgttttctgagatctcttccgagcatcttctctattttcagtaaagattaagattcaactatttctagggactaaacgaaacttctgaagggtctcaaaggggacccaactcccaggttgacttattattaacatgggttgtttcttatcaagttctcaaaaaagtgttccggaaagttttttcgtcatcaaaaataatgaagattcaagtaaacttggggagaaaaccacaatcttgaggccatggaaaaagggcccagctcctaggttgacctagtgttgggcccaatgcccaggttgattgtcaacttagtgcactagtttcgttctgtcaaatgtcaaatctaattcgaccattgaatctagaatgctcaaaatggggtaggagacctcatcctcaagttctagatccttggaagtatcaaaacaacatcccggaagctccaaaaatgagtacccaacgcccaagttgacaaatggcctagtgtgttgggttcttcttatctgattctgattttgttttgatttttagtctagtttttcacaataactaagatccatgaagttagagaagccaaattaaaaactttgcatttctcatttccaacatgggaaactcacttggaaatgaagagttttgagtctctcatttctgcagaacaacaacatctccaagaactagtgatcagctttgccagaacgcggaaatagactaagtgatatcaaaatatcacttaggaatcataaatttcatcccttggacatcttttccacttacccagcatctgttgacatcatatgtcaacctaggcgctgggatgtcaacctgaacgttgggtcatgaacagtgttcagtaaaatgatcataactcactcaatatggatctgattgatgtgattcaatttgcgtttttgaagctatttcaatgctctat

SEQ ID NO: 225032 - DNA, 4890 bp, Cannabis indica
gtagcattgacatatctaatctcctagattcaaagatgtagtttctgtgtgcaaccagtttctacttggatttttatagtcttaagatgtattgcattcagatttctttttctcttgtttcacaatccatggattaagatatttgaattctctttgattctgatcattttgctaacccctagagtatttcataatttgtaggtaactagccaagaaaccagcttggttgctagatgtcgaagggtttatgctcatgcccacgactatcatattaattcaatttcaaacaacaggtgatggcattttttcttatattaattctgtatttgcatttatcttcacccccttattctaagtgttttgttgtaaaactagtttgggtttctttcctttgctttttggtgggtcatttttaggccaagtttatccttatttatgtagttttgtttcttataataattatacatatatatatatattatggtattaactctacttatatgttgaaaaatgtcatattttaaatgtcatcttctgctcagtgttttagaacttactaactcttctctctcatccttgtactttttagtgatggtgaaactttcatatcggctgatgacttgcgaatcaatctttggaacttggagattagcagtcagagtttcaatattgttgatgttaagcctgcgaatatggaggatttaactggtaagcttcttggtatttcgacattcttggctgtgtgaaactgtgaatttagatgtgctgtgtacttttatgctataaaatagactatgattttcgaggttttctcctcatctttttgggtgcttggattgtgagagtaatattttacattgcttctgctgctaattgcattgcatgaacatgcttgtggatgaaatttggttgagaaaatgtctcaatggaaccagggcagggttttatttcaccaggcgcaatgaaagtgaacttgtataaaaactaaatgttaatatttgagttggggcattttagtacaaatgcacatggagaggggttaaatgatagatacaaaatatatatttatatatatatatgtaaaaatctcagtggggcatctgcctccactcctcatacactgggtcccttagtgaatgaaacttttgccttgttgcttaaacgattttatgagaaacgttctgaggcatgtggcttttcttgatctcttgtttaatctcgaaatagttacttaagtactggtcataccttcctatgtttgtctaactccgacatgattgcaatccacatttattgattatgtatggctcatcgttgaatgtatatttttattatgtattatataattttatatatacgtatattttttttatgttcttgcagtgaatatttttttgtataccttgcagaggtgataacatcagctgagttccatcctactcattgtaatacactagcatatagcagttcaaaaggatcaatccgacttatagacttgcggcaatcagcattgtgtgattctcatgctaaattgtgagtacttggtgctctaagtttctgatttttaagtgaattggttgaaaataatacaaagaaaggcatggaggaaggggcaacatttatgtgcatatatttaatgttttcctttaccccattctcatttctttattgcttctgcatatttgttattctatagttcccaatacaattaataaagtaacattaaatgccattgccacctttctgatgtgaatcttgattgccgtggttcttcctttcgccgatttgcatgaagctgcaactcttaaatggttgaacctctatgctgccaggaaatttttctttgaggtattgtccaatttgtagtctaacctgcaatttttattcttatgcaggtttgaggagcaggaggcacctggttctcgatcctttttcacggaaattattgcttcaatttcagacattaagtttggcaagaatggaagatacatacttagtcgtgattacatgactctcaaggtttggcttttgtattgtatttcccaacttaccttggcaatgaattttttttttttttcaaatatatatagacaacaagatcggattagtaagcgatgatagataggacaaccacaaaagaggctgtgctcataaaaacaacataaccaccctcatgaaaaagctattatattacaactacaagtacctatcacatagaagtatcgaggagtatgccttgaagttcgtatttttaaaaattctgaatagcaacccaatgctgagcctttacccatgtatcttcccatcctcttctacattgttgaatacttgcaaattgcaatggtgcacgccataaggagcatcccacattcttaacaattgataagcatggcttatttaattatcaaagtacaacatcatttacttctctactttgagttctgagttgacacttgtgccgaatacatctcatatatgggttggacatttgatcattttcccagtttctgactttcatgctatgtttggctgtcagttatgggacatcaatatggattcaggacctgtttcaaccttccaggttcatgaatacttaagacctaaggtgagacttcctccctttggaaaaatattgaagcttcctctctgagtctaaactactatccctgaatgtaaccagctatgtgatttgtatgaaaatgattcaatctttgataaatttgagtgctgcctgagtggagatggattacgagctgcaacaggctcatacaggtctgctatgaaacataaacatccattttgttctattgctctttgcagtttgatattctaattaacattttattgatatgctcccagcaatctcttccgcgtatttggttgtgccccaggaagtaccgaggctacaaccttggaggctagtaaaaatcccatgaggtaaatcaaatggtaataattggtagacatattttatttttagactagaataattgtgtattcttttatgctttttcaggcgacaagttcagactccttcccgaccatcaaggtctctgagcagtagcataacacgagttgttcgacgtggtcagttttttttttcctttctaatatatagctatcaacagctgcttttcattcgatgaggcttgcatgtacttaataatttctgacatcccacttttctaattttgtaaaatccacaacaggatcagagagccctggggtcgatgcaaatggtaattctttcgatttcacaacaaagttgctgcatttagcatggcaccctactgagaactcaatagcttgtgctgctgcaaatagcttgtacatgtactatgcataaagacagtccaagaacaaatatatttgcttgggtgaacttttttgggttgctattggagaaggtgacttttcccaactaccaaccactcaattggaggctacattagttctcaagatttcaaagtaccccttaagattggtagccgttgtttaatctcgagttcaggaaatggctgtcacagaatcgaggatgaagcgatcagattttgttccagggtgggcagtctcgtcttttttctttccaccctcttctcaagttccaaccctcaaaagtttctctttttctttttctttttcattattctctccccttagtcatcttctgaagaagaagatgcattttatgtctgaaaattctgttgggttgaaatcaagaagaaaaatgtgattgtagctctcctacaacaaaatactaaaaggatgttccataatttgccactaggtttaagataaagaatgtagtttcatttactcaaaaaaaagttcttggtgggatggagctgttgaaaccttgcagtgcatcaattttttttattgattctttatgatggttgatatttgattaacaacacttcttaatattttgttttagacagaatttctgtttatgttttatgtaacatagcaaagctacaataactttatcattctctttcaccaggcttagaggtcctaggattttcttctattcttttttttttttttttcgttaacaatgtttaattttttttcccttcattcccatttaacatggttgtctatgtttttcttccaaaatcactttagggatattagttttacctgacatcaataggaagggattcttatttgtacaaatggtacttagaaataaatgccttgatactatatcttccttccatttaaaaaatgtattcttataaatatatttaatttctataacagtccattgtcattgtgggggtacatcacttaattgaactctgttcattgacatatatgtaacagtatttattattcaaagatatccacgttccagaaaatttggaccaatgtgatggcataaatggctcaatttgaaacatttctactgaaatctgttttctacaacgaatggatatcttttgagacgagcagtggagatgagagcagacagcttttcctctgtgggccatggctgttgactattgacaaaattgaagaagatcaaaacaaggagttactttcctcattgctatgagcagcctaggctttatttctatatgagtatatgttatatgtgttgtcaatgaaatctctctataatatgataacttgtcaatacttttcttttattttcatttgattaactcagtcaaatatatggttattccgattgtattgctcacatttgaggcccagccttcttgagtttgcttatactaggtactcatttcagatatactctaattaaatggggtgagattagattccatcttcagaaggatactaacagtatttagtgtgattataagtattatatttagtggcggaaccagaagacgaaataagaaggggccaaataaa

SEQ ID NO: 225033 - DNA, 6448 bp, Cannabis indica
atctttcctaaccaagaaaagaggaactagatccaaaaatgcaaggtaagaaatcggtaataaatgcaagaatatcttaccattaaattaaaaatattttgtccactaacttgccaaaatggactttacagagcatttaaggctgttgtgtcatgagagatcaagctgggatcactaccagttataataatgtcatccacataaacaaggatgattgtcatggacaatggtgtgtgtctaataaagagactatggtctgattttgaggagacaaagccaagattaagcaaacaactgtggagtttctcaaaccaagctcgaggagcttgcttgagacaataaaaagctttgtgtagcttacaaacaagatcaggggaatctggatcttcaaaaccaaggggttgagccatgtagacttcctcttgtagctcaccattgaggaaagcattattaacatcaagttgccttctatcccaatcttcggaaagagcaagataagaacaacccttattgtaacaagtttgacaactgggctaaatgtttctgtaaaatcaaaccctggttgttggtgaaaccccttggcaaccaattgggctttgagcttatcaacacttccatcaggattttctttaatcctatagacccatttgcaacctattgcagtcctaccagggggtagcttaacaagggtgtaggttttattctttttgagtgcaaccacttcatctgccatggctttgttccattgtaactgctgccgagcctgttttaatgtggtaggaagttgagtgacaagataagcttttggctttttgatcccatttttggcacgagttgtcatgttgtgagtgtttcttgtcactgtggaagcagtattggcatcaagaacagacatgatgttgacagtagcttcagtaggtattattgtagcaacagtgttgttgctaggagcaatgtcaggtgctgtttcattggggatagcaaaagaacctccaacattgttgacaatctgttgcttaggaacagaattagggattatagaaggcagctgatgtagatgaggggctgaggcacagttggttggaaagttgtgagagctagatccctggataatgttacttgtaccatcatcaggaagatgagaacaagtgaaaagaggatcatgtgagtcagttggtaatacagcaatatcatatggaaaaagagagccaacagtataaagagtgggagcaataggtattgtagcagaagtggcagtcatgagattagaagaagtgatagattcaatgatagagtgattgtgaggaaatgagttttcatcaaagataacatcgcgtgaaatatacagcctgccagctttgtcaatacatttgtagcccttgtgatttaaactatagccaatgaatatacaaggggaagatctaaactctaacttgtgtttgttatagggcctaatgttgggaaaacatgtgcaaccaaagactttaagaatgctataatcgggtttaatgttgaacaagacttcaatgggagatttgagagagagaacaggggtgggaagtctgttatgaagatacactgctgtcctaaaggcttcatcccaatattttagaggtagattggcatgagctaaaagggcaagaccatgttcaacaatgtgtctatgttttcgttcagcaatcccattttgttcatgggtagtgggacaaggttttctatgcactataccagattgctgtaaagagtctgtaaaggacctatattcacccccaatcggattgaaacactttaattttccattgtgtgaagtagtgaatgagggaccccataaatctgaatgcacaagttgcaagggagcattataacatgtttcagacatttttgaaaaaagggagtttgtgtattttgcctaaacaacaagctttgcaaatagagtttgacattttattcataagaggaatattacattgggaaagaacagacttcactaacctttctgagggatgaccaaggtgattatgccacagttcaaatttattattgctattattacactgaaaacagagagatgagttgactgaattaggatcattttgaggaggatcagcagtaacaacatgagtggatggttggtcaggtttggcacaattgggagatgaggttgcagacaagtggagttggctagagtcaaaagtatataggccattgtgatgtctcccagtcagcagtgtgatattgctcacctgatccttgacataacacacattaggataaaacacaaagtaaacattgttatctgtagcaaacttagaaacactaagtaaaatctttgtgattttacgcacatgaagtaaatttgtaagaacaagatgtttattgcaagaattggatagaagataggcattaccaatttggagacaggcagaccaactccatttccaacatacaactgttcaggacccttaaattcaactggtgtcatgatattttgaccatttggagtgcagtgattggtagcaccggaatcgaggtaccaattgtcatctgtcccctaagatgtttgagcaatatgagcttgtgcttgtgactgatcagtagcatggaaaacacctgtgaagcttttatcaaatcgatggaagcagtcgatgacactatggccaattttgtgacataattggcattgaactttgttctgctcaggtgaaaatcaatttcctcttcctcttgccatagttgaggattgattgttactagctcctctaggggagttaccccaaaaatttcctctggtattcaaagcagaagtaggaaagttagaaaaattgaaatgactgggattgtactgacctcgagtgaaaggataaggtctgtaatttcgattagactgagcaagaaaggcttccatagctagatcttgttctgctgtggcaagattagcattgaattccacttcttgatcctccttctcaatgcaagattcagaagcaagaagcaacgcttcaatttctccaacagtataaccttcgatccttgtattagtggagatgatgaaggtatcgtattcattgggtaggcctttaaagatggcagcaatatgatctcgatcagagagaacctcacctacagatgctaacaagtcgacatgctgcttcactttgagaagataatcatttaagctcaaggtgcctttctttaatttctgcaatttggtctgaattccaagattttggaggaaaccttcagagtgtaatgttgttcaagagctttccagatctgtctggttgagttgcagcccaccattcttgtgagaagactttctgtcattgaagagagaagccaagaaaccagcaattgatcttgaacatcccaattaacgaactcaggattgagtcttcttgcagcttgattagcatcactgaggtattgtggaggtggaggagtatcttgaatgaatttcattaatcgatttccacgaattgtagcaagaatctgttgcttccagagaaggcaattttgatcatttaacttgattgagattgtgtggttgaagtacacagtggtatcatcttgttctttgcttcgatttcttgttactgcagcaggagcatcttattgtgtagggtgagaattcaagtttccaggatcaatggtggccatgttcgccagcaatggtgaccatggctctgataccatgttagaggtattaaacctcttaggcatgaaagacagaaagagaagaatgaagaagtaacagaacaaagtgagaaaaaggcagagaaagataagagagagaaagataactcttcattgattaagaatgaattacaagagtgtttatataagagcagcaacaaacattaactgtcacaacaaaccaatgacagctgtctaacaaccaaaccgaaataactaacgcaatagtaaatagaaaactaactatccctaacgtatataaatatatatgataacaaaattcatgaacaaaacaaagccctccactaccacgtgacttttgctaagcctaatgtttcttctcctctcatctcttcctttctttcttaatacatcaatgtaaattttgggcttaattttaaccatacataatataaacttggcccattctcattcatttaatagatgcaccaagatatgtatatatgttatctcttggacctcacaaaattgccaccatcatcaagtgatcttgtttgctttcctttttctttaatttcttctcatttaatttgttgcacatgaaatgattttcttttcattatttgacccgtttaaattccacacttctcaactaagccacctacaaaatcacacataattaaattgaactaattataaaatgagaaactaataatttgataaaacgttacaaaagttaactaaaactaatctataaataataaaattaatatgtatgcaaaattaagtaaaactaaataaaagtcactaaaatagattaaaactacttgagaacaaaactaatttaatggaaaaaaagagctaaataactctattttcatagagttagcagggccccgggtgctcaaaaactaacttgctcggattctaattctgatgcctcaaatgtgttcgtggtatgtctagttgatgacccaatgcatgctttgaccatttttcactaagtcggtctcagatctaaaatcctagtcgaggatgtcaacctgagcgcggtgtgaaacccgaggtgcccatgttggctttcgggttacaagttcgtgtgatttcatctcccagggattggattaggttgctccatgtcttcatggtacagaatactgaaagatagtgagttggattcaagttattgaagttcaaacttccattttagagttctcaaagtcaacctgggcccagggatagggacccctcctaggtcgacctactatgactcaggactacttaactccgagatgtcatctttcttgctacacgtccaacatttatgtccgcgtcctcaaggctactcttgatgtaaatattttctcccaggtcaaatttatacttgtgtgaggttgacttaatgacgtgaattaagtccgtttctctcaaaactactagctgggcatcaattttgacaatcttggataattgtttctattcttcgagcactcccactgagagtaggattttgaattcccattccttgttgaatagtggaatttgaaattttaagttaatgacaccttgggtgatttcttttgatttgagatattgtgatcatgcagacattggaatgtcaacatttaatctaatcttcagctatcatcctagcattgactctcttgtcacactgtctgtttatgtgaatattgatgtagtctttgtcttctcttaggttgtagcattgaagttctttaacattccctatgctgtagtttagcgaaggtagtcttgttcatctcctcggtttgatagcagaggagaccttcgtcaactccttaattttataacgtaggaagccttcaacatccccttggctttacaatggaggaggtctttaacatcccctcgaatttacagcggaggaggccttcatcatctcctcagcttcacaacaaaggaggtcttcattatctcctcaactttacagtggaggaggtcttcttgacgtctgccagtgttgtgttgaagcagtagatggtcgttctttggtcaattgaggatgtgaccaactcccaaattagtatacccaagataggggtgatgtcttccccgtcttgggtgcacattagaattattgtaggtgcggtctccaatttgtccttagtctttaaccttagaggtcttcaccatcccttctattgtattcacaacagaagagacctttttcgtccccttggatgtcttgatagcgaaagaggtcttctccttagatattatcacagcgcatgaggtcttcctcatccccttgcaatagtcgaggaggtcttcttggtgaatgtcaacaatatgttgtaaaatttgcattctactctttggttgccaaggagacggtcgataccagctgctgttgagaacttgacggacaggtggtagattagtgagatggctcggaggtcgttgggtgttgaccttccaaggagacttggtgtcgatcacttgattaaaacatttggtgatgcttgattattaaccaccacctttgttgccatgatgtttgaaatttcgtttacactgtctgagcttgactgctcttgcccctagcattgatttcttagtgactggggtgaaaaactttgaagtttgtatgttgaagctatctgctgtgagtgagatagaccactgttaaggtgtagtgagttattgcttgtgtgcttggtgctcaagcatgagctcactttgtgatcataagtgagatgaatcactgtcgatgagtagtgcggaaaaacccgccatatcttctgtatagggg

SEQ ID NO: 225034 - DNA, 4408 bp, Cannabis indica
gtatatgttgaatggtgtactgtattttaaattttgcattgtacaaagttttttaatctagtaaacatgttgcccttctttacttaacagcggtgcatggagacatctatctcctcttgatgtgtttattgtcggatatggggtaagaggtgatcactgagaaagtattatagccaaatttaaaatatttcaattgttttatataaataatatatatattttttttattttggggtgtgcaggtattaaacttcatgtggctaaagttcttcctgatttggcgctactttcgattttggtctctggtatgtcaatttaaagtacaatttacatcccttccttagttgtggccttctaacttgagctacttatttgaaaatttctgatgctctataatttgttcatggcaagtcttagcttttaatattgatttttgaaaacaccaaaagacaatgatgacgagtttcccatgttgcagatatgtgggattgaggcccctgagaacatgccaaggtgcatcaataattgccataatttggaaagcttttggaaaaactggcatgcttccttcaacaaatggcttgtgaggtaaagctttcaactcttgtgtcttttacctggacaactgcttcttttcatgacttattcttttcaataaataaaaataataccaggtacatctatattcctcttggcggatcacagaggaaactactcatcgtttgggtcatattcacattcgtcgcaatatggcatgatctagagtggtacttatatccttcatattgttttttcttattgataattacttgcaaacatagaagcagacaacctgtccaactcacaccttactgaactgctattgttgcctgttattaggaagctcctctcatgggcatggttgacgtgtttgttctttattccagaaatgttatttaaatcagcagcaaatgcatttcaggtaacccgtactttctttttcatttatatgtataccattttggatgcaaaaacatctaaggtcaaacctttccaagtgccaacagctacctaaaagccctgttttttataaatctatttgtgaaggcttgaaggaagggactgaaacgaattgtcaattttttccaatgtactagttttatggacattgactaatgataacaatttttgaatttttaatttattaaagattctggtggtgttggttggaagttgtttatgctaaatgcatgacattttggaagttgggctgttcatttgtctatgtaaaccagaattcaactgtataaaatttatggttcaacctagatatagtttaacttctctattgtattgaagaatcatacaaacactctttttttttctattggaagagatagatcatgtatttaaatagtaattggtgctgattaatctatttcataatgttatccatttctcttctttgatactttctttcttcatgttgttttatctttatgcatacaaatacatacacacatctatatataaatagttattattcttgcttatcaaatctttcaggcaacaaatgcttttagggtttttgttctccgtgaacttcgtgcagttgctggtgccgttacaatcacttgtctcatggttagtgcagtatattcttaaggctaaaacacttgccagattcaagtcttgttattcactaattcactatgcatttccttgatatttatcagtaaggtagttttgcatgaagtagttttcttctcttacaagtacatagaatttccgctttcattttatgattttggggggatattgctgaacaaaaaaaaaaaaaaaaaaaaaaatcttagtgctatgcaaaaaagctcccccattgagaagttttgttagtaatcattaatagaatttaaatgttgttaacatactcttgtttgcttttttacttcctaagtaagttgaacttttctgcatggtccttgaatagtaatgataataataacaataataaaaactgcaaatttatatataaatgctgtgacatgcatgctttgagtggatttgcttaaaagttacttcgatatgaaaatattgacagaaatggaactttgtagtttgtacagcacttacatgcttatgcttttgcttttgccttgctgtcatttatatgtatatcttgctgagtactttaccaggcgtatgcttttaatcaattttattgacaggagcattcatatattagctgcttctgaatctttgataaaggtcttcttctgcaatattgaattgctgccgaaatttgaattgtttagtgaatagttatggcctggactggaatgattttatttgttttgaggtataagaaaatcttatgacaaaacaaatcttatgttgaactagtactcaatgctgtggttatccaggttgcaaaccttgttggttttgttattggagcgtcgggcattaactggttgacttcacgatttctcgagaaagatggtatgtcataaccatacatttttttttctggtgtggcgagttcatgtataaaatgtaatgactgagctgaaccaatattcttttgtgcagggttacctgttctggttggaatgttcgtatcattttacgttggaaccaaggtgattagtttttcatttttttccccctaatcgccattaggagtctttatcatggagctttctcatgctttatggctattattatttgtatcaatgtgctgaagtttggtattttgcagcttatgttccatgtccaagatttcaagcaaagtaggcactgaattagttggtctatgaaaaggttcatttcattacatatctctttttacttgaatgatgatttgctccaaatccgggataggtgtcttctaaagaataatttattccttcaaaagaaaagacctgactttactgggcaagattttcctgagaaatgcttttgtcctacttggcatcgtaatcatacagaatcttaatgtagagggagatccaaatacaacactttactagagctctgcttcttcatcatttttattctcacatcttaatattccactattgttgccagtaggattttgcaattgttacacgaaaaaagttatatctttcagtgggtattgatttactactttcacacctgtaataggtaagtaaattttttgaaatattaaaataaacattaaaataggattcagttatcagctgccattattcctagtgaatcatttttatctttcttgcccaatgctgaacattatgcatttgactattttgcataggactagtactaaattccaagctgttggtgaccccccacccaaaaaaaaaaaaaaaaagaaaaattaaaaaagaaaataaaaaataaaaagaccaacttgaaaaattggagatgtgggtgttgttggggttccaaacggaccgagataaactgaaacagtaacacaatagaaagttgaaattatagcgtgagagtttcaacagtggcaggaggatgaacaaaaaggtgcaatagtaccctactcaactcatcagattgaagaaatgtcattgttcatattgaaattaacttcaaatgcttgcttccttcctccggaataactcgataatctgtcggggaccaaaggtacagtttggtgacatggcatggaccatggtggtgagttacttttgtttgtgaggatccatatcagggtacctccccaaaatgtgctctgccatgaagtcgtgccttgtcaaaattccaataattggatgtttctgcaatttgcaatgcatgagtgagagagagaaagagagtattaagcatagacagataggataggagaaaacatgcatacccctttactccttggcaccacgcacatgtgcctgagaccaagttggcgaaagagaacggcagctttggcaagtgacattgaatcaaccactgtgtatggagatgtgtttgtaataggatgaagatccacgtacatctccatctcctcctctttaatatcaatgtcctccaatttgattcctttccctgatcctgcttttgcaaaatcaaatgcagaaaacattccttgtatctctctaccacacataactctttccttggtaaagttcttccccctaagcaaaacaagcaaatgagacctcaacactagaccacacagctctgtagagtctgagaaaggtggttcatcaatcacaggaaacccattatgattcgttgtcctcagagcaaatagtatgtttcccaccttttcgatgccagaaaaggcgaccaatggacccgaaacaacattaccagcaaccaaatgcctcatgtaaggctcaggattagcctccatgtaaggcaatccctttattttcatgatttggtcatatactcctatgttgaagttatcagccacagttttagatat

SEQ ID NO: 225035 - DNA, 9877 bp, Cannabis indica
ctctctctctctatctatctttgaagcttttgtatcaatctccagtacagaaatggagcgaatcatggactttgttaagctcgaaccttgtggaatagtgtaggttcgaactttttttctaaactcttgaatcttctctcgggagggttttcgagctccgaagtgttgttttttttctatctatcgaacttgagcttatggcttgcttaagattgaatgttgtgaacttggatccggagaggaaaaggagcggtgggttgagaacgaagcaagctggtagaggatcgtgccggggaagttagttgctgagatacactgtttcggagaaatgtacggtctccggtagtgagctatacttgctttagtttttgattcatttcgcctttcttctgtctctccttttttcgtgtgtgagtttcgtcgttttagttacactcgatagccagtatttaagctccgaaatctccgtcagccatggggtatctgctgaaagagatgctcaagactctttgcggttcgaatcagtggtcttatgctgtgttctggaagatcggttgccaaaaccctaagtaagttgtagtatgagaaataatttagtatgctactgtaactgtttattcgcttaagttcttcttgagtaaaaggaatgagaagaagtggctcaacaagtgagttagattcaattgagtcatttctcaactgcaaaatatgaacgtttttagaaaattttccttttttattcactttttccctatgtttcctcataaaccaaacaaagtagatctgttgggtcatgatacctttttcattttctttaaagggtttttagggactagggtttgtgaatctttctggttataagatatgattcacatgtgaaaagtcttcaactattatcgttttctaaaattttatatcgtaatctgatttttgttgtttcctatttttggaatgttctgtcttgctttgttctgttttgccttgtagattcccagtcaaaaaagcatgttcgtataataggttcacaaaccactctgtgcctggctcactaaatttctctaaatctattggttcaggatttggccttccgtggttgattctattcagttttactttgttcttctttcaagtgggagaaaattttaatattttccactactggttaatttgatgaaaaaatcagttccttttgtctttgtctgtttggcttctaagaaatgcaattttaacaattttttatgctcgaattacttggaagaccaagaccacgtaggtacttcggaataatatataatattatttcactctacttggcactgcaatatttctaaacttttaatgtgtcctaaggttgaagaattttacttgttgacaggctactaatttgggaagaatatcactatgaatcctcaaattcttctctacctgcaagcatttgtggagctgggagtactgagctaccttttggagagtgggaaagactattgatgtcatctgaaacttgcccagctccgcttggaagtcaagcgggagatcaagtcttagcacttattaacaaaatgatgattagtaatcaggtcaatatagtgggtgaagggtatgcattttcattccatcttccattaccttgtaatttgcaaagaagtgtatgccttctggtatttatttaattattactttttgagatttcagaatagttgggcgagctgcatttactggaaaccatcaatggattctttctaatggttatgataaatatgtccatcctccggaggtattatcatcaatttttgacacttaaaaattctttcacactgtatcgttcattttgcagagcctagagagatgttctatatgtaataacaatataactcatgtttactgtaaatggttgcaaagaaaaagctacaattgtctgaattttattttctagctgcgtatttatgcaattctacaagttcataataggaattggatttgacacggtttataattttcctggcttctttcattcaggtcctaaatgagatgtgccaccaattttcagctggcatccaggtttgttgtctttataggccatctgctattttcgtttaatctttgtctttcttgtttagttacattactttgttttggtatgcagacagttgcagttattcctgtccttcctcacggcgttgttcaatttggttcattgctggctgtaagtaatgctttttcctctcaatccttggtatcattacaaaatggtaacactatcaatttcatatgtattttactaaaataaacacaagaatttactcgagcaatgtagaaatatgttctttgaaattgtggtgattatgctccttcatcttttctctaaataaatatggatgagattgacagattccatggaattgttttcggttgcaatcactctcagattaatttcaggatgtgaacttctatcgaactatgtattttttcctttttcttttctctataatttgaaatctttattattttgatatttttgaatctatgattattgctattgttctttttacatttttcgaagcgcagcctgattaatgagttgattcttgcattttcagattacagagaacataaaatttgtgaatgatgttaagagtttgattctgcaattgggatgtgtcagtggtgctcttttgtctgataactatttggtgaagaattctgctgagaaaatgggaatttctggtcatgccggactgttgtcgcatacaggtccgtcaggaatacacaagatggtaaactcttctggctatctggctgactgcaccagtcaacagagatactctttcaatgtttcaaaccttattggtcaatcacctgcatctcttcagaaagaagttgggaataatcatgaaaaaactgctctaagatatgaaactgctacagcaaatcagttgcctacttcccaaggtaacccttgtcaacccaacttttctccggtgataaaatcaaattcttctttcacggatcatttgaagggtagagtcgcaggtgctgaagtgatctcttcaaattcctgtgagcggtccaatcatcaggtttcctcatacaaaggaaggtctgtactcaataatcaatgtgggtttagccaatctagaaataagatcctacctggtgttagcatccacaatcaatttgatgacaataaacttgtgtcgaatagcaccagtacatctcatctgggaacaagtggaagcctacttattgatcacaacctaaattctgtaaatattccattgtctgatgaaagccaaataaatggtagaataaataattcttctgggtcagtatctggtacttgttcttacccaaacgtgaaggtaacagcagacgtcaaccattctatcacttgtcagtctttgattgagcttcaaaaggctgaaacattaaaaacagaggaggtttcttcttctgtgccagatcaattagttattggtcacaagtctaaaggctttgagagtgggcaactttccaaagatgtgaagattactggaaatagtttggctcgaaatgaacaaaagatggatatggattatgaactcttacaagcccttagaatcccatatttcaatgcaaatgagcatcccttttctagtgaccatttccctgattttgttcatgactgccagaatctaaatattaataatcagtctgcaggttctgggaatgccaaacttgaagaacaatatactcaaccttcatcaggagatgacttgtttgatattttgggtatggatttaaaaaacaagctacttaatggccatgggttggacaaagttatggaagatattcatcagtccacttcaacatttacaggctcaaaggatttgggttctagtttatttttggcaaaagatggactatcagacagtggtttatattctggttcgggtactgaccatcttcttgatgctgtggtatctagggcacagtcttctgccaagcaaatatcagaagataatttttcttgcaaaacatctttgacaaagatcagtagctcttcagtacctagtagttcactttcctatgggcgtggaaacttgtctaatcatatgccaggagaaaaatttcagcttcctgagcctctgaataaaccagggatggtaaaaacaagttcttttaaatctgggtgtagcagggatgacacaggaaactgttcccagacttctggttatggatcacaaatcagttcctgggttgaacaaggcagttctatgaaacatgatagtagcgtttcaaccgcctattctaagaggcctgatgaaattggaaaatccagccgcaaaaggcttaagcctggagagaaccctagacccagacccaaagatcgccagatgattcaggatcgtgtgaaagagttgcgagagattgtaccaaatggggcaaaagtaaattttattttcttttactctactttattcatctttattataatttattttgagtgtgctaattttttcatttcgatcaattatgtgattttgcagtgtagcatagatgcattgcttgaacgcactatcaagcatatgctcttcctgcaaagtgtcacaaaacatgctgacaagctaaagcaaactggggagtctaaggttagcactatatatatatttatacttgttttcccttctaatgctgtgcttattttactggggtactttctttatttgtgggagcatgcttgtacttgttgtttattgggcttttgggaagagtggcaactaataagctgtttgctcaatcatctttgatgcctaatgaaattgagaaatagctttgcttgagcagactaggttcatcagacaaaataacaaaaatatgaatattgttagcagaaaaatatcatgctccttctacacatatctgaaagttgaaacattctgcaaatatgtaaatgttgacctggttgtgcagattattaacaaggagggaggattggttctaaaagacaactttgaaggaggagcaacatgggcttttgaagttggctcacaatctatggtctgcccaatcatagtcgaggatctaaatccccctcgtcagatgcttgtagaggtggtgatttttttatttggtttaatattaaaattgtatcttgtatcttcattttttcttaaatctttttaccgtgtcgtgtcctggcagatgctttgtgaagagcgaggtttctttctagaaatagctgatttaatcagagggatgggtttgaccatcttgaaaggggtaatggaagcacgcaatgataaaatatgggctcgatttgcaatagaggtaaaatttcccagttgatgaagatctttaaatgccatctttgcgatgctggtcacttacagaatattgtaatgcaggcaaatcgagatgttacaaggatggaaatatttatgtcgttggttcagcttttggagcaaaccataaaaggtggtggtgtatcatcaactaatgccattgaaaacaacggtttgatggtgcatgaatccattccccaagctacccctgtagttgtgactggtaggtctggtagtttgcaataaaccaaccacctgtgctgttttgtagtttcttggtctggatatgttgagagcaagagcagttttttgcttgccatgactagcataagttccagcccgaggtttttcaggttctaacttcaactaactttgtctccccacaaaccaattcatgactgatctcacttcaagcgtgtggagatttgttaaattagcgacgaagaaaagctccccgaaaatttcacatcatgtttcatgttcggtctctagatatgccatatgttttgatcatctacctagcagccattgcaggcagttttttccactttaatgtatttgatatagacatgaaagggttgcaggatagtgggtgtgggctatgttgaaaaaagaaaatgtatagagagaaaatgggaagtgtaatttaagaagtgtctttggattctcatttggatttctattggggtattttagtctttgtaacattttataaaactcttgcaatgatatgaatgtttctttcaatctcctgttttgttttttttccagcaaaagaaaaacaagaaaatcttttgtttgattttgatttggattggtgtttgtttcactgatagtgtgtagttatgagaggctgcccaagtcaaaaatatagatttgctttagtttcagactgactaaagtgcgtagctgaacttggaatttggaacactatcatagtaacatattgaaagcgagacatgtgataatgagacaaccattaatgtagggctcagacatttgaagctatatactcattttgctcatcattttctttttgggtaagattacaaaatatttaagtgtgtttctggagaagttgaaactttttctttttaactgttgatatgttaatttattacaagcccacctttaaaataaagggtaaatactattttagaccttgtgttttgtaaaagttaccaattggaccttctgttttgttaaatgataaaatggatcctgtaatttttaaaatggtacaaatagaatactgaactaattttttatcaaaataaaatttaataataatccgatctaaaggtgttatgataaaactgtttacattttctgtatctattcgtgttaggaattgtcttcaagttggttatattaaaaaaaagttgtcaaaaattaagctcaaggtactatttttaccattttgaaaaatacaaggtttattttgtaatttaacaaaatagaaagtccaattggtaacttttacaaaatatagggtctaaaatattatttatatgatgttaattgtttaaataaaccttgtttgtgaataaaacacgtgaaaaatatatgaaaatgactggtatataagctccaattatcgacgaccataaaaagaaaaataataatattttttttaaaaaaaagtaaagaaaaaaaataagaaaaggacaaaatcatttacgctttatttatagttctcacttggatcggttattaatggataaatacagttctttttttggccaggattgaagaacgaagttcaaacatgcttaatttttttttttgtttgtttttggtttaagcttttgtcgatttttatgcaattgcgtattcaacttgtactaatgttaccaattggtaccaagtatgtctgtgtgtttttttttaattgattggtaccaaaaatgctaattgaatatttgaacatttttcttcagataaaatatttgaacaattttattattactatacatatataaagaccgaaaggataacgtaaagttgaagggaaggaaggcaaaagtggcaaaaacatcattttcaaggaacacgcctacaaaacaaaaacatatgaagagaagatccaaggtagcatcatcagcaccacatcattattatcatgatcgaaataagggcttgtcatcaacttgtcccttggctctatatgcataagctattctcaatacctactatatataataatactctactcacactttaaataaacccattcaatttgttttgtcttggtccccctcccccccatcctcttcacttatatacttttgggttttacttcaaattttattcactataattatacatttattattggagtcataataaatatacatatgtaattaatttcattcatatagctaaaatagtgtgtggtactcaactcataatacctataattaagattaatcatataagataatatataattaagtgtacaaattgaaaaagtatgcccatcatgattatgtactataatatactatgaaatgagtagtgcattttataattgtagagggctttaaaaaaaattattgaatattttgagttataaagtagaaaatatgtaaaaaaacaatatgaagaagcaatcataaaaatatttccatcagcttctttatacaacttcattttaaagaatgggtttgttctctaaatttgctctacttgtagcgtaggggaaaatgattcttgaaaacttttttttttgttggaaagggattcgaactttgatcttctctttgtaaagagaggtgtgaaactacttagactatacctatggttataaccactcttcaaaactttttcaattaatattttgttgtttacttttttcaaaattatttatttttttttataattttaaaaaaattaacattttcaaatataatatattttttttttatttttttcaagatacttcaaatcttttttctgtcctggatccaaatgttcggtcatttttgaatgatgcttgcaatccgtatttcctttttaatagtgaactttcttgtaagaactagtattttctatagtgacaaattatgttcagttgcgtctggagtttgtggtgttttgtctgaagtttatatagttagtgatagttcacgtcagcaaagatattttggattttaattgttcagatggtaacagttgtctatttcagagtttatagtttagttgagtataaatacaacttcttgttattgtattgactaacctttttgattggacattagggattatatttctttcttcttgttttgcccttgtgttccatgataggtctgaatcttgagcttggtggtattaatccaaagttacatatcagagcttaatggtgttgagttcagactaaagggatttcaataacgtctttatcaccagatctaaagggagttcagattgaagaaaagtgttgaagagagctcatcattcacacaaggggatcttgtgtctccaatcaaggatcttggttggtttggatatagattcattgtattttgtaaaagagagtattgtttacaatattatttacggttggtatttgtaagatacatctttgaatatagtgaaatttattaccttggtttggggaacccaagcactagccgcctagaatgagtttctagggcaggtgaagcttgtaaatttctaatgttgaatctttgattttgttttttatattcaagcataaatcaagataaaattaatccaaatataaaaaaagataggttagacaaaacttagggtttactctcctagagcttgtttggttcctaagattcctaatggtcgtgagaactatagagtatggtgtcgatccatgacagtggcattgatcataagaaacaagttcagatttgtcaatgggaagcttcctgctcctgatgaagacgatgatgactttgagctgtagaatcgatgtaatagtactgtgatatccgtgattcttcatgctgtatcaaatgatattgctaagcatttcatgtaaatggagaatgctacaacaatctggataaatcttgaggagtgattttatcaaaaaatgctcataaagttttcaaagcaataagaaccaaacaatcacttacacaagaatacaacagtgttacaaaatacttcactcatcttaagtctatatgggattttattcaagagtatcgaccataatcggcttgtacttatggtattatgaaaacaattcaagagtatcaagatgaggatcgagttctagaatttctagttggcctgaatgaatcttataatggagctagatctcagacattgatgcaagatccacttccagatatcaataaagcatatgcatctgtgttaggctaaaattagtctaagtttcgggacatattttcggttagttttcattctttgtttctagttttaggactattttacgcttgattcttttgttttaggtccccgggtgtttaaagaaagtatttacaagaattgaggacaagtagtgaaagaattgagaagaaaaaccaaaaaaatatgttgctgccaaatcccgt

SEQ ID NO: 225036 - DNA, 5627 bp, Cannabis indica
ccatctgggtatatcattttttgtattttctagcgtgatattgtttgaagaagtagttttcacctttctgaaccttcatggtttttataatcttcacactaagtctaattttcagttgttcttagtatgattctgtatcagaaaaaatgtacttcgcttagaaggtagcattgctttagaatgaagaaatgtctcaaacccagaagatgtttcttcatttttgggattcatttgaaatttagattttacctaaaaaaaaataatattaatgaaaagaacagggaaataaaataaagtaaaaacatttctctaaattttttaatagatattttcaaaaatatctattcattttccagtaaaattaatttcttttaaatgttattaacttttttttttttaaaaaaattcattttcttttcgtccaaaaatatgagggttaagctttagggatatcttttgtcatatggctgaatgaaccaataggatttatcttttacacatgttgtcacgggtcagctttggttgttgctaatatatggatttgaagtttcattttagcgatctttaccttgtgtctgactagctaatgaagaatacaagatgatacattatttaagatagctcaatatcgtatgtagtatatgcccttaaccatgtttgtatggagatttaaattgttgaatgatttgaatcaatttggccgatgtactctacatagtatttgaaaatggttcttgacatgtttaggttggttaatacattaaagtcaccattctatcacaattgtatgagtttaattttgttgttttcactttcctacattttttaagatcatttaatgccatatcttctctaaagatatcttaacttctcgtatcaatgaacatcttttagctttccatccggatgaagtgaggcaactaccctgatggcagatttaccaggctatgttagggcctgcttgcatactggtcaacttgcttttttggcaattttggtctccggagggatcgtgttacaaatattggttagtaatgctgtttcttgttgattagtttaatgatcaagttcggtgttattgaagatgtataattttcatttactgcaaagtcttcctgtttctcaattatcatttccttggcaggcatgtgctttgtacaataactggtggccaatgctatctcgtaagtaacaaaaccctttgaagcttgttgaatatgcatatctgcacctatttggttcatggaaatgtctcaaattaaatgcataaactctaattggaacatccatgtgtttccttgtcaatgtgtctgaactgaaaaattattaacttcttggatgttgataagtagtttataataaggttgatacctgtattttatcgaaatactgacttagtaacttatgttttgaataatactcacctttagtccctaaactgaaatttgatccaaaatatttattaatatggctagactatcctcaattatacggataccaaatgaatatttacccgagttttttaaaagtattttgagaatattgggaattaggaaaattattttaatttagaaagtattttctcaggtctgtttggagaaactgtgaaatcttaccattttagagagaaaaataaaatcttttgaattagcaaatgattatctaaaagtacattataattctataagctgaaaacagttaaaatagagcttaaccaaatgagactgaaatagacaaatgacatgtaatgtaattttgttggggaagcgtgttgcgaaactgtgtttgtgcttgctaaagtttgtttgtcattgttccaaccgagttcagggtagtaaatggttcttaacccataaacagatgcatttaagagtttctttcaacaagttgtttcagttgcattaacttgttttagttgaggataatgtaaattttggactattttgttttttttttttgtttccgaggaagattcatgtacagaatatcattttttgcatttgtcttgcagttataatgtatgtgcttctccccatgccattactgttttttgctggatctgatggcagtgctctattttctgaatctgacaataggttggtctttatttttccttcaaactatactttacttttccatctattatgaatacaaatattgtttccttactctttaacaaatcagctgggtgaatgctaccaagttcttgaccggagcttcatcagtcggaagtattgcaataccggctatcttaaagcatgctggtgtaattggttggggcgcaatggcaatggagttttcatccttcttcatatttgtacttgccataatgtgttacattcgtatgaatgatgaagacaattattacagtgccatctgagatgtaaccctacaaagtgcagcaacaactgaaaaaaaaaaggaaaataaaaaaaaaactgctacatgtgtgcaaagatatattatgattgtttatattacaattcttgtgtaaagaaaatgttggttcacaatgtgtgaggcttggtttccttctcccctatacgattgctacttatataatacatcttattcttttctattaaagttttctttgcgagatgctgattgtattgagaaacttactaataaaaatgaacatagattgaactcattttgtctagcaaaaataaaacttagaattgtaatctttgctgcaaggttatgaaaggaattcaactgttataacgattgtaaacgtagtaatgattttatgatgataacagtgtcaaaacattatacatgcctacttgtaataaagtcattttccttgtcagccatttaatcatagtactcaaagaatagaatttgccaaagaatgtaaagaaagaagaagttgaatggtctcagaagttgtaatagtggaaattgtatagaatcttatgacatctcttgatggttattaggtgtaaaaattgtttgtgtaaattgaagggtggtaggaaaacacttgcagactgtggacagcagcaattctagccattttctgggttgtttgcgcagaaagaaatggaagaatatttgaagaaacaacgaatgaaacagaagctctatgggagaaggaaaaattctgagttgcatcttgggggtttataagagtaacggctttgagggctgtcgcttatacagcatactaatccaaatgcttcgattctatttctaggtttctgtgttttgtgctgaattaagctaatacgtattgtaacaaattgttcattttatgcataactttgtaataatggattttgctttgttaccacggcttttctcccccataattaaggctgtatagcattgaaaaacataataatattaaattctaggatccaagttatttgcagaaagttaagcaggcaaaaatgcccaagttacaagattgtgacttgtgggcagcaaaatcacactagctgctgattttaatcaaatcatagtgctgaagcgcggccattaaacgaatcaactcaatcttcgcatagctgctgtgccctttgttatcctatatgttgcgaatgatgaccatgtttatttatttctcttgtataaagaaaaccagagcaactaatgtacagcataaactcctataatttgcctctcttaatacatcactacttctaaaaataattacaatttctgccaaaagaaacagcaatagcctaagcctatatgcattatgcgaagtctgtaaaataataaaagctacaatgtttcctttcactgttactcatccactttctaaactttattacgagaggcaacccagaaacctgatctcaactcaagccaaacaaatggtaaggctgcattgaattagattaaacactcaaaatcaaacaaaattatgcaccaaacatttttttaagtcaagaataaggaagttattccagcaaattcttcaaacccaaaaagatagattatactcaaaaccaaagattttccatgaaaccatcatgatcaactttatcctggcccaatagttttacaagatgttctactgcttattcaattgctaattgtccaatttcaataactgcatcagtttcaatgatatatttcaaatcaattggatataaaagcattgtaaaactccaatttcaaccaacattacatcttacttctctctctaagtcacttttcttttttccttctcaatttaaacaagaaaaaccccttttttcctaaatttctccaaaacaaagacactgacacacactcggcttacacagaagtaggtgaagtcgctcagaagaccacgcgaaattgcggagcatcagagccactcgccggtaagatctcccaacggcaggggtcgagttcgtcggagacgggacagaaaccagcgagcgtgacgttgtcggcggtagcggcgacagaaccaaactcgaagaccgtcacattctctttccgaggaacctccacagcaccgttcataccagggacctccaccgccttagggttagggttagggttagggttaggacttgaagcttgggcggctttgtcattgttgttgttatcaggttgggattgtttgttgtttcctttccaccatgatagaatccccatgttgccaatggtaaaataaacaactttcttgttccaattttctattgtgagataatatagtttttttaaaaaataaaaagaaacgaaaaaaagataaatggttatctataggattgtcttaagaatattctcaaattttcacttaaaattcacttcctatatgagattttttctattattattactagggaactaagtcgcgcttcgcgcgggttggaccctattttagtattttttttaaatgattaagtgatatagtttgaaatataatactttaatgtgtgtatattataaataaagaaacacttatgaaattagaaatataatttaatatttttaaatattagaaaggtagtgaaattaacaaattaaataaaatcgcatatcattataataaattagagagaaatactaaaagatacaagtggtgcctagtactcaccttcgtatcaatctcgctattggtgcaattaggtatcgagttcccaataacttaatataataatttgtaaagagtattgctaatcaatcgcaaatcaatgcatataaaaatttgctagacaccaatgccttatagcaatgcactaaattaaatttaaaaaaaaaaactttttaagtttaataaacggggtgtgtaaacaaaaattgaatgttttttccacaaatgtgaatgtaggatataaaataggtcacacaatattttttacttttgaaaactgaaaatgagagattatataaaaatgttggtgattgaatttttcaatataaatattagataaaaggattaatttgaacaaattataagaatgtaaaatttatactttaaattgtaatgctgaaaaaaaatgtaaaaatatttttgacttttgagttttttaaattttgaaaactttttcaattacaaatatttaagtaggggtgcacacgggtcggttttcgggttttcgggccatcggattcgggttttcgggtatcgagtattgtaaatctacaaccaaacccggtgttcgggtttacgggtgtat

SEQ ID NO: 225037 - DNA, 1804 bp, Cannabis indica
ggatgcgtgtgagtgaggacaaagcatgctgaaaatactcgtgttggtctgtagggtcagtcgtcagtccatgaagcagccagagtgacgtactcgtgtataagagccatgattccgtgggtgtaagggcccaatggaagcttgaagcggggacgttacatatatacacaaagatgcgacgctaaaaattaaaacaaagtataaaattgaaaagccacttacaaaaaagcaattctcaaagcataaaccatctatcatacaaactgccactgcaaaaattcaaactaaaaggaaaatttactgacacaaaagctatgatatgatgatgatgaacttaccctattacttagattagttcctaaatatgcatggcataaaacgaactgggggagtagtgttggaggggaacaagtttaactaaccataacatggcctaataagttaaaaaggaaaaaagaaacccattagattgatacgacgcaagtccattaaatagaaaaaaataaatggcatggaattttagggagaacaacctagaagattattgaaaataggccataaagacaaaataaaaccagaacttattttggataagatcaaagaaggctatagctcgaccgaaactgagataaactctaacttaggtcatcctgagatagatcatatttgaaacctttccgagatgagatctaatcaaatattaatcgagatacgattaccccagatttacttgaagggaggaatagtagtactcagggtaatccgaggtagactaatttataaccgtgtcaagataaaatctattcttatatcaactgagacgcaataaatttagaatcaataattgccttgtttagaccaatccaggccgaaataggatatatctctgaattgtcaaagtgaatcaaggacaagattttgattgtaactcagcttaataaaaaaaaaaataagcaatagataccaaagatcaaaaaaagagtatatcaaagttcaggcattgtcgagataagataaaaatagtattaagccgtgacaatccacaacccaaatttataaaaaaaaaaaacaacaaataaaattcaagcaaaacaaaattaacttaaaaagagataaccacatttacaaaagctaattattaaaaaattaacaactcataagtgcacggtaatcttgacattaaagagtgacaagacaattatgcatgcaaagaacgtaaaatataaacaatgaaagtgattcatgtaagggcaccagaaagaaggaagtattataaacttgaagaaaaaaattctactaaaaaataattgactgaataatttgaccggaagaaaaattaccatttttgatgaaacaatagagatttaaaatttgtttttaaaatgaaaacaatagatcaaacaaagagtatatcaaagttcaagcattgtcgacacaagataaaaatattattaagccgagacagttcacaactcaaatttataaaaaacaacgtacaaaattcaagcaaaacaaaattaacttaaaaggagataatcacatttacaaaagctaattattaaaaaattgacaattcataggtgcacggtaatcttgacattaaagagtgacaaaacaactatgcatgcaaagaacgtaaaatatgaaaatgaaagagattcatgtaggggcaccaggaagaaggaagtattataaacttgaagagaaaaattctactaaaacataattgactgaataatttgatcataaagaaaaaattaccatttttgatgaaaactgaaaaaccgtatttttgcaaatgtca

SEQ ID NO: 225038 - DNA, 4839 bp, Cannabis indica
tctctatagaatttgatcgtcaagaatataaatgactctttctctcttgatctgtttccattatttcaacgctatgatgcaaagacatcaagttataataatcgatgccaatacttgtggactctaaagtcaactcgtggatcattgtagaccaaaagccgataatcaattgcgttgcctcatatttaacctctacgaacttgagttaatcttctttcaacaacgtaaaaaaaacttgagttaatcaaagtcataattaaactatgctattgttttaagccgctaaattaaagggaccaaagtcagactacttaagagcactttttcattttttacccccctacaaaaggactatcatttcatcgttataattagttaatttaggcactgacttaattggttacaaatataattgcatttgcattgttctccccttgttcattgtaacggaaaatgtcatgatttctcttgtaccaacgttcagattataggctatgggccaatgattgagattcttagtaaacataacactatggcctatgggccatcaccgactacagccgtataagctcaccttcatatctggaggcccacaacataaaaaggcccaagttcattttcctgcagagagtatgacctttcccatgaataaaatgagatgcaaaacataaagttggatcaaaatggaccactccttggaggagagaactataatcaaagatattcaatttttcaacgaaaatcaaacattttcttgcaaaacaatctttcaactataatcaaacaatgttagctccttcacaatccactctggagaataaagcctttcaaaaaaaaaattcaattttgtttcctctatgatttatcattgctgtgcatgcttccaagtctaatttattacttgaggatggattgtataatcgaaaatcaaaaattacttcagaagttcctaaaaacacaaaaagatctactaattgtattcaaatcccattaaggcttccaacagtagcgtaaaacacaacaagaaacagagcttccttcatcttgattttcaaaagacgggcatctaaactttgatatcttaagaaaaaccagtccaagctaacggcagatatatgctaagctgtaattcttgctctgccttttgcaattcttcgagcaatgactctccgtccgcccttggttgccttgctgttcatgttagaaaagatatcgttattaacaaagtactctcaatatactattaaatggatcaaaacaactaacaaagttacaccaaaagcaaacttgttcagctgatctaataggcaaaaccaactttaaaagttgtgatgggataagaatttagtaacacccccatctgccaaaataaatatgaaccatctaacaaagtataagtacatacatgcaatacaagtatagaacatgcagtcataagctaaaacggtcatgtgggcatctatctccctaataaagaaaacaaccatcactgccatataaattttgcacttttacaccaagacctaaagagagatagagaagggtaccgagaaaagaatccatgctttctctttcgccggattgtgctaggttggaatgtccgcttgggaaataagagcattggctcttttgacaaagaatcatctcctgaaaaacaaaaacaaaacagaacaaaaattctaagtgaaaattgggtaaaagaatcacaaaagcgactatttggacaccatagaaagaatagcatcaattttttcagtgacgcaacagcaaccccaaattctcatgttaactccatctatggaagcatagaatagatttcggggtccctagtttttgcttatattttgaaataatggaaacaatttgtcactctcaagagaaagaactaatcatagtcttcatgtctacataaaataagttttgtatctaatgctgttgaataccatctttaattctagttaatcttacagaatatacaatctttgccaataaaacgacagtaacagggccttaatccctggtgcctaatccaatctattaaccacatgaataattattgtttgtaaaataaacagattctaaagataatgacaacgaatcccacaagcatgtattgaaaactgattatttccctatgaatattatgcgctggttctttttgggtcaaaatttgcttacgaataacatatacccaaaatgtagcataattgaaagtgtttatctaaaacttgtaaataaataaaaaatcacattttcccgagaaccaaacaagtacgaaacagagagacgagagaaagtaccgtcgggtagaaagaattcgagagaaggaaggccagaagggtacagaaaaccctcattataaacattccttatcgattcggcgtcattttgctgcagatggaggggtgagtagaaattagatagcgacgggaacaccttgggagtgatatcaaggccatgagtagaaataggagaattcgaatgcgtcttttgggccagtggaacgaatggcttgttcaacaatcggttcaccagaaaagatcccgtccgaattaaggttttggacgccatttttgaagctaattgagctaatcactaaaaccctagtaggagactcaagagttttctcttccgagggaggggtggtcagatgggtcgggtaagagtccccaaagtattggttattgtcacaactgtccccagatctttaattgttttacattttagcccctaattttcatttgttatgcaaccatgcattaaacataagtaaaagaaaaattctaatgatcaacacatcacaaaaattaactaggctagctcaagtggccataggtggagtatgtgtattggagatcttgagtccgtagtaaaatatgattgtaatatataaacagttaaatcaaaaaaaaagaaaaaaaaaacacatcacaaaaattttagcccctaatttgtacgcttcccctaaaaaatgtttaagctatgtctatttggctacattatgtacattgtgtttcgaaacaccctttgaaacacatcaccctctaatcctctacataaaaaataaagttaaaatgaacaaaatttgattttatgcatgaattatgatatatacaacacacaacactaattattgatatggtataattttttattttttttttcaattaaagtttgacaaaaagatacatatattcattcatactttaaaatatgatagaataacttttatattttatttcctaaaagtataaacataatatttcacatatggaacttaaattgatcacaaaagttcaaacatggtatttcgagatggtaaaaagattgatttataattatttttattattattatttaatatgagaaattagaaaaaggtttgatcttgcagtgttaagtttagcctgctatgcatgcttatgtatcatctaaggaagacgattcttttgttgaataaggttaagaatgggatatattctttcttcaacatccagaactctaaacttccagttccaagtcattcttcagaatccaaaccaaaacctctagactatacttcaaattatttgattacttttactttatcatatatgtactgaatttctaaatcttaaccttactgataaacctattaaatggtaactgttcacggacaaacggcaccgtttaagccctttccaagatcaaactcacaacaagaaactagtgagtctcaaaatcaccttgtgacaaaagtattttgtttatttcagcttttactaaatcaccagttacaaacttacaaatacacaaacccagtgttactatattaaattaagattggaaacggttccattacattacaagcagttttgctagtaacaacaaaacaaactggcactactaaaacacgatgccaaataagattacaggaagcatttgctccaccatcgaatcgaaatataagagggttaaccaactgaaacaatggacacaaccaacctccaagactctaaatttaattttaaaaaaggggagaaaaggacatctctagaaggaaagtaaaaatgtggaaaccataatcaacttcttagtcttaatcagagactagaaatgagaccttaataatagtaagaaagaaaagaaatgaaacgaaaaaagaatgtcagaactccaaatgtacacaaaactcattccaactggagaccacttattgctcttgctgaagcagagctgaagaaatccaatccgaggcagctgtgtgaatttccaactcgatatttggagaaggagagagaggagttattgaaacctgttatacacaaatcaaccaccagctctgagtagttgcaaaaacattatctagatttaagacaatgcaaatttgagattgagaccaataggaaatgaccctgagaacttacaaatccgctttcaactgctctgaaatccagttcctcatccatgtcattctgctccttgtcaaggaactgcaaacaagtatatcttcttgtattagttttattgttttatagcaacaataaatagaagattctagcagtacatttctaatgtgttgtacacaaagataataatgacaacggcaccaatatcaccaagcaacattaacctcaagcaattagatgttattcatcaagttgtctcacaatcgtttcgttttcctgattttctacattacctctagcctaaaaaactttttgacccgctgagactctgttttacgtgcagcaccagtggactcaatctccacattcttcttttgtgttgccaaccggcgagcagccccctgataaaagaatacaatccattattgaaaaatggagacgaacaaaaatt

SEQ ID NO: 225039 - DNA, 2385 bp, Cannabis indica
aaaaattaaaaataaaaaaaaaagtgtaaaggaaaaaaactattaaagagtttattttttttttttttttttttaatttctttactattttttctttttctattaaaatcccaacctccaaacatactcacttagctgtacatctgaaaaaaaaaatataagaaaattttctaggagaaaaaaaaaaattacaagccccacaactttaattcatccatgaaatctatctagtaattataatagtgtaaccgtgcccacaaaatgaactaattaatggtgtttaagatttagttgatctaatttaatatgcacaatctaattcttatttgtgatgattgaaaattgaatatattataaaaaattattaattattcgcacaacgagattttcactattttctctcattttacatgctatttttttttcttatcttaaataaataaataaagaaaagttactaaatgtatttttgccttttgtttttaaaattaagaaataaaaatagtttaaaacatatttttatttttcaaaaacaaaaatttaaaaatctaataaacacaatttttttttactaaacacaatgtaactgatctaaagtaataccaatcccattcatatattttgaagattggattgattaattacgagtattgtaatattagtctagattttctctcctcacttcttcgaaaacctagccgtcactgagtgagaattgtatttttctgaccagaccccaccaaccctcttatgaggctgtgtgtggctctggttgagttgttgatctcgtatattagatatctctaagttaactcttgtcctcttcaattgggttgtattttgttctttgagttgttctctcacatggtttgaatcctagtaggttctaagatggttgggtggggatgcgattgtggcggtttgccttcaaagtttttcccattttctcattatgtacgaagggtgtttctttcggtggtgggaccggctaggggcgttcataaaaaatgaaactaaccatcaaactgactagaccgtaacctaatttagcagtcagttttgattacttttttgacatggtggtcagtttcagtttttgaaaaaaaatagtgaaaatgcaaaaaactaccaaaaataaaaaaatgctaaaaactgccaaaatcgtgtggtcgcttttggaaggttataatttctcaacgtaggttacggttttcattgaaaaaaaatcgtcactgactggtcagttataaaattagtaaaaatcgaccataactgacctaatttcacccctaggaccgacgtcttagggttgtcttctacagtagggttgtcggttagcaaacggcctgggggcggtggtctattattgaggggcttcgttctggtgttgtgtgttctcggagcaggggccatagatttaacacagtctagtgatgagtgtttgagttttgtgttgggtttaacgagttctgatatgtgtggtgttgtgctaatttttgagtgtctgcattatattattttggtcaatttagtttttttttttattttattttataatattagttattagactaatgaagtttggtattgtcctagtgaaagatgaaagttttgtctccttttagtttatcggtgtctcattgatggatctaaattgctttggcaatgacgttttggtctttttctttggtcgtcaaatttgggagattctcacatttttaatgaccctttattatgtgattcaatctttgacgattgagtatcgcaatatagttggtcgtgttatttcttttatttatgatttaaataatagagttgttatgttcaaatttttattgaaagattattagttgataatcattgataggtgaactatcaaattgattcatttaatttggagacctaatatacttcacattttttttatgcttgttttctttaatgtaaaccatttggtatataaacctatttttgttaattttgctctttgagttatattcatataatgtattttgtccaatttacctattagtggatatttcaattttctttctctctctaataaaaagattagattgattttaaagtagagaacgaattaataggtttaaaatataaaatttgctttacaccaagcagtggcagtgcaaactgcttatcttatagcatctctaatggagtgctaaaaatgtggtgtattgctatattttaacacatctaaaaaaaactataccccaatgatattctaaaaagtgtgctaaatttagcacatggtaaaagttgtgccaaatttgacacaagatataacattgtgccaaatttagcacacaataaatactatttttttttattactataataccattaattattataattcattga

SEQ ID NO: 225040 - DNA, 2989 bp, Cannabis indica
taaaaaaagtaaactcttaaaattttttcatgttttgggtaatttttactttaatttttatatggctttcatatttagttctctcgttacacacttctctaagtcaggattttataattttatttttacaaaaatactcatcttttttattatttttatatttttacggtcatattttattacatttttaatgtactaaatttttaaacatactattttaaaattttaaaatcataaaatattacattttagtaaaactaaaaagtaactgtaaaacaccttaataatatgaaaataattataaaataacaaaaagacaactacaaaacaacataacaaaaaaaagacatcgacctcgttataatatgcaaaaaaaaatcaagtcttcagcatgtatttgtattacagaattattttttttttatttagttttgacaatttgatttatctttttataatactatattattttttgcataaaatttgttgttacaacttcatactttcaactcttttctttcctcttcatttttgagttagtgacagttaaaatgataatttatttttaaaagttaaataaatagttacattaataatataaatagatagttacattaataatataataggtaatatataattaaaataaaatatacttttaatatgtcaatatctactaatgcatattgtgttaattgaaaaaataaaaaaaaaaatatatatcattgtaactttgaaaaaatgtgtcaaaaaaataaactaaatatatgtatctacatctacaaagcaacacacatacaacaaaaaaaaaaatgtcagaaataaactaaaaatatgtaccataaacaatacacatgaataaaaaaaactaaaaaaactgtggaataaaaaaaatattctaaaaaaccacttaaatacaacataatgttgacccaaactcttaagcctccttagtttgatgattaataaatatttgattattacttatcactaatactttgttgattttatagcacaaattaaagacaattaagtatttttttaaaaaaagcaaaattaaaaaatggtatttttactaaaattctcaaaagtgacccgaagtggattccaagactcaaggaactcaataaaagacttcataaaggtttatttacattttctagtcttgtacagtgattttcaagtccatacttaaaaagttttacgtacgaattttagcccactaacttgtgtaacaagttattttacaaagtgatatttaaaatttaaattgatttttaagatctcatatcatttaactaagagaacaaaattgtaatttttaaaattggataaacgagtaaaagttatacacattttagtttgaaataatgtaaaattcgctactgtaagccattagaaattttgtttggatctcaaaattctagttataaccaatccagaattccgaatcacggcagaatgctacacatacaagctcacttaattatgagttgtacagtgtcttaattatatttacacctacaacggtcaaaaggatggtaagtccaaatgcatgatggctcatttgaattagcccacaaaagtaagttgggtagcccactactaacaagtctaacttcacaatggtcatgtacgcaacccatgtgccataccactctaagacaattataactaatcccacttttcttgatcgtggattgatatccttgaaaaagtgggtgtttagcccacaacgataggataacatttttgaatcatagagtgaaataacgattctacttttttactgaactacgatagaatttgatcccttttgtaaaggtatttaggaaatttaagaggagatcccaaactatttacatagactacaccctaaactcaagctcaatcccaaacttctcactcactcactgctcaaaccgccatctattgtctctagccaacgcaaaaaagttctatacgactgttggcggtccgtttgatgagtgcacatttgtatactcattcctagtcaattattagttaaattagtatttatttcttaaattttgtataaatttaatgtgttttctatagtgcgcagtcttatacataaagtgatgaaattatgacatattagaagtgaaccgtacataattgagcgaagtgccaaaatcaaggagcaactgaatcgagaaacaagataaagtgcaaaaaagttagtgcttggtgctatagcgcaaggtgtaggtgctatagcgcaggtctgggaaaaaaatattgcaataaaaaaaagataattttagcacgtggttattttgagatatttctcttactctatagctcagcacctttttaaaaaaaaaaataaatcataattctaaggaagttcatctatctttgttggcctatataaagaagaatgtaaatcggatggagggacgactggagagataaaaacaagcaactttgagattaaaaaatacattgaagagcgagagagaagacattcaaagcaatcatcatcaactttcatcaatagagtttttttcttcttcttatatatccttttgtttagttatttaattatgaagatgattattgtagttattatgtttgtgattatgaactaaatactaattctaaagtgttgatggaactattttagattatgaatttaagtttttagattattctcatatttattcttgctatttgtttatgcaattttgtgctaattatcttcttcttaatgcttgatcaccattaattagtatagagattttaagttttacacttgagagaggtaatttaaaatcggacttagaattgcataacataagaaaagtgtgagattgagagattccactaattttataagtttcatttaaagggaatcatattactttatgagtgcttatttgattaacattaaatagagatatcttgttacttaatttaagttaaatctatcatcactcgagaaaaggttaatagattacattag

SEQ ID NO: 225041 - DNA, 6831 bp, Cannabis indica
gtgagtttagtggttgatttctcgataacagcaaatttgaattctgtctttattttgatttctagataacaaaagctagaattctgtcttttgtttgcaatttcttaaaaacaaattgtaattattttcaaatgtaagactacctgtatctgcttcctaagtatttattcttccttttttaatctcagcttaggtactgggaaagaaacagaagaaactaatttacttcagcacttgtctgatgcttgtttagttgtggatgctttagagccatctgttagagaagagttggtgaataacttttgtagcagagagcttacatcttatgaacaaatctttgaaggagctggtttgtctcagtttgcattttgttgtttttgcaaattattattttagcttctttattcaaatcttcatttaaattttcttgattttgaactattttgtatacctttagaacttgcgaagctggataaaacagaacgaaggtatgcatggatcaaacggcgaataagaacaaatgaagagatttggaaaatatttcctctaccgtggcatgttccatatcgactttgtattcagttctgtaagaagacaaggtatgatctcttgatcctcattatgtgaattttgttgttttgttctttctcttttatatggaagctataatttgattctattgaaggttgctttgaaacttaaaatatcctgtgtatggaatggaatcttgtggtctaaatctgtgtaactagtcaaaatgaatgctgcatttgtcattgtaacacaacattaatatacagcgtgctgtttgaattttactcctattttttttgtattgtctttattttcaatgggaaattttcttattatctctcctcaccccactttaatggtaaagccacaatatttggattttcgagaacctgaggttattggatgttttgttttcaggaaacaactggaggagatccttaataatatgaaggagaagccagatgttggaacattattgttggtaggctatatatattttattaatacctttcatttttcctgtatgtgccctcaatattcttcacataaatattatttagtgtagcaagttaaattcagcatgcattactatagaatagctccttgtgtgctcgcatgcctatatattatttggtcttttcctcctaaattaaaaatatctattgaattcttcatccaggagcatttatatcaaaatatatatacttctattgagtttagtgtcaacattgtacaaacctcataaatcttgtgacacttaatgccattgtccagttgttcatctgtagtcacattactcttgaggaatgaggattctatgaggttaatgtttttctaaatatgttgataggtattttgtaatttttcatggtatatctagtgtatgcaagtagttgtggcaactgactgggtacaaatagtgttggggacattataaatggttttactaaaattgattggtcaatatgctacactggttctaatgatctgttcgagcatttcttctttaaattttaagcgcttcattctacttcagaatctcttccttcaatcttcttgctacatgtggtgttgtaggctttgcagcgaactctagaatttgaagatgaattggcagaaaagtttggggggggagctcaaggcaaagagacagggaatgatattgaagaaatcggtagaggggaaactggtcaaaatgtttcagatattcgtaagaagtatgaaaaaaagcttgctgtgcaccaggaaaatggttctgaggtatgcttgttaatttttttaatgcttctgaatttattgttgtctcaacctaactaattattaattattccatattaatatataattgtaacatcattttcatataaacgttggcaggaaaagaaaggaaacaaagagttgtcggcacctggagctggggtacatataccatttttatttttttgtatatctcctcatatatgtgctaccctgaacaagtatgcttgtataataaactgaaggattctctggcatgtcccattgcatgactctttgtttttccctcaagaaatggaaagtaatgatagctctcagattcatatttctccaacatcagaatctaatacgggggttttcttctgtgggaaattcttacgtaactcacttaagacaatcactttattttcacagggtcataataagaaaatcatgaaattttgctcctgtttgttattctattaaaaacaagggacttaaaggactgcattatggttacgtgtaattcatgccgaaaatgttgagacattgctaatttatgttctttgaaatgagttattccaaacatagtatagttgagaaggtttaacgtttctttcattcctcatatttggccatcataatcttaaaggtttttttgtggtttccttatgttataattttgattttatatattaaagatacctgtactgtttcatttggcagttcaacttccgtggaattgtttcatcttgttttgaacctcacttgacagtatacatagaactagaagagaagacactaatggagaatttagagaagcttgttcaggtaattgcaaggccttttagatgtattacatttggtgttccacccattcctaaatcaccttttttattgcaatgacaggaagaaacatgggatattgaagagggaagtcaaaataatgttctatcaagcagcatgcaggtaagcaactagagttttaattccgccccggtttcatgtcatcattttttttttatattcgtggccagtctgcaaatgattttcttcatggaaactcttattctgaatctgtacaaacttccccattgactagaattttagcttccatttttgaattcatttgtcttatttttgtatgtgtgtgttgaggctggtagagcagtggatcgttcttctcttcattctctcactgtattttttattttttattgacattgatgtactagaaccatatactagcttagcttagttaaaaaaaaaaaaaatagaaccattttactatccttaatcttaaatttatttgtcttttgttggaattttgttttatatacgagtttttgttttgtatttgaccagattccgttaaatgagttctgttgaaacatgctcactgcttagtttctgtgttttgtagttgttccttataatcaagaggagtttgaagagatgcagcgctttaacaaagaaccagacattgtttaatttgttcaaggtgtgctctgaaaataaaatatttccgagttatctttttttgcttaatttagtctgctcatggactaacaatagtcaaggtattatgtgcttgtgactggtatatcatgcacacatttatttcaaatgcttcctcaaaataatataaatgggtctaaacagctcttaagcttccagaaaacataaatatataacaactgagcaggccagcgtaagtattgaaaaaaataaaaaatctcgccgaacttcatatctgtttccatcatcaggttttccaaagaattcttaaagcgtatgctacgaagctttttgcaagactacccaagggtggcacaggaattgttgcagctgctacgggtatggatggtcagataaaggtaataacagataattgttttgattctattctgatttatgaaataatttttatttacttcagagaaagtatattttttttaatactttttttttgttactatttcaagcagacatcggatcgagatgaaagagtgatttgttatattgtcaactcagctgaatactgtcataagactgtaagtattctggggttatgtttttctgagctaatttgttatattgttgtgctgtgcttacacagacggctcatgcttcggccagcatatctgctgtgctaaacattttgagtagataaggaaagttgattttctgtatcaaatttcatttcacatgcagagaaggcagaatctgactatgaaattacttcattcttcatttgttggtctcagaacttgaagttatcattagaatatttcaataatttgctgaacttctgtagttgagcaaaagtgtgggtatggcagggatagctggcagtgggaacttcttctagtactttcaatacgatattagtttggtttttcagtcatgtccttagagctagttggcacaatatgccgtaatccaggacattactaattgattggcatgatgacattgtttttggctcttaacctagaatttatattttgcaggctggtgagctggctgaaagcatttccaaaataattgaacctaattttgctgacacggtggatatgtcagaagttcaggtattaactatttcaaaacaattacgaaaaaaaaggttgtttcatgtttacatcatgcacttagcttgcaaatcttttcaatattgctaaggtgctcgagcatctgtgcaggatgagttttctgcagttataaccaaatcattagtcactctagtgcatggcctggaaactaagtttgatgctgaaatggctgcgatgactcgtgttccatgggctacacttgaaaatgttggagaccaatcagagtaagccacattcactataaaacaaaattttaattctaatgtaataccttatttctaaatattatcactttaatcttttgcagatacgttaatggcatcaatatgattcttactagtagcattccagttcttggtggcctcctttcacctctatacttccagttcttccttgataaggtcactacatatttcttgtgttattatcagagatctagttcgttatttttttctgtttcttttcttgttcttctctctcttgatgcatcatggttaccctctccaaccacttagtcatctgaatcactatcccaggcatttaggtggcatttggttagaaggaataaaaatataagaatagaaatggaatgtaatcaaatttaaaatgtataaaaaaatttattaaattttttctcatcaagcattggaatggtctttctttctatttcaaaatggaatagtcattctaccaaaatgatggaaaggtcattcaattggaatgacattccaatatcttaaaatgcaaccaaataaaagaatagaataaaaattgtttcctttccgtttcattttattttattaccttcaaccaaacgctaccttagcgcagtgttctaccaagtcacattactaagataccattaaaaggcctcttatctttcccacacaaaacaaaatctaaaatcctgaccagcatactttcaaaagattaccttgtacttttacatgtaaactttagttttttttttttttttttgtttaaggtacatgtaaactatagttagtcctcttaaaaattgctttaatttatatttaattgttcgttatcttttttctcattgcttgaatgtttcagttgcaagacatattcttaccttacacctttgctaaatattatttcatgcaaattttatatacaaagctcctttaaaataaaatgttagtttgttcttatatataaacaccacaaattactcacacgaaataaaatgttagttgtttgcactaattatatctataatttcatatgcagcttgcatcatcacttggtccacgcttctatgcaaacattttcaaatgcaagcagatatcagaaactggagcccaacaagtagggatcattttaatatttttgtggtctcttttatttattaaaataaatctttttatgtataaataattgcacatctattttggtacaacaaataataaagatatgtgcaaagtatacttctagaggtgtgtttctagatggcttggagggatgtcaccatggcaatccttgagtttaaagattaactagaattcattaatgaagcatctatcttttgagttttcattttgagatgtgcatgactcatacataaaggacatttcccgcttttttaaacatggcaagcttatgtgataataatcatgtcacccatcataggattaaggttgtttattctttaaagttccgtctcttttataacaagtgctatttgcctttgtttttctggtctcgtgatgtttgttctacttttggaaaattagaatctgaagttagtattataatttatttaattgctttagttgtcaaagttgagtgaaatatgttgatagctaggttggtattgtccaattacagatctagagtagtctgaaactttgataatcattcttatagaaatgtgtttatcctgacaataagtttctgcttccaatcgatacaatttaataatgaacaaattgttggatgcatttttcagatgttattggatactcaagctgtgaagacaattcttttagaaatacctacccttggtcgacaggtaattagtaattcttgtattattatcaactttaactcatattgcagaagaacgtgtaccatgatgtatatatttatgcatatgtgtataaatgggtgtggactgtggactgtggactatggatttatgtatatatgattgtatatggcaattaatttaagtcaactatgttttattagaattaaaacctcatgagttaggtttgcaataataacataaatgcacctctacattgaagtggttttgggtactagtactgcctatcttcaaggatttatttgactttcttttttccttcaacgcagcagctttattgttgtgtgttgtagaaaatagtgattcgaattgtgtgttgatttcatagaataatacatatttatatacagagttaggagactaaatatctactaaata

SEQ ID NO: 225042 - DNA, 5647 bp, Cannabis indica
tttttttcccctcttcctctctttctatcttccctcctcgggaatgacagaaaacacttaggattgttgctcaaagctgttgattcctatggaaggatttggaggtttgggtgtcagtgatggtaacagtgcagtaaggaaaaagaggagtaatgcttcccgtcgtcctcgaaatgaatcagcagtgcctttggattaccgtgaacactcatctctatcagatggcagcaaaggatcaagcgatgaagataatggttacggtgcagttactcgaaagaaagaaatgaatctgaacctgtgtagctctagggcctcattttgtaacaatgctgaatctgagtcttccaagaatgtgataaaaaatgaagatggtggtcttctagattctgatgaagcttctaataatggatcttttcgaggtagcagtaacgagcagaagcataatgggattgattctaaaaggtgcagcaaaggtgtccttgcccctgctaattggacaagctcaaccaatgtggggcattttgaatctatttcagatgacttggataatgagaataaagtgaagaaggttaagcttaaagtttgtggtgttacgcgaacaattcatgccaattccatatctgatggtgcatctgctgttgggtcatccactacaaaatcttcccatgtttcatatgccccccggcctcgacagaagataattcaggtatcaagaaccatttcttcagacagaaattagaaaaagtaaaaataattttcgcttgaataataccatgcttgtgcaaggcacaaaaaatggaagttcatgggttacttttgtactgaagtttcttcctagttggtacaatttactgttttgtttgcttttttggtttggaaaccttttttttttgttcttcactatacctgccgtgaattcctgtttctatttaccgaattgatgagcactgtttagctaagagacttttttcccagactttgaagactccaatctaactagacttttggtgtaggattcggctgacaatcacacctttacttcagataaggggactgacctgtacaggaggctgtgcaaggattctagaaatgtcattaatactggtaaggatgattctccagagcctgaagataatatatatgcaaaagaaatagggaagtatgaacctgtttataagagcaagagggttactaggagacgctttatagatgatgcactggatgaagaggaggataacagcttggaggttcagtaccttgaaaaactcagaacttctaggactgctagtgattatgatgaagaatacaaagacgacgaggaaagagacagtaggaaacataggaggatttcaaaggtgttaaaaaggagttctgatcgccaatatgatttagatatgggagactatggctcatcgagattgaggagggacgctaagaagtccagatcaggaagaatatcagatgatactgattatgtggaagaggaatattcaatttcagatgatgagcccaatagcaagaggagaaaaccaagaagggagtccatcaattcaattgtcgataataaaaaggaaatgacagtgactacccgtcaaagagcccttcaaactggaaaagatgtatcttccagcttagatgcaaatcttatcgagtttccaaatgggttgccacctgctccaccaagaagtcggtgatgtattcttatatgctattaggtttttttaccttgccaccttggacctccactaagctgtgatcattacttgttttatttacagaacaaaaggagaaactcactgacgtagagcagcaactgaagaaagcggaggctgctcagagacgcaggatgcaagtagagaaggctgccagggaatctgaggtttgtcattctttattagtcttccattccatctaccctacaatatatttgatgataagtgtgttaatttaccttttttccttgctaaccttaggcagaggcaatcagaaagatcctaggccaagattctagtaggaagaaaaaagaagacaaaattaagaaacggcaagaagatcgcgcacaggtaacaattacatgaggaactcttgttggtacactgtatcacttgataaagcatttcactctattaacactacattcatcctctaatccttacaggagagggctgcaaattctatgataattgcatcagactcagttagatgggtgctaggtccctcaggaactgtagtgacatttcccaacgaaatgggactgccaactatattcaactccaagccatgcaagtaagtattgctcgcaaatgtttgtttcctgacttgcatggttcttaccattattgtttctactgtattcatagcgggaaatttagttttatttgattaagttgactcgtgattgaataaactgggagatatcatatggttaagttattatgcattatatcaggctttaaaactctgttctgctccattatcttataattttgattatgctgattcagttatccacctcctcgggagaaatgcgctggtccatcttgtacaaactcttataagtaccgtgattcagaatcgaagctacccctatgcagtcttcagtgctacaaggcagtacacgaaaagatgtcacctttaacaacttgttaaatgtgtggcatttggtcatttggttagtctctgttataatacaataagaagtatttgtgtaaatagtagctactcttatatgtaccagctgattgtcagttatagttacttgttgcagagaaaccgttcaaataacagacaacggttttatagttgtgatacttggaataagtaacagagttggaaattggaatataatataaacacatgtggtttcttagtaaaagtaattataaaaccagatttatccaatgtttagttcattatcttttttttctttcttaatgtgagaaaccccaatgctctaagcttatgtaattgccaaagaaacctatatacccaaattgatgctttagtttaaaatggttctatacccaatttgttgtaacttgattttgtacctcattgttcaatatctgaagtcctctttttttttttattcgaaaatgtaattgaagagaagagtaatgttataatgtaaattgttcttaatataatggctttatacttttttttttaataaataaataaataccactacaattgtctctcctccttcattttgctgttcttattattctgctaattctccaaagattcaagactgaattgtgcaaaaggtttcaaaaataaaccaaagaaaaccaaattatgtcttttggaagcttcattgaaccaaggagaataataatatatatatattattaataatataatattatttctcacaacaaatttcttgcaattaatttgacagaaaagcaaattaaggatgtgaattttttttaactgaggatgtaatagctacaaaatttaattgcggataatcatactttctataaaaatttgggatcttaatgatatttaccttaaatagttaattttttttaaatgaaattgttaataaatatttgagaatttttgtgctctcaactttaatatttactaaacaatgcatttatcaatgcgtttacactgaatttattttatttttttttgtgtaattttattaattcaataatttataaattaaattatgtttgatgaatcttaatatttaccaaattacgttattttctgaatttttttattaaaattaaaagttattaaataaaaaattgtcaataattgagggaattttcaaaggacttcaaaattcaggggctatatggtacatgtgaaaaaaaattctaattaggtgcttggctacccaattttgagtttacactacagtagaacattcctttgccttctgcaacttcaactcccattcatggctagggctccaccaactaagcacggaagggacgaagctctggtatcaatatcatacttcttctctcttttttatcatgccttctttcataaatctagcttacatcttacgagaatcgaacgaagaaaaccaaacctcaagcctgtcattgaaaatgaaaatcactgatgatattacatacagttcacttgtttgtttgattgtttgcgtggtacttatatatgaaatcatgataaactagtcaatagagctcataatattcatcgctgcattttgttgcttcattttttcatgttcatctaggatttccaggggattttgagtgacttgcaggattgggagctttcgtttaaggacaaggacaagaaaatgaaagcacaggattctcgtaaggaactatcggtaattccataaacccacacttaacaattcttatctcgtatggaaaaacctgtcttttcagtctgtatgttttttgggtccttcacactgtgatcaattcttctttcgttatttaattagatagtttgaaatgtacttgtgttgcccttttataatgttgaagcattttttctttctttcttgtaattagtgggttttagaacaatgcaagctttattagtaattggtgtatgctatgagtttattcacctgattgatagctttttacaatgcttgttttgtgtaaaggtttcatcttccaagaagactgaaatggatggtaaagacaggaaaccagctgggcattcctctacaatggactatttaagtagctcaacgccatatgattactcgaggaactatgatacgattaccagactgccgaatagctccatatctgatgatagttttgctgatgccgcttcagaaaaggaatcggtaagagttttacttttcttttattaaatattctttttaaatttttatctgttagtcaatgtagatagtgagttttctgttgatgccttaatatccagggtaatgagtattttaagcagaagaagtttaaggaagctattgactgttattctagaagcattgcattgtcaccaacagcagtagcttatgcaaacagggctatggcatatctgaaggtcaaaaggcaagtttattacaagcactgttgtattgtttggtgcagttagattattaaaagatatttgaaccaaatgctgtataagcattttaattcagaaagtgatgtagttgtttatatagcagttatcgtgtttacttattacccagcaaaaatgatgacattttgccaatcgcttttggattaagtttcctttgtcttccaatacttgacgaataattcagttttgttctttagattccaggatgctgaggatgactgcacagaggccttgaatatggatgatcgttacattaaagcatattcccggcgagcaacagctagaaaagaacttggaaaacttaaagaatgccttgagggtatgtgtacactgtaaccaaatttggtttttggttcttgatatcaaaattatggcatctaatctattacgtatcattgtaatcttgatctctcttatttaatatatatagctaaccgcagatgcggagtttgccttgcggttggagcctcaaaatcaagaaatcaagaaacagtatactgaggccaagtcattatatgagaaagtgagtatatcttcttctgcaaatgttgtttgttctgtaatgtgacttgaaattagtatttgt

SEQ ID NO: 225043 - DNA, 4611 bp, Cannabis indica
gttagcgaggactttcaaaatacaagacaaaaacatacaaaaatttaagactactaagagtgtgtatgtatattcgaccctgcctgaattagattttccaacagttatgttctagtcactcacaggattcatcccagggaagtaggattctaatgcaagtcaacaagagatgttagaataaacaatttgagaggtcagggacagtaacgtttttttggggcccacctaggatttgagaggagaggaaaggctgaccaaaaatccatgcaaaagtgagaacatcaatatttgtaaacagtctgctgctaattgaaaaataaataaaaaaaaaaatagaaggcaaaggagaacaataaatcttaaaggacttggagaatcatttcgttaatgctacagctttcactaaaacgtatatattcgatcattatatgaatatataaatcataagcttaaggttacactacaagtggatctacaaatgaaacacaaatctccattggtatgaaatcaatatccaaatgataatgctataaacagattgaaatcatctggagggtaatttatgatgtggtggaaaaatgacttaataacatatatgatgctttcctagtagaaatgtgttgtcccgtggataatggaacaaaatatttcacaattcatcagataaaagacttaccagaggcatttccaatttggttttgatttttgaacccagctgtcacagcaatgcaaagaatcataaggatccaatttacatcaggaatataaacctgattcaggaaccttttagatgtatgcacaactttgactcttggaaaacagccaagtgcaagagcttgcttgatcaatgaaaaagttgcagatatggtggcctgacttgcaaccacagcagctgcagttgcaataacaaacactggccaatatatgcaatctggatgataataaacgataagatttaagcataatccccaaaccaataatgaaataatctttcctgacataatagtaatagtaataataataatattgaggaagtaaactccaatcagcaatgacctacgataagtagtgttcatgtcaccatgcatgcaaaaagaaaaattttataaaatgcctttaaacaaagtaggataacattgtgttctaatatttgcatgatcgagcacgaaatcgcaaaacctagacttcctcttctttaatttcaaattttaaagtactacaaacctggaatagaatgatagaaggcaccaactatgtgatctgaattgttcataaggtatgctgcttgtccagagtaggctaaaagaaggcaaggaaatacaactacagtaaatgcaatttgtatagatgtaactggatagtgggacaggtcagcaaaaagtgcttcggttcctgtaaattgtacagaataaacagtcagaagttttttactttagtttcatggaccaaaattaggtttggagaggagaaacaaatcaatggcaaggaactttagtttacctgttatactaagcataatgcctcctagggaagtccaactatctctctttccccttttaaaataccggtatatgtacacaggtgaaaaagcttttaaaacactgctatcatatttccatatgttgtatatgccaattcctccaattaagagaaaccagaggagcacaattggggcaaacagccaaccaactttatctataccatggtgttgaatgctaaacaaaatggctagtacaataacagcaacaagtacaactatgtctgagacataaacaaaataaatttcagagttggaaaagatttaattgctctaaataaaagagaaggttaaaaacggacgaatgtagataccattacttatcatggggtggccaacattgatcccaccaatagctgacaacactgcaaaagaacattacaattaagtatctcataaacaaaacaaatatttaaaagaaaacgtatcttctaattgaaccgagaaactaaggaattgagagaaagtatccttaatttaaaaagaactaagttgttatgttgagggttctcactccctcccactttctctctccttaagagaatcagaacaaaaaagtataacctgaaatagctggagtcaaaattccatccccaattaccatacaagacccaacaaggacaagaataagcattgtattcttcataaatgcatatccctccaaccatctcttggttcttgcggcaaatgagtgctcactaaatgtagaacgactatacgttgtaagctccaaatcactccggtcttgattaggaatagttctcaattttgcatgtcgacagagtaatgaatagatagcaaaagttccacctgcagcatgagtaagttgctatgtaattgtgtaataaacaagcagatgatatcaatggagcataatatttgtgaagctgaacagagagagcacctgtcttacattagaaatttctgtctataaagttataatagtttaatcaattatgcctaaactttaaagaaagactgacacattgaaaatttgcagaagaaattgatccaagacataattatcgttccatgatagcaatgctattgagcagaaaccaccaattggtattcaatagtccaataatttactgagtaatctatcaaaatttcaacagttatacaagtggacttgttcttaatatcccaatatctttactctggtatcaacttgcacttgctatgacaccacattaatctttccacttgtcttctgtctgaatactttcatgatatttatttctcaattttttttatgtccagtagctttatgcataagaagctcaggaaaaacagacaaagaaacaaggtgtacatcaacttatcccatcccacataattacttctaatgaacaaacctacaaaaaaccttgttcttaatttatgaaaacaagatcatcgaattacatctcttaaaaaattatcttattccattccacctaaatttcccataaagtagccaaaacagacaaattccatgaaactagaaattttgtaattccacaaaacatagattcatactacatcccttccttatttttattttgtcaagaaaactctccattaatcaatttccataagcagtgatgacctgttcataaagcaccttttcacatattaaaaataattaaaaaaaataattcacatggctttaaaacacaagagaaattctacagtcacactacttatgactattttccagattaaaaataattcaaaattcaaatggctttaaaagtactagagaaaatattctataatattatctaaactatagcatatattgtcaaacgacaaagatactttaatagtaatgcattctaactgaaaaatttaataaagcataatttaaatgacagaaacagggacttcaatttcattgctgaatattttggcaagtttttacattggggaatcctttcgagataaaaaggtattttgaggttttgtttatggtaaattttcttctgacattagtattgttgaagatattcggtatcattcccacaagggaaacaaaatatttccctttaatattgtaagggtacgtttgaaagctatggtagaattggattagggtgtaattagaggtaattacacaatttgacatgtttgtctaacgtgcaattacaaatgtgtaatttgaggtaattgagatttgagaggttcctattatctcaattagccaaaacaatctgggctgtgtggctcgaaagaaatgccagaatttttgaaggggttgctaaatcagaagcggatgtgtgagagacagttaaattctggacagctacttgggtctttagaaccaaacattttgaagatttgtcctttttagacttatgcagagaatgcaaaacaatcttataagctttctagaatgatcatgtcttaggacttttgtttgatgttaattgtaaccatggctttcctccgccataagtgaggcttattaataaataacggggaggaccctggataagtaggtctcttctcttttccaaaaaaaaaaatagccaaaacataatttaaatgacagaaacagacttcaatttcgttgttgcatattttggcaagcttttacattgggaaatcctttcgagataaaaggtattttggggtttggtttatggtaaattttcttctgacattagtattgtggaagataataggtatcattcccataagggaaaccaaatattttcctttaatattgtagggtgcactaggaaagctacgatagaattggatttgggtgtaattagaggtaactacacaatttaactacttttttctaaccatgtaattacaactgtgtaattagaggtaattgagggattccgattttgcaccccccacccatgaaaattgagtgtaattacactgtgtaattactaaacattttcccaaacaagaaatttaggaacttatatgtaacacagtgacttccaaacacgctttgaatgtctaatttctaggagtaattacttggggttgaccaaggttggctattttatagctaatacaattaaaattcatcgtaacaaaaatcatcatagataacaaactcatccttt

SEQ ID NO: 225044 - DNA, 5205 bp, Cannabis indica
aaaacaaaaaacaaaagaaaaagaaagaaaaaatagacaatgattttcaatcaaaacaagaaaaataagaatacagaggaataggaaagttttttatgcttaatgaagacaaattactcaatgtatgcagtagatgcatgattatgaagtcactatctgttaaatgagagatttgagtctccgagcaaactccgtcaactatcaagttactaatatcatatcagttaatttttctcctgcaccgctgggtgctatggcgggatccttgtcataaaaaaaaaaggtcttaatagttctaacgaagcaaaggatagacgcaaaccttctataaggtggaagctttagaagattcatacaagtagctgatgttggtaatcggtcaagagcttcttcagtagcactcccagccgccctgcagtaacatggtattaagcttttaccatagacaaatgtagaagagatcgaccaagtaggttgcattttctgtttgcccaaagaaaaaaatttattaactctaataggatggacatattaaagttacctctgtatgcaaaacagcggctcaagaaatttgaatccaagcagtggtcctcgagagcacccagtcacaaacctggacaatttttagtcttaattaaaatccttaacattatatatacagctaaatgtaaactatttgaggtggctaacagttactacgaatacagtaagaataatatgttcattccataactttttttttttttgctgggatgttcattctataacttacttaagaaacttcttctgattttccattgagaagcctttcaggacttcccagaacatctcaatgacataatgctcctgtgaataggaaagagagaaacacctcaatttcatattaaaattttaagaaacacatacatttgtgaagaaaactaaaacaaactagataaaatgatctgcataagatttataaaccatcaaaagtaagaagcacatacactatgatagccaccagcatagttggtattcgatcgtaaatcatcaacgtccaagcttgcaagtgaacctgatatcagaagctgaagaacagagagaaggaaacaacacaaaatacatgtaagaacaagaaaagacttgaaggtttagaacgattgcaatgcgggtggaattaagaagccaaaaagaattgaccagaaaagacatcattagaaggagaaaaacaaaagttaagcaagttgatggctatcaagttgcaaaactaagaaattgagcttttaaggcaattccatcagcaaagctaatagtacggttccagtcagttttctaagtcagcatttcaaattaaaaataaacattctagtgtattgagaatcaaaatggatcagcaatcgctactacaaatatattctatctattttacaacatttagctacaatagcaaaataataataatgtaccatgataccatcaatgagtaccaacaaaaaaaatgaactgatcctacctgcagttcatgctcattaaacatatcaatccaatctttctgtataagctgctgaaaccccctcataaaatgagaactttgttggcgtatctgaaaatgattgcttttctgtgtcataataatgccactggaggaagaaaaatgcaataatagatgccacagaaaataatccaaagatagaagattatttgacctgaaaattcaatcgatgattagcaactagatgaataaatgtaataacattgtcattggtgacacgtgaatcttttccccgtggaagcagttcttcttctgtttgctctccatattcattatttacaatgacaaagtacagttctaaatcagatatgtcccccttgtaatgctgcatggtaaaaagaaaatggtattattacaataaataaaccaccaaggtagtataaaaagaactcacacccctaagagtccattttacatgaaagcattagaaaaaaaatatacaattgaacaacacaataagcaaggtttcttatatcattgatcaaactatagaaacaaaaaaattacaacacgtgcaggtgatagaacatatgatttttggagttagaaaatataagattacctttaagaaaatgagatgacgatacaattctgggtccaaggaaggcaaatcattcaagtagttgtacctaaagaacaaacaaaaaaatacatctttagaattaaaaaataagattagagactagtctaaattacatataatagtactaatagaagttctcaaaactgcttaatctcacaatcgcactgtgaattttggccctggaaataaatttgttgattgcccgaataatatgattatgcaggtatacgcattacagtatacaagatgtttattgaatcacaatgaaggtttcaaaaactgagcctccataatcttgaaaaaaaaggaatgtattgacagcagagattaggaatctcaaatacatacttttgttttagtttgcttaagaagaatgttgcaaatggtatatcaacaagaatcccttcgaacatcgcctacaaagggaaaaaacataaggaccaccaagatatgtaaaagcagataacttcaagatttattattaattatgtcatttgcttaataacactaatttgagaaaccaatatcatgaattttactattctaatgacttttttttttttgtaaaaatttactattctaatggcatgaacacttctgctttgaaatagtgattgcttatagccttatagtttcgaacaggttcagtcactaatatattctaatttagttaagaagttgccagccttcttatagtctatgaaatttttatatgaagttgctttttctaagacatgtagattatgaagacaccaacagcaagcagatgatctccaagcaacaaaaaccagaagctaaaacaaaattatcattcctcaacattgtgagctacaagaaataaaaacggagaatttggaaacacatacctttgccagaagaactccaagaaaatgaaaaaattggagatgttgttcatgtatcattccagaaccaggattagggtaaagcaggtgatcagatgtttcctgaatataccaaacaaagaagttaatttattttttccctgaagctaagctccatgctgccatgaaactatggcaattgctatttatgttcccaagagggttttgacccttagaatttgcggaagcaaatcacatgtgaatgtctaaccatttgagttagccctcttgagttcaaacaaagaaattaataagacatgactaagacctaatattctcccatccactgatgtcatgcgagtccctcccagtctctctttcctcttaatgccctagttattctaaattctatgtaaaaacaaattgtagacaattttttacccaattgtaagtcattctattgcttctagaaagtcacagtagcaatgatctttagaccacataagggttgatgtttgttttctcatgtgagtggagggttcagcagcagcttagcttttaactatgtttccaattgcacataaccttgagtcttagtttatataggtcactaattagtaaacttagcttccttgcaatctgtaaaaccaaccttaaatagcccatactgcacatcaaaggcagctcgagtgatgttctccataaaatctttgaaaatccctccaccatcaatgccagcctcctcaactccaaactcatttacaaaggttacacgaatctgcaagtaaacagaagaaacaaatactaggtagttcagaaaatcaaaaaacaccgtgtcagcagaaaacaattctcacttttgaaaaatagtaaaaggcaaaaagcaaaggagaaagagggcttaaagtaaaagatgtaaatgaatattaagaaattttaccggtccacgaaggtcatcctcagataaagcactcatctgattataagcatcttccagaatgtgatccctccttattctaaagcggtttcgggtataaacagcatgagaactatgcttctgcctaattgctgccaattgtgactgcaaaatgcagtttcgaacatattgttaggcataaattgactagtgaaaagaaaaattttaaatgcggcgcactaaaacaacatgggtcaactgaaattgtaaataaccctattatcaaaattaaaatttcttttaaatcaaaataaacaactcacagcgaatattttcactctgctggtaaaaggaacaagaaagggagcttgcttcaatatgtcattcgcacgggtattttctaatacagcctaggcacaaagaaaaaatattagcaatataaccccgggggcatttaggtatgtgaaaccaaaattacaaatagagtctattacctgtgaaataaaaaactcattgacaccatcagcatggaagtcactaggagatgcaaactcccttctgttgttccaatcttgcaactacatcaaaaaaaaaaatgaagtacgattctcaatagataaagagaaaactctagaaaccagcatcaaagcatattaacaaaagtgattacatattccaaagaaatgaaagggtgcatttacctgagaaagaagatcagaggctacaacactaaccctgtgttgaatgacttccactgggtttcccttaatagtattattatggctgacagacctcccagaatttgaaggacttgtaggattcacccataaaagctgccacaaggcctacatacacagtataacaatatcaaccattgcataaagtcacaaatgttactgttaacctatagtaattgtaatatagcatgtgagagaaaaaaaaattgcaaccgtgtggctgactagtgcccacacttaagctctatcatgttccaatttctatttgctgaaattaaagtagagctcattcaataaatgttacctgtcttagtataataatcagacttctgatatcctccagtgagagtggcttctcttgttcatagaactcctcgttatcaactatcatgagcatgtgcctaatagataattttacacttagagcttatccatgatagattatacaataaaatggcgccaattagaatattagtagtaattatatatattccaaaagtggcatgccaaccaaaaaaggttacaaattaactctgaataaacaaaagcagcattacttgtacacgggacagaaaacagccaatggtaatagccaa

SEQ ID NO: 225045 - DNA, 3165 bp, Cannabis indica
aaggccaatgcagtactcaactcatggtcaaaaagagaaatgacatcataaaaatcaatcaccagcactgtctaaataatctcccacaaaacaatctcaaggaagagatagaaaactcagatgacgacgatctgtcatcatcttcttcccaattcgatgattaggaaactgatgaccaaagcagcagtgatgatgaaacaatttcgcctcaattcatgacaactaaccatacaagaacaactttgggagtagaaagagaacaaaactctaaccaaaataagtcgatcataggagaagaagtttcttcaaaagaaagccataactcccctaagcaccagtttattggcaagtccaacacattcatgtttgatgatcttcctctgaattaatggagatcgcgcttccaagaattcagagtatagacccctttagagcacaaaaaccatgggtagaaataagagacatcttgttgtagttagtatcaagattcatgggaatcttacaagattagtagtaaagccttggataatataggaaacttcaatttctacaagtagtctattgaagtggcactaaatcacttctacattgaattttgcggataaaactctcaagtggtcgaacgtttcagggccaaattttttaaaatgaagtgctgctcaatgaattaagaggatttggaattacacttccaaagaatgactaaacaattttatctaatcggtagtgtcgatgatccaaaccttatacaagtgctccttccgtctatactagaatcattaagagaagaaacattcatactcttttcagcaaacaagagaacactacataacacaacttctagagagttattttaaatggtgatgagagccttagaaaagatgtgttctcaaaacaaatttctacaagaatacatgaagcaaacaaaacagctcggcaaggcatgcaaccaaaagagttttatgatcaaatgttcaactaaagacatatgctcatgctcaaagcaaaaaagccaaaaaaaaaatgtttcaagtatagatcttcaaaacaataggactctttggaaattgcttcaaaaaatgaacatcatggaaaattctcaaaccaatgtttcttgtgtagaaagaaggggccactttgcaaagcaatgcttaaaaggtaaaaccaccaagatgataacacatatagagaacgccactggggtattactctctgataatggcgttgagtcagtcttttcaattaaagagaagatgtccccacatgtgtgtattacaatcaacatccaattcaaacaatgaaagctatgccgaaatttttaacatggttacaatcaccatttgacaaccgatactgatagaaaacatccatgtcatcccaacaaaatactattggccaatcaaggtagctacattttttaatacgggagcatcatatacaattatgaaccccgacatcttgtcatctgaattatggaagaagaaacagtatttccaagttgcaaataacctagtactctgcaccgaattaatcaacaagccgataaagctacaattcttccctagatgttccgttgtccacagagtcattggattaaaggtttctacgaaaggacctcattgtgagatttgacctttacacaaaaaagaaaggtcttagaattctctcacaagggttggcctacaagtatttcttcacccaatcgaagcgaatctcgaattatttttacctagtgcaagacatattttcatcaatcaaagtaaaactaatacaaaggtcatttgtaaattcttactcagaattctcaacaaagtgcaatcattcattatggaaaaatgaagaattctacatctctctaccattcaaacagaacaaagatatcaatccaaccaaaacaaaccaccccggaatgaatcctgaacatcaaaaagtggcgagggaagaatgtcatcaacttaatcacaagggattattgaagacaacgaatcaccatgggcatttcacgccttttatgtcattaacagggcagagcaagctaaaggaaagtaaagattgataattaattatcaaccactgaactattttttggggaacgataaattttctctaccaaataaaaattttcttttctctaacatttaaaaaacaaagatattttcaaagtttaatctaaaaagcgggtttttggcaactggacattgaaaaggaagacaaacctaagatgacgctttgcatcccaaatcaacattttcaatgggcactgatgccttttggattcaaaacggggccatccctatttcagaaagcaatgattaaaatctacaatccaatccttaatcaagccctaatctacattgattatatactgttgttttcactcgataacaaggcccatacaaacttcctggcccaatttgcggagatcactaaaaaatatggcatcatgctctctgaaaaaaagatggtaataggtcagccagagatcaaattccttggaataaaacttcatgatggaaaatatgaggaacccaaatccaataatttctcagaattgtagattacttgaggattttgtacccctcttgtccaagatcacaagcccattataaaaaatgctctaaagaggatctttaccttggggaaaagaacaaacagtcccaatcaacaaactcaaagatataatgcaaggcctaccccctttcaaagtccctctagcgggaaaagaatcttacagatagatgcgagtctcaaacactagggagcagtcttattggaggaagacgatcgtagtaaacacaaagtgtgcgatgacaaaagtggggctttcaaagactcacagctacactaccattccacattcaaagagatactgacagtaaaaatggacttcacaaaacttgagttccatcttatcggacacaatgtcccagtgaaaatagattttgtcgcattgtaagggatgctcacgttgaaatagaataaagcagtcaataatcaactactcaggttagccacgtggttctcacgttgcacgtttgaaatcaaacacataaaagataaaattgtgatttttgattttctcacagcacaaacctattataaatatgatgaattcacaaactgaaaaatctaatccctttgatatacatggccaacctatctctt

SEQ ID NO: 225046 - DNA, 2097 bp, Cannabis indica
ttaccaccctaataattaccctacctagtaattacacagttactttcaagcacacccttaaagttatttgaattgaaatgactcatgctcaattacgcatcggcgcaatttgtgaggagacactaataataataataataataataataataataataataatagtcactggtaatacattttaacatttctccacttaatatggttactacttactacgaaattttatattgttttattttattaaacatcatttcagtccaaatttgagtattgtatttctcttgttacttttccacctcctatcatttgtcgacattacatttgggcaaagttaaaataaataaataaatggattgaattctcttgtttagaataaaactagggaaattagcccctcttggtcaaataattaattatatttataatttctaaactgaataaaaaatttaaaaaaataagagaattaaaaaagaataaatatttataatttatacaataaaatataaaaaaaaataagagaattaattaaagttgttggagtaattttatgcttcagcttctttttttctttaaaaaaaatactttgagaaaatgttaatttaatccatccaatatagattcaatattatatattataaaaaacatcaaatgattatatcatatggaggaagatcaatataaatatttttttcctcataaaagataatgtatatttacacatatattagtcctcctatgaaaaaaataagaggctttcaatccttcttattgtgtaaaagtttgacatatatattctttttttaaaaaattattttggattggggttaaagaattgtaaaagtagacataattataattatccaataatgatacacacaccagtgatattaaacttttaaaagaagtaaacagtaaaagaggagaataaacaaaagagagcatttgatatcaaattaggtaaaagaatctaaaaacagagagaaaaaggaagaggtcaaacaaatgaatttgagtttcattaattgctccattttttccccaaagcaattaattggctcattttgtatgcccaagttgacattatggagctctggggtggatgggtccatctaataaaagcataatctgatgacacttcaagtcagtactaaaactttcttcttttaagatcacacatttattgtttattggaccatgtgtacacttgaaattgatctcatatgagagttcaaatttattggaccaagtgtacaactactgtttcattgaaacttaatttatcagagccggatcacctctccaatttatctgtctattcaataaatcacaagcaaggccggccctgaaatgtagtgagctatagggtaaaaattattttgaggaaattacactctataccctttttatattgtcctcttttatttgtacccttttttttaaagtctatcatttttacctctttttttaaatattgtaccaattttgcccctgtcacttcaagatattctccacgtgactctcttatgtcagggtattttgggtacaatacatataaaaagaggtatgttttaattaaatataaaattagaggtaaatttgattaattgattaataaaagtggtatttttcaacttaccccaattattttttggactcttatttagaaaaaaaaatagtattttccaaaatcagccaaaaaattgtataattttaaaagggcaatttttttttaggacccctgtactaggtgggccctaggcacaggcctagcccgcccagggcccggccctgatcacaagccaaatcatttaacattaataccctcattcactcttttaacagcttttaataatttttaccctttattagtctattatcaattttttcttaatatatatgggacccatatacacatttttctaattgaagttttgtattttcagcacattgtgtgtaatcataaggatccaaaccttagccgaaggaaaaaaaaaaaaaaagaaggcactcaaatacatatttatctttttcttttaagtaaaaaaaaataattctctctcattaatatgtctttttctccctaataaatataca

SEQ ID NO: 225047 - DNA, 7117 bp, Cannabis indica
acaaagtgtcataagataatatgtatgacaacaacaagataaaaatcaaaagtatgagatggtgaacttaccccatctacatactgtttgattgcatgagttaaagtgatagcatcaaagttgctacacacaactcacttcaaagtttttaagtcacagacattgtctgccacctagtcaataagtttgtcaaaagatggcaccaagtcactcctaacccatggcgccaaatgcttgttgaatgcctcccaatttaacataggtttgggacccttggtgcatcctccatcagcaatctcaaccttctttggggatctgatgagagtggttctcctttgagccaatccaacttttttccttgtgcctcttaaggtagtgatcatcctcctacacctgtttcaagaagttttcatttatgtccttgagctttaaaggaaaactacactttagggttgggatgttaggaagggcagtgcgggatgattgtttttgaaattgagtggcatgtgcttgttaacccgtttgggatagctgtgtagtcagttgttgttgtttctgcttatgaggctgaatttgttgttgttattcttggggttggatgattgtttattgttgtttttcttattattggatcgtcgtttgttgttgttgttgttgttggggttgttttattggttgtgtaacttgtggttgggtttgttgctggttagtggcctcactcttaatcaattctccttcctctttaggagagtttttgcttacccctgtcacctttgcctttttggcttccttcttggggccatatgtgttggaacatttacgggaagtgtctaccttcatgggaaacacgtatccctcaccaatctcttcggatggtacagtggcctctgcaccactatggtttgttatagggatggtgttcctagaaggagcttgctcttggttcaactcaaattattgcagagactaaacctctttgaacatttctccactagaaatgacccagaatagagaagcatccctggaagccttctcttccctggctgaagttcgcttagcctgaggagtctcctgatttccaaatgatgagaaagagttgggaggccttggcttgcaaaccctttttggcctgctcttggtccttcccttcccttttcctctagtagcttgagacacatgctagttaatggatttgactaaggatagcaacatcttggattctgaaattttcatagtaccatagacaacaacacaattataaatcaacaaataaatgacatctgcaagcaaacacaaacaaacatcaacaaattgagacttaggcgtgggtgtgataactaagagagttattatatggctttctttaagtgaataaaccaatgttttcccaagccatgaattgccatgctctttgaagcttaggaaagacatggactggaaagggtctaccataacaatatctagagacagtgtgtaattactgcaacccctaatggcttcaccctatcctatcgaggctgggggtacaaaacaaacagaaaggccgtttacgtcttcctgtacacccacattcgggcatgcagtgtaaaataactttgcgagtttttcatctttagccaaatgattaggatgacgatgtgcccaatccgccatcaggtgtttgtcctctttaagggcgcccttcattattttggtgcactgtccgagatgggggcataacaacgcaacctcttttagggccctctttagcacctcgttcatgagagttcaaggaaaaggtgttgttacgaatgggaaaaattccatcagtcatgaattataaacaagaaaggaatacagaatagagataaaagataaaaccaatattctcttcactgagaaccttttaaaaaactaatattctctgacgtcatgagagttagatgttaagttgaggggacattgcatgtccggatgcttctctaatttgtaaaacccaatcttttgttcctcatcacgcatgatttggggtttaagagcataggaatgcaagatctctttcagacatgggggttcaagtttccccatcttacatagaacatacagccaggacagttgcttgtaagatggtggaataagctggaagggtgaaattccgacctgcgcacataacctcgtcaagtaagttcttaggggaaagtgtgccccacttgaaatatgagctcagcttcattctttaaacccatcttttatatgggaagcaaattatcccatgaccaatagcctgttccacactagcccatgaatattacagactcccccattgacataaatgttctccatcatttcgttgcacctaaacttgttgatgttttggtccatctcaataatgaatcatcataaaaaatgggagatgaagatgtggcttttgctttgccctttatcgtggtttccttgtttttccctctttcgagcaactttagaggtagggtgttgttgaggcccctccttgggcacttcaacccttactcctcaatattcaattcttctatatcgatctcatcatttaagtcaagcactagaatagaaaataaggaaaagaaacccacgaaattaaataccctatattgtaacgataagtagagtatcgaggagagcctccccaaaaatttcttagagaggtcccctcaagacccatcacctagaaatattccccttgtcagacgttacctccagatgctaggttgggaacccacaaaaaagttacaaaacaagatggatagctaagcaatacttccatcaaaggccttaatggcccctaataggaaaacaaaaaataactaaaatatgtgaaggcattccctggaagactcaatgtttcgaacaactctaccaaaaaaacatcagcatacccacaacaagataaccacaaccctattttgtttatcatacctaagaacatcctaaatccttgttctaacagtcacatgcataatatatccaaaacatagtttgaataaaaatttctaccctagtgttattgaaaagttcaacagagtttagatactaacttatttagcaattcaaagaggagggttgttgtggtaaaaaccctaaaatttgcaaacccaatcgatcacctagtcagaacgtacttgaatgtctaagttttcactaggttgggggtggatcatactactgtccaaaggtgcaccgtctgggaagtagcttgctcgaatttccaaaagaagactaattagggtgtcaaagcacttgaacatccattgaataatggaaaacgtaaggttggagctctttcaaatctcttgaaataaggtctctagtttgagtttgagaatgagcgaagttagaaatttcagaaatggctaaaagaggaaaaagatgaagctcgcgcctacttatagtgaaaggccagctcatgaaatttaaaatcaaatgcttagataatgcaagccaaaaagcataaggtaatccagttgttggggaatcgaaaggaccatatttaatgctcctcaaaaaaattaaggcatcttatcatcaattccctcaggccctaagcacattaaagagtcgtggcttcataactctactcctacttttatttccctagaagaaaggtgcttaccacaggcacatatgactcgcaggtcgcagaacatttgacacacgtataccaataaatatttaacaaaggatctaaaaccttacaacttccaggtggctaaaagatgcttgcccatccttagagttttatcacgtatcttagagcatgccctagaaattcagagggaggctgtaagcttttaccactcaagattcccagaactttgggctatatgttattcgtgtttctggaagaagaaaagatggcaaaaaaaatgaagacctcaatctaatgatcattgaataagtctccttaatcatagaagggtctaatctgtggaagacttgatgatttaccacaaggagaataataaacagagatctgaaagccatatccttgctttgagatttataagaccaacttgtctataagtgtaagcaaatgctacacattcatgtgaacagtctaagatggatgtccactatagaagaagaaccagagtcacatgctagatgagagactaatggatttaagaaggttattcttgtctgacacaagataaggtcttatcctccgtgttagactatggaactacgcttaccaccccctaaatactctactttgcctgacggctcaactgagaattttttccaccaagtggaagcctttgcctgacacgtgccctacaagaccaatggtccccactgtacggacagtttgacacacgagaaagaacaatcttggtggcccaatagtaatatttttaatatattttaccctaatggtgggccttttgtagaattcctagacgggtcattggtatgcacatactttatccttgctatcccaatttttttcctcatgacttgacatgcttacgtggacaaaatcagcaccacgtggtagtacagctcacgaataggaaggccaagccatcacctgacaaaatagagaccccgacactcaaacaggcatcatgtgacagatgaactccctctcaagagtgggtcggtcacccctgcccagccctattgctggctagcctagggactgcaccatgactagcttgcttggcctccacaggggcctaatcagctaagaggtgcactgcatgctttctaggaaagttctacatgtagacaacaacacatgggctgcaaattgggcactaaaagcccaacaaaatagttgaacaataattaagggcaactttgtctttggtaaatatctaacaaactatgcaagtattgagggatttaaactataacctaggattttaggcctcctatgtaaggaccttaaacttagcctagaaacgtaagttacatctaagtctgaaacctattattggctttcagaaagtttagcccctacttccaggcacaacctacaaatgtgtacaccgatcaaccactatggcagcttttgtagaaacctgaagcatcaggatgactactcaaatgggccattaagcttggcttgtttgagataacataccaatcaagacaagccataaagggtcaagcccttgggactttgtggctgagtgaaccaatagtactcttcagatccctcaagcctcaggagaaaagaaagagcagcaaaaaaatcctaaagaactaccatggaaactccatgttgaagaaaactaaactgaccagttgtcgagtacacgcatttcccttacaacacctaggggtagtagttgcacgaaacaatcaaattcgacttcaattccttaaacaatgaggttgtgtatgaagctttgatagcttgcctcaagctggcacatgaagtacggggtaaccacctggccatattcaacatttctcaactagttgtgaatcaagttctcggtgaatacacagctcaaggtgaaagaatggtggcctacttgagcaaaatcaaagacttgctaagttagctcaaaggctacacgatcaggcaaatccctagagaacaaaatgccattgcagatgaacttccccatctacaaagcaacaccattacttacaaagaaaactttgtgcccatacaattctaagaggaacccaacattgttgtcgcagaagaagtcaacatgttggatgacactccaagatagatgacacatattgcaacttacctccaaatggagcctttccagaagacaaaaatgatgcaagcaaactgagaagaaaagctgctaggtacctgatcgtagacgggataatatacagatggagcttctccatgcctctcttgaggtgtgtcaccaaggccgaagttgaacgattgatcgtacaagtgcatgaaggcttctatgaaaaccatgccaggggcaaagcctatcaaaaaagatactctgataggggtactttaggccaacgatgatcgaagactcaatggactatgttagaaagtgtcacaagtgctagagattttcgaagataccaagagctccacccaatgagctcacgatgatctagtctcctaggcccatcacagtgtgggggatagacctaatggccatctccaaaggggaaaaggagaggcatagtttgatttcgtcgtagtagactacttaaccaaatggacagaagttgaactcctaccgacaatcacctccaagaatgtccttgactttgttgtcaagaacatcatatgttggttcggccttccccagaatattctgttggacaacaacaagcattttgatagtgacatgttcactgatttctgcaacaaacatggcatcatcaagagattctcaactatggcccatcctcaagtaaatgggcaactagaagctatcaacaaaaccctcaagggcaccctgaagaagcgccttaaggaagcaaaaggtatatggcctgaattcctcccagaggtcctatggtcacatagaactaccaagaagacagccagtgggcaaaatctattcgctctagcgtatggctaagaggcgatgttgtttctagagctagtgccaccgtctcacaagataacaaccaatgaacaacaaacaaacaacaccctgctggcatagtccattgacaaaatagaagaaagaagagaacaagccaacctaaagctgcaggcctaccaataaaaggtagcaaggcacttcaacaaacacgtcaagagcagaaaattcttcataggagacttagtgctctgaagagtgttcctgaaaagtaaagactcagtggcaggcgtgtttggacttaacatggtagacccttatcaagatacagagataactattaaggaagcctacaagctgggaaggtacgacgagaacatggtgctcgttcttttaccaagaaactggaatggagagcacctttgcaagtactatcactaacaagcttatagaactctactccaaagtagtggctctaccaactaaacattagagtacaaaaagtgttagcacccacggccctttttgcacggtctccaacttttatttaatagtggccttcgctttactaggcgagtaagggtagccatttgacatctagaagctaa

SEQ ID NO: 225048 - DNA, 2582 bp, Cannabis indica
tatctggatcggtcctagggagggatgaacggatgcccaagccagtctgttgtgacattacatctgattttccaactccaacaacaccactgtttaatcctggcctgtagaaaaagtaaacattaatactaactaatgaattaaatctgatgaaatttccttcacaagttcataaattaaggctttcaaggagacgatattgcaacaagagggtaaaaaaagttcatgcattttataggaaacacgatgccttcattaccatgacaatatatagatcttcttattctttccaaatccaataatgagctatcaaatattgcaataaaataactaataatggtcaccataggcactgtagctacatagatatctctacaataagcacctttcataaattttttttaaaaaaaattatatatttgccacataaacacgtcatttcagataaactagccgatatacctaattactaactaagaagtataaatcccgtatctaaacttactaaacaagacatccgtacaaatgtcttgagtatataggcatttcaatgtcatgcagctatggcctcaaaactaatttgtatagggataatgcttagatccagaaatacacaaaacaaatgttctaataaagatttatcatatataaaaaactgtctattataatcactcaatgtgacctttttggaatcattttagattgcaccaaacataacgagtattatactcttcttgatttccaaaaaaaaaacaacacacacaaatagaaatagaacgagaaagaagaaaagcaattaggcaatacattagagcatccctactcaatggagggctatctaattattatgattttgatccatttcattggatatataatggtaataaaaaaaggttatacctaaagccatgtgattcgatatttaaccttgatcgagcatcagtaattggtctttgttgcattccttgtttggtttcccggtagccatcattcggtttagttgatacagtactaggagaaacatctggttttatcccagaacgcttcttcttcatttttgatttgtcccagccatcaactccaatagataaggtcctatcttcaccctgtactgcaccactatttgcaagcctcaacatttctctatccctatctacaacaccagacggcctgagcagagtgttactccgcccatccatctacaattgtgacaatccatgttagtcatattttaaaggaaagataatagctagagatatatatggcgaccacctaacagttgctactgactggtaaaaaaacattatctccaatcccaaatcaacaatgacaagaactccttagaaacaattacctgaataactaaggatgagaattgaggacagttaaaagtaataaataaaggacaaggcttctatggggaaagtgtatgtgtaagaaaaaggataggaaaaaattagtgctttaaaaaataagggaaaaatgaggttcgtaataatactaaaaggaaaaaaattgcaaaggaagcacgggtgaagaagttaaaaggaacgtaccttagcatctgcaaaagaagtccgggtgcgtttgtttggaagagcagttttggtcctttcttctgacttatgctgctcaagttcaaaactacctggaatggaatggttttgaattcctatcttacccatgcttgtccctaaacctgaccggtcatttgacaacactgcaccagaccgatcactaggaaaaccttctgatcgggatctctttttagatggtacatttgggaaaaatttattgaatactgataaagcttcgttgaaaattttcactcgatccctgttattagataatgtcatgaactattttcaactccaaactaaatgaaaaacatacagagaactacctggccttgacattgctttcacgcaaactactcttaagtcgtttgatttcttctggtgatggagatggaagcatctttccttttgtagaaccagatggagattcatctggtgaaactccaaaagcaacatttatatgtcgtttaaagtccccttgacggagagatttatgctctgcagccacaacctttgcatcaaaccgtatgcaacgaaagaaatccagcaaattttcatgtgctactgaggcgcttcttgacatgttcggaagtgaagacaaaattggattatctacgctctcacgaaagctacccgatttgtccaatgaaggtgctatgtgggatccacgctgcccaccgatatataaaggtctatctgggctaccagagatgtcaaacttgccagatgttgccattgcactagtttccgcacatactttgcatcaataacccagaaaatacaagggtgcatgacaaagttggggaactaaagcacatatggccaaaagtttttaagaacgcttactgggtagtgtatctgaaatgtaaagaaaaatgttgaaaacaaacgtaagatctacttgaatgagatgggtaagaacttcagaactggagacttgaataataacaataacaattaacaaatcagaaaaaaaaacttcctaatctgcttgtccaagacaat

SEQ ID NO: 225049 - DNA, 3388 bp, Cannabis indica
tttttattttttaaaaaaatatgttctacttgagtaagtctttcctaaatataaggtaaataaaagaatttgtcagggcatcgagagagatgattggctgtcttggcctaacattgtcggtgctgctgtgatccaatctccaatctccaatctccaatctccaatcttcacttaataaagcttcttcctttatcatttttattttcattcttttcctataaattattattattgaattgaatttcctcttatttttattctattaaattttgggtttttatcatttttttttgtttttttggacgtttatggctgaaactgacccaccctagttcacagacactaagaaaagggcttgtaatcagctaaagtttagattttgatttaatttcgggagtttgagcgaagaagatgaagttgaactggaagctatggcttccacagaagcacaggcaattgcttgttaagtttgctgtggctgttctcttaatgggtcttgctttacgtcttcttctcgttcgttctaccgacatttctcctgaactcgaaacccctttacctgaaacccctcgtcttcctcagaaaattgttgctgttgaagaaccacctccttttgttgaagttgaagctcaagaaaatgaggaacaggtttctcaaacaggtgaatttctagttagattggaatgagatctagttacagttaatgatgggattatggagattttaatgggttctgtgttgagatctaatgatgaaaattataatggggtttggttatgattaaccttttcttaatcaaaattatgaatattttaatggataatcctatcctactttgaaagtggtcctatacgatataattagctaggcattgaatttaggctctgagatctaatttccattaatggggtttgttgattgtcttgctttatagattgtcagaatgaaaattatgaggcttttaatggtggttttgtgattaagataataacaacaaactgttgaatttgatttatatatgttctgattttattccataatcattttgtttgagtagaccttcctgaaatagatggaggaaagtgtgatcttttcaatggggaatggattccaaacccatctggtcctatttacacaaataagacttgctcttttattgaatcccatcagaactgcattagaaatggtagacctgattcagagtatttgtattggaggtggaaacctcggcgttgtgagttacctaagtttgatgctgaaagatttcttgagatgatgaggaacaaagcatgggcattgataggtgattcgatttctcggaaccatgtgcagtcattgctctgcatgctatcaacggtatgtgtttgaattaagcttgtcattttcgatattttctttgttaagctttctcttgtatcattctttacaatatgagttcaacaggtagttttccattgtaattttcgggtgttatgagttcatcaatatttccctcattgatgtttctaagctcaacaacatcaacattgttttcgactttatgtgatttgtattcaaacttgcccaggaatatgttgtgtactactatgcttctgttgatccatgttagagtacttgtggattcaattgttctgccatgtggtttgctcgctcaaggtttgagcttcgagtctctcttagggtacttgctatagtttcctagctcccaaatagttatgaagatgggagttgctgtaacaaataacatgttcggggagggattcgtctttctgtcatgacatttgatgagttgttttcttaagatctctctattctttctggtctttcacttaatagtcagtatctgtgtttttatgaagtctatcatacatttacgaggcaaaaatttgggagccactattagtcaattgtttagttactgttcctttacgagtttcgattgttaaattacaagctttataaatgttaacaatggtaacttagcttgctgcactgtttttcggtttaaactttctctgattcattgtacgtttgtattggttggaatttgtttgtttctgtcttattgaatcctgcaatgtattttcagatgttcaaattaaaatgttgtttgttatctttggatgttatgctatctttttcaattctagcccttctcaaacacattatttataagtgtcttaattttgtctatcaggtggaaaaaccagttgaagtctttcatgacaaagaatataagtccagaagatggaactttccgacatacaatttgactatctctgtaatttggtctccttttctcgtaaaagctactatatatgaagactacaacggcgtttcaacatctgaagttaagctgcatgttgacaaactcgataagaagtggacaagtctttacgagagcttagactacatgatcatttcaaccgggaaatggtttctcaaatcttcaatctactacgagaacaacgaagttgttggatgccattactgtcaaaataaattcgaggaggtggggtttgattatgcttaccgaaaagcactgagagaagctatgaactttgtagcagcatctaatcacaaaggcatgatcctattcagaacttctacaccagatcatttcgagaatggggagtggtcaagtggtgggacttgcaagagaaaactcccggctaaagcaggtgactttcgactcaaggatctacacaggattctgcgtaaaattgagctagaagaatttagggacgccacagctaatgctacctctaatggggtcaagatgaaactcctcgatgttaacccgctttcactgttgagaccagatgggcatccggggccttacagagaatatcatccattcgaacgccataaagatgggaatgtacaaaatgattgcctgcattggtgcttaccgggggcaattgattcatggaatgatttgataatggaaatggtggtaaatagctaagaagttggccagtttgattcaaaatgtgataatgatatggtattcttgtaaaaagggttgctcttgccaagttttgacattggaaaattcatacttttatggtgagaagtgcaactgtactaggtatcaaaattggcctgtctttgacttcatttcattatgttatgatggtatagagaatagaaaggttatgattaatgaaggtcaaaaagagtaacattatgataaattgaaacctcaaccatatttatttgttgtagattttgattctcatactttgatgaaaatgattgtccacctgtattttcttagctattttgaattaggtcatgttacttgtcacctacctaattcaaaagatatttagtctgtgtgttgtttatatttttttttgctaattataatttttactccctgaat

SEQ ID NO: 225050 - DNA, 5205 bp, Cannabis indica
atacaaggcttttgctaagtttttatatgatcaaggcattaattttcagcacccttttccacatacacatgaaaaaaaaaatggttgtgctgaaagaaaacatcgccacatcaccgagactggtttgaccatacttcctcaatcttgtttggatatgatttatttgtggcatgcctttcaatgttatgtttactcaatcaaaaggcttcctacacctgtacttaatgatttaagtccttatgagtatctttctcaacaagaaccttgttacatatttctaaaaccttttggttgcaaatgctgccctcacttgaggccctataataattacaaattgagttttagctctaagccatgcctattttgggggtactctcctcaacataagtggtaatttgtgaaagcaaaataggatgtattttcattgctcgtaatgtggtattcaatgaaacacatttttcaacattatccccatcagttgagaactaggtaaactcacaaatctctcaaaattatcctacatctcaatatttcaccaatacaatatgctataaatctagtcattcttttatgcttagaactgcaacatcatctcctgaattgaatgcttcaatctctgctactattgctgctccaaataatcttgatgagccataatctggtgttcttggtgcttctcttgtggttgacactcttgcaactactgtagtacaaacgggttctcatcctactattgcaacatcttcagtaccttctattactgtctctgaaaaacaagttgctgctacttcttcaactaatatatctgttgcaatcacaacttgttttcctatgtccaaaactagagtttaccctattgatatatctactactgctagtgaaactgcacatgttcaagtggctgataggacttttgatcttgctaaaagttcatctaatactattgctcgagttcataaaagggttactcgatctgaacatggaatctacaagttgaaagcctacttagccacaaatcaccctcttcgtgaggctcttttacccactgaaccctccaacattcgagctactctcaatgatccgaagtagtttcattccatgaacactgagttcaatgccctcaagaatcgcaagatttggacattggttccttaccatccaagaatgcatctaataggtaataagtgggttcatcaagtaaaacttaatgcagatggtagtcttgatagatgtaaatctccacttgtttccaaagtcgatcttcaataacttggcattgactatgaagagacctttagccccatcgtcaaaccaactacttttcacgcagtgttaactcttgttgtctcttcaaattggcatgttcaacaactcaatgttagtaatgcattcctaaatggaactcttaatgaagttatttatatgcagcaacctcctagatttgttgattcctccaaacctacctatttttgcaaactacaaaaagctttatatggttttaagcaagctcctcgggcttagaatgaaaaacataaaaccgcccttcctcaccaaaggatttacattgtctaagtctgacaactctctttttgtgtatggctgaggcttaaaccttattcttctcttggtttatgttgatgatatcttggtgactagtccaaatacaaatcttattcaccaactcatttatgatcttaactcctcttttgcactcaaagacttaaggcctttgcattactttcttggagttgaagtgtttcaattcagcactggtatgtacctaacacaaacaaaatatgttactgaccttcttgttaaacttcatctagaaggggctaaaacttatccaagtcctactagctctgcacaaaagttgtctcgaagtgaaggtgctcctttctctgatcctactctctatcacagcacattaggagtgctatagtacttcactttaactcagcctgatgttgcttttattgttaacaagctcagtcaatttgttcaagcttacactgtcactcattgggaagcttgcaaacgactccttaagtcctctaaaggaaccatatctcaatgccttttactaaaaccaatagctgtaatggatcttcatggctactcagatgcggactgggctagttatcccaattataggcgctctactggtggatatgccattttttttggtgaaaacttgatctcttggtttactaagaagcaaaacgtcatcgctcggtctagcatggaaagtgagttttgtactctagcaaacgctgcggctgagatcaaatggatagtctcattacttagtgaactttaggtttctttgtcccaagctcctattttgcgggttgataatcaaggcacttttgcccttgctacgaatcctatttttcacactcaaagcaagcatatcgagatcgatttacactttgtcagtgactacattctagctcaacaactctcaaattgttatgtgtcatctggggatcaagttccagacattttgactaaagccttgtctactaaacgttttgattacttaaaattcaaacttcatgtggccaattccccatatcatttgaggggggtaataacatagttgataactaactctagtttaacaattaattttattaaaaaagttagttagcttttctgttaaaggtctaattgtgtaggtaaaactgtattaaacccttttgtttagttgagctataaataagatgaccacctaagcaattcctaaaatcttctctctttttcctctgtagcaaaatctcttttaggtttgactcatgtttttatggttcctttaattccttgtcatgataaatattttgagttaccttgcattgctggtaaaataaagaaggtctttcctagtctatcaacaataaaatatggataaactattttgttgaaagtttaatatcgtttcctaaggggcaagaggtgttgttatattctattgtccaagcaattcccacttaaaaaatgattctattttagttgcttattggtacgctgaatgaaatttatatcatgtgtgcttggttttagtttggaacagggtagacaaaataaatgcattggaatacttggcctcatcattcctggcataaatcaaatggatgtatgtactttcatgacattttaacttcttaactaagctcttcttgctaaacaagcaactaaattttttaattttcctaattttttggctgcaaagatgtgataaaaggattttagtatcctaatagtatgattgtggatgtgaagctttcgaaaagagcttcttttctttggaagagaattttctggggtcatgatatatggaaagttagggctagatggtttgaaagcaatgatgatactatttgtattagagaggatgtttgcattgctaaggatcatgttaggtgtgcttattcttatcgtggcgaatagattaaaactgggttcttaatctgtatgggcttatggaatattcctctcattggggatataaaggctatagtggtattgtctattctctcttcttcctttcagcacccaaattatcttattaggcactctacggagtctagtcattagattgttaaaattaggtatcagagtgaggttaacttattgagcttaggttatgattttacatcgtctagtcaaatctccttggtgaaaatttatgtgggttttgtctatccctactaaggtaaaatatatttttttggaaagcatctctaaaagttttagacctacttatgctaatttgtcgagacatgggttctcgctcccctcagtttgtcgtatttgtttccaaaataatgaaacaatgcttcaagctctatagatgtataattctcttaaaaagattcgatgtgagattgatgattaaaaggttttgatcaattggatggtgccttttcattttttggtgtgcttattaggtgcatgtatactcttggaatgaaagaggtggaagagtttttggttctttgctggaggatttggtgtatacggaatcaatttgtgcatcacaataagctccttgaagatggcatggtgagtttctaggcgctgaattttctatggcagtattaagatgctcaacaacctttttggagtaattatattatcttagaatttagggataacatgaatgaggttctatctcaaaaccaattggcaatgggttgagtggcccattcatcttatatatcacaatttcttttccacacattaacaatgtgagactaaatcttaatatattagtactactattaatgaaatccctcttgtgctactatcgctcttgctcgtgatgaggtgaacttatatgttaatgttagtataaatgagaggctttgctctattttcttaggtgttgtcattttgagaaggggattgtgagatgttcttcgaccataactttgaaggcctccattaatgcctcgcatgtggttgaggcttctattatccttcaaggcatgttcctttgtattcaacttgttttccttaagcttcgtatcaatacggactgcctctgagtttgtcaaagtattcggagcaaggaatctactcaatttgaatttggaattgtgctagaagacattttccaaatctggtattttttttcttttattttcattttcacattgtaataggtctaattactttttattgctttttctcttgtaaaacatgattttttttggaggattcaaaagtttggtggtttggacttcctatttgcttttggcattagaaccttttttttttttgatgtattttgtatatcattctcacgtgtctttcaaaattttatgatattttttttaaaaaaaaaatatgagatttatttaaaaattaatatcgtggaatgaaaaaataatacttaatataaaaacacttgattcataaattatcattaggtgacattatagggcgaatttgtaatagatgtgtgtattcattattaaatggaattatagttagtggcaactgagagaaatttcaagattatttatatgttacatatcaatattttattcatttgttatgggccaatttagcatagttgagctatagagaaaatcagatgtagctgtactattaaaattgtagaaaaaattgagctggatgtggtaaattataaattttaaaattatatgagttgttgaaattctattataataatgataa

SEQ ID NO: 225051 - DNA, 2313 bp, Cannabis indica
ctgagatgtaatcaaataaggagcattagaagatattcaagaaagatttatgaaagtgatctatatgttagatattaaggaactgtatatcagttatccttgtatctcaccaactcattcgaaatttatgagatggtgcttactttgggggtggaggagttattctataataattcaatgtaaggttttcttaactttatatgtgtttaatttatcgttttagaaagttcatatttagggtgttaaacaacatacttgtgagtagatgtaagatcctggtaaaataatttccaacaataaattctccgatgcttcactcttctcatcacaacccgtctatccctctctcgtggtaaaatttgtgttttttgtccttaatggatccttctcaaatttgtctagatatgcctgctgctgacctctccatggagaataacattctggttgctcaagacattccacttgacgatgctgctgatccaacaaccaaagttttggtgggtaaggtatttctccctggctctcttcctcttcaacgtttaagggatcgtttggttaccttgggccatattcgtaacgggttaactattgattttttttatggaagatctctttctactaacctttggctatgctgcggagaaagtacgaattttggaaggccagccatggcattttttgcagaggcatatagtgttggccgaacttcctccttttgaatagatcatttctgcgaatgtttgggtagttcctttctgggtacaaattcatagattagcaattagaagaaacactgaagccatggatgtcatgctcggtaactatatggggacttttgacaaatacgacaactcaacacgctttcgctttctgcgcattcgtgttcttctggatgcctacaagacacttcttagaggtaaaaggattcaatttgagtattcccaaaagagtttgtgggtggacttcaaatatgaaagacttgctgaattttgtgaaatttgcgaacgtattacccataagatggatgaatgtcctgctgatctcaatctacaagaacagggacttcctgttgaacgtacctcttttcctgtgatccgcactacttgtctccctccaatgctctccccaggcctccactagcgcgtccctatcaacaaaatcctatgataattccgtctcttcctgtggtgcttccaggaaactatggttttattctatcccttattactcttattctcctactaatcactacattttttccaaattttatttataactactgtttattcaccatttgttcctttattctgttaattaaatgtccctgctattgtttctggggttgttggaactgctctttccactattatccaaccaactttgaaatctgataaaggaaaaggaaagcttgtaattgcatctgagtcttctactataactaagtccttggatgtggctctaactcaaaagcggtcaaataagagaaataatactcaactaattcacccaatatcactctctcctactaagcactcccaagaaaaaactaaattccttggtatggataaaggcaaagctaaacttgttgatgaaacttcaccaactgatacttttggaactacaccagacatcattattgccaagagactgaaagctaatgaggataccaccactactaaataatacaagaaatgaattgtattcagcattactaaagtcttatgtggttttttgttgtccttttattagtttagtactttctcatttccatcttttttatgttaagtctatgtttttcagttcttgttggtgttgcaatggcaggctgaggtataatctagtgatgatattccttatttagcctaagtagcccatttagatatgtattacttttcttttatttagtagttatttattatattaaatctgtgttcgttcattgttcaaaactatttcaaacagtcctattttattatagtatattccatctactatttctggttttaaattttccatccatatatataaatatatatatatatatatatattttgaagtaaaacctgtgcattttttcgcaatcatgagttgggtgtaatcaatctactggctaatcatgtatacactattccacattcattaattgttcttagataatgaataaatcaagtgtctataacatgaatcataattaatttgtattatgatattttaattaataaaaacatttaaaattgggccttggtaggttcactaactaaaaattattaaaacaatagattcttagcttttccataagtgagatacatcaca

SEQ ID NO: 225052 - DNA, 1438 bp, Cannabis indica
  modified_base (982)..(982): a, c, t, g, unknown or other
tcacctataaatatagggtctcggtccccgagctcctcactcattctgttcataacagcaaattccatctaaagagagttgagagagcgaggaagcccgattacccatggtagtcaatttcctttgcagatcaaagcttatgtgggtttgaagctcaagattcaatggctggaggtatttcgatccttattcatagtgtatatatgtttgattaattccgcactttatacttaaacatatatgtttcagtttatacatataaatgtctaacatttttgtcaaatatttacatattttaaccctacaattttatcattcagatttgttaaaaataactaattacaatgaaagatttatttcaatttggaccaataaaaacaaaacagctaattaattagtggtatgggtgatttgacctttttttttgttttaatcataaatgtgggcaataatagaattttgtgtgtaaccttaatagaatatatataatttatatatattcacttcattaattactcatattattattgctatatgtagtttgattttcctattagctgtgatgattattaaaattaatagctatatttttattccctaaaaaaataattgatgtaaaataaattatataattgatatatcattgcaattgtactcttcaatacaaatatcattgcaattttcctgtattttattagttggaattcacatatataatataaattacatatgtatacacatagaaattatatgtcggcaataatgtttattgatttctatgctagcacatatatggtgtttttcttagctcatgtttattataatttcaaatttaatcaattgattaattttttttagtatagcttaatagtaatactatttattaataacttagagttattaattaattaaattaatattatacataattaattagacagtctaataaatttacactacttaagttttttttttttttttntttttttttttatggaattcaactttattaattaaactttagctaccaaacaatgtaaatcaattgaaacattctctaaactgaaacgataatcaagaaataatatagcaattttaacaaaattatcgatcactaaattaacagatggtttaacaataataactaagatattttattaaagaaacaaataaagttttaccatcattaatatatgttcaagtttaatatatatgaacttaaaactttacaataccaaatatgattttattaaatatttaaagtattaaatatgtgttacgtatattttttttttgtaattactactctttaggattttgatttcataaccctccacatatgcactctccacttgagctaataatccacttgagttaaccttaagtaatcttagaatatataaaatattttgtaactaaataaaaatattgcaaaaaa

SEQ ID NO: 225053 - DNA, 2654 bp, Cannabis indica
aaaaaattaggttgtattattcatacaatatatatttttatcctaacataatattatttattatttaatacaatacaattctaatagcctttcaatgaacccatataatattatattgcagctataagtaccatatattaattcatattaatttgaagacttataatggcaaatcttttgtttcctattgacctagattactgcccaatcgtagaaaagtttagaaagaagaaattagtactttttactgaccaaatagctagctagtaattaatgaatactactagacgtatcatgtgtaatcagagaacttttcacatcattgcaatgcagggtacttgaagtagtgcagatatttaattgctgttacaaaacatatatttatatatatttagaaggtatatataccttgtactttttttttgaaccctgttgttttggagtactttttctacaaaaaaataactattaccttttttcatgtgtctcttaaaatataattaaactctattataaaggtatagtttacataaccagctttgctagctaatacaaaacaaataattaaagtacttgattaacaaatttaactaatatatatcaaatttaatagtagtagaccatcacaaaaatatatatgtatataaatagaaaaaagatttagttaatttgtttaaattaaaaaaataaatatatgtatatgtatagttggtggtggatatttagatgaatttaaatgaaggtcgttttcagattaaggtgttgtcgtttttgtgcatgttttgtacacgcattccagtactactgctgctgatcactgcatccccaaattttgtcaatatttttcttgaatttccctctaaattataatataatatatatcttctctattaatttcatcacttaataattggtgtaaattttaataaaaagaaaaaatcaaacttgttaaggctttatataggttaactaagccccccaaatttttgcttgcacgagtgagctaattaagcgtaatttattatttgataaaacaatgaagatattaagtggcatttggttatgaggaatgaaagcaaaagaataagaatcaaaataaattaaaataaaatttaaaatgcatacaaaaaaattcatgtaaaaaaaatacataaaaaattgataaaaaaattattgatttttttttttttatcttgtattgaaatggctttctcttccattccaaaataaaatatagtcattccattaaaaaatgataaataaatcattccaatactttataaaatgtaactaaacaaaaaaataaaataaaattatttttttttattttttaactaaaataataataatttttttaatttttacactttaaaataattttttattttatttttacaaaaaatacgtaacaaactaaaaataataataatttttttaatttttacactttaaaataatttttaattttatttttacaaaaatttacgtagcaacttacataactacacggaacaacctaaatcgtaattaaaatttacataacaacccacgtaaaaattactgaattctaaaactataaatttacaaaaaaaaaaaaaaaaaaaaaaatagcatatgtaattctaaaaaaatccaatatacatgtcatgaataaggagtgattttggctggtctctgtcggtctaatattgataattaattgttgttgtgtaagtaaattaattagtgtttggaaaatatatatgtatatgtatagtgtactaactacttatttgactgtaaaaactcttacttgaatagtgatagttcgatcatgtcgtttctctcgaatcgatcggtcacggcaccatcttcaaacacgtgataataattaattgaatatgaatatgtatatatattttttataatttattaatatttatttgcaacaatcaattagcatatttatgtaaatttattaaaagctaattaattaattaaagcaatgggtacgtatattattactaataaatttctgcaccattggcagactcagctttttcccgccaaataaaacaaacattctcctccaaacagctaaaaatatttatatatatgagaatctttaataaactattattatcaacgtctctctcatctcatctcatctcataatgtatatatacatatatacatattacacacaggattatatatatgtacgtgaagttatcatgcatgatcatatgttatgctactatatatattaatatttgagtaccaattatacatctatacgagtacatcaagcttttagaattgtgtttttaaaagtgggaataagaaacagttttttggtcattttaaaaatttaatagtatttagcacaaactatttttaattttttcttactaaaaaaattaatattttaactccatataccatggcatgaatccatctggatccgagttcgaatttggttccaagtctaagatctgagtattggagcaaaaaatataaaatgtaatatgtgaaacaaaataaaattatttttgaaaattgaaaataatattttaatattttttgttttcaagttttttaaaactcaatttttaataaaaaaaaatagtttttaaaaatatttaccaaacgacctaaattagtttttaaaaact

SEQ ID NO: 225054 - DNA, 3866 bp, Cannabis indica
caataccaagttaccaacacttcattcatggcatccatgactatcatcactcttttcttggtttttctttctttaaagttccaatattcaaaagcacaatcttgggttagagcagggtactggttttcaggtagtgaattcccaatttcagatataaattctgaactctttactcacctaatttgtgcttttgctgatgtgaactcttcttcctatgagctctcaatatcatcttcaaatgaacaattattttcaactttcacaaacactgtcaaacaaaagaacccttcagtcacaacacttttatccattggaggaggaaatgcagactacaaagtcttttcacaaatggttagtaattcatctcatagaaagtctttcattgattcttcaatagagctagccaggctcaatggtttccaaggcctagacctttgttgggtctcagcaaacacaagctcagacatgtcaaacatgggacttttattcaaagagtggagagatgccactagcaactcatcgagccaggaaccacaattgatcttaaccgcagctgttcagttcacaccagatgttgaagacacttctttccctgtggactcaatccggagccacttggattgggtaaatgtcttggcctatgactactacgggcctcagtggtggaattcaactgctgcacaagctgctctatttgacccttcaagccaaactaatactgattttggtatcagctcatggattggcaggggaatatcttcttccaaattggttttgtcattgccttactatggatatgcttggaaacttgtgaatcccaatgaaaacagtattggagcaccagcaagtggtccagctatatctgaagatggatcaatgacttataaggacattaaaagttacattaagaggtataatgctcaagtaacatataatgctacttatgtggtgaattacttctctgttggatcaacttgggttggttttgatgatgttgaagttgttcaagttaaggtttcttatgccaaggagaagaagttacttggttatgttgcctggcatatagctaatgatgacaattgggtgctttctcttacaggtagcaaatcaaaattcccagttgcaatattttctactgcttttttatgtaaatctttactatgtttacagcaccgcaaaaaactcagaaccaatgttgaaatttagtggcaaataattttgatttccattgtgtttgctgataaactttcttgatggagaccttgccaagtccttttccctaattttcaaacattatcacatctggtgggcctaaattatagaaaatcacagttcatagtataattaaaattgttgacatttctcattagattagttggtcggcaagacaaaaaatgaaatttcctgtataatccaaatgacacggcaacaaagatagcatataatccagtttaactgctatgctagttcaaactacagagtttgacaaagtaaaaaagatgtaaataaaaaaatcactttcctcttgtccatttcctcctctgattattacctaatgataatgttaattatccttgtagcaaaagaaggtggtggaagaaagaccaaaaagaagtggaaattgttagtaatcattttcacatcaatagttactactgttttaatagtagctgccttgctattttacttcttgaaaagaagactcaaatcaaaaggtatactctcaaatatgtcaaataacttttcagctctctaataagattctagagaacattttaatgaaaccaccttttcttaatagttgaagtatcaaagtatccaaaaaacagtgcagcagctgctggagattttaatagcaatattcctaatcttcgagtctttagccttgctgatgttgaggctgctacagaaggtttttcagtcgaaaataagctcggacaaggtggatatggtcctgtttataaggtgaattttcattaatattagcatttgttgctcaaacagctaacattgtcttacaaagaaagcatataaagcattgagtgtgtttggtagggtgtacttccaaatggagaagaaatagcagttaagaaactgtcagcggcttcaacacaaggattcgaggagtttaagaatgaagttgtactcacagcgaaacttcagcatgttaatcttgttcgagttatgggattctgcattgaaagagatgaacaaatgctaatctatgaatacatgccaaataagagcttggacttgtacctatttggtctgccatctttccttactcttagtttcagtaccctaaattaatgatcagtggtccaatatgagtaagttgccattagtactaattttcattcataatatccatatgtagatcctcttagaaggtatgtcttggattggagaaaacgtgtaaacatcattgaaggtgtcactcaagggcttctttatctccaagaatactcaagattgacaattatacaccgagacttgaaagctagcaatatattacttgatgatgagatgactcctaagatatcagattttggaatggcaagaatttttacaaaagatggacttgaagcaaacacaaggcgaatagttggaacatagtaattaccttcccaataatacttcttctacctaagctcacttgttaattctatgtctaatcccattaattgcagtggctacattccaccagaatatgccaagcaaggattatattccaccaaatcagatgtttatagctttggagttctacttctacagatcataagtggcaaaaggacagctcttgtttatggattgaatgaagatctaaatctccttgaatatgtaataataatttatactcaatcaaaggttattgtattttccaaataaattagtgatcaaaaactgaggttacatatttggaattattattgtttcaggcatatgaactgtggaaaacaggaaaaggaatggattttatggacccttcacttgaggactcacattcatcatgcaagttgatgaaatgcctggaaatagctctgttatgtgtacaagacaatgcaaacgacaggccatccatgttagaagtttcttcaatgctgaagaaccaaaatgcaactatggtgacaccccaaaagcctacttttgcaactagaaatagtaaaaatcgggagggatgtacagttaaatcttggccagctgatacttcttcttcggtcaatgaagcttccatctctgaggtgctaccccgctagctaatactaatactgtgtaataactaaattgttcttgaaattttgaacataaaagagttgtagctactagcaatcataaacataattttactttttttgattgttcattgatataaagtatagagtgcaaaggtcaaaatacaggatgaaattcctttcaactaagtagtttgttttctatctcaagtgcaggtttagtttttaatctccattagtttgtttaaggtgtttagacatttttgagcattgttattaactgatatgatactctataataggttagcaattttcatattatttattaagttaaaatttgtaagacctacccacaatactctcaccaagagaaaaaacattaatattgaataaaccagaaaacttgttacagttttattaaattttgctgtctttttcaggactgagatcacgaactcggatctcgcgaccaatttcgttgtcaaatttgttgtctaaccaaccaattaaacaatgtcacgttatttaatgaatttaacatcaattaaccatttcacacttcttactccatctgttaataatacttctgccccttgttataaattaatataaattagggttttctttataaat

SEQ ID NO: 225055 - DNA, 3726 bp, Cannabis indica
tgtactgatttgagtttcaagtcattccacaatggacttgtaatagttaggccagcagtcattgtaatgaccttgacgtcttcactgagtatcctcgtctttattgttgcctctaagaatcgttgtaagtaatctttagaggctcgtcttcttgctgtttaatgctgattaaatcgttgggcttaatcggtctgtaccttgatgaagagaattaattatagaattcttctttaagtgtttcccaagaattgatagatccaagagaaagcttaagataccactgttgtgctgtttttggtagcgtggctagaaagattcgacactgagaatcatctcggatgctttgtaggtcagtttgtacttcaaagtcgtgtatgtaggagagagggtctcctttaccaatgtatcagtgccacacttgacttttgaatttggaaaggatctccaaagccttgatttgatctgagagatgtgaacatcggtcatgttctagctcaaactttgttttctttagagctatgatactctttaccaagacggcaagagtatcaaattcagtcttgcaaacatcaagtgtggtgatgtgcatatcaactggacgattcttattggtgtcgcttcgtaggttcttttttcttccgagtcgatcaaagacattgatcgatccgaaccttgtagttgttgcctggtcatgtggccttgctggtaactgtggggatttatcctgcatgaaggtagagtcatctctcgagcgttttctcgtggtactatactgagtacttcctttgaaatagtcttcctcagagtgacatgagtagaggaaattgaaaagattgctcaagttcaaaacgtctccatgcacccatgggaagtatttgtataactgactatcaagacaataggcaaagtacctacaccatgcaccctgttcatcacaaaattatttacgcatgtggagtagtttgctgatcttcaccctctgaatctcatactcttcactttcatggtagagcttctaggtcccactcccaaggttgactacaggcccctttccctttgtagggtcacagggtggcctagagtcattagacctggaagagaatcccatgaaggagattggtttcccgtattgttcaaatttcttctagcagaattacggttggtccaatcagctgcatgtcatggacctgtagatctgcattcttgagtctaagtccttacaaatacttgatcgaagcttctttccctaacaagtgatcgctccacaatagggagagaacccatagatccacatctttgagtctgagtccttttggactcttgctcacagttcgcttccctatagggaatcttagtacctactgctcgctgagtagtggcatgactactaggagtggtagtgttactttgcgtgttcatggatgaatactgcttgcttgaaattacgaattcctttcggaacaaagctcctagaaaaaaaaaaccataatcaagaactcgagttgtggctctcaatgaaagcagtcaagcaccaaaatattgatgctgaaaagtggctaacactagctcgctagattagcgagatgaataatgagtttatgtaaataatttagagggacacacaaagtttatagtagtttactccccatgtcacaatggcaatggagctatgtctactttgagttcttatttctcacgagaattaaaagaaaattgactaagtctgaaagctctaatttatagagagagaaactagagaaagatgctctgaccttattggtacatttctaaatgtgacaaatgagctataggagctctccttttataaggaaagatgtcctattaaaataataataaaatattcaaaaaatgtgaaaaaatacatttaggctatttttgatcgttgatgatgatctaacggtgaaattgactctggaggttagtcgtcaattttttggagcttgaatgtcttttgtgggacccgtttcaagtaagttgtagttagaatttgtaactttcttaaggattgaatttggacttggtctcttccaaattgcaattggagtttgagacatgacttgatagagcattgaaatagattcaaaatgcaagttgaatcgcgtcaaccagattactattgagtgagtgatggccattttactgaaggctgctcttatactaatgcctaggttgacatccatcacccaagttacatatgatgtcaacttggatgttggttgagtagaaaaacatgctagggatgtatttttggatgcctaagtgatattttaacatcacttagtcaatttctttgttctggggaagtcgttcactatttctcggagatgttgctattttgcagaattggaagactcgaaactacctgatttgtgataatcactttgccaaaaaagtgaaaatatttagttgtgaattcagcttgtctaagttcatagctctcatttactatgaaaaactagacaaatgctcaagacagaatgagaatcaaataagcagaacccaacgcaccaggtcatacgccaaccagggcgctaggtgctctttctagagcttctaggatgtcgttttaatacgtctaaggttcttaaaattgaggaagaggtctcttacccaatttttgaccatgtcggagacaatgctcagagcagaatttgtatttgagtgattgaagccagtgtgtcaagttgattgttagcttaggcgttggcccttactgacctccaggttggttagtttctcctctaaaagcacttgtttcctcattttgtatgaagacgaagaaaatgctcgggatagttcttcaatttgatgcttggaaatgtcccaaattgacaatgtgtcaacctgggcactgtgtgcctggggcacttggtgctccgggtgctcaaaaatgaaagttctccgattctaattatgatgcctcaaatatgttcatgacatgtccaattcatgtcctagtacaaagtttgacccattttcactaagacagtcctgaaaactaaaacactagttggaatgtcagcgtcagcactgggtgaaactctagatgctcgggttgacttttggggtgttgtttcatgtattttcagctcccgagccttggacttagattcttcatgtcttcataactcaaagtactaaaatatatggtgacttagaaacaactttgttgaatctaaatacctgttccggagcctcaaagtccacgtaggcacatgcttagtgatcatttcccaagttatctgctatgactcgagtttcttcacttcaagaatatttttcttcttatcatgtattaaatattgatgtacatattatcagagttacctttgatgtaaatagaagtaatattattatttttttttgggtaaagtcttattttatcattaattattattaaagtgtgagacacaatgtatactaattattgtcaatttagaaaggcatcttcttttggattgaattattgttcactttttctattattaatttctttttaataaattaacgatcatcaatagatattattttatattcactacaaaaaatcttatttttagtcacaacaaaacttgtaattaaaagtgaaaaaattgtgactaattataaatcatgattcctatgttgtgactaaaatgtccgtggttaaaagtattagtcacaaaaattataatttgttgtgactaaatgtatttttagtcacaa

SEQ ID NO: 225056 - DNA, 4093 bp, Cannabis indica
atgggatagtcaaagttgctgctatggcagctccaatagttgaccctggttttgaaggcactgaagtctcattgcagtcaaggtgatcaaacgttccgtactaaattatttaacacatgtattaagttaataaaagtgattagaccttggatagatgcttatgaaccagagactaggcataggatgtgtttaaagttatgaaatattgaaatgtacactttcaaaaaaaaaaaagttatgaaatatttcatataaaattgtcactacataaccaataagaaaattatatgtttgttcagtaacgaaaatttacatgaacattaaaataaagaaaggaggatagttcagcagctaaccttttttatttcattccacatttcttttgctgtgatacccttggaactaccagatattaagaagtaggggcacttagaaacatggacatcatccatttcctctgctgctatggcaaaagtaacaggagactgtccatctgcagttctgaaagttcacgattggatgtggattagagattcatcaagataataagttgtaaaaatttaatgagttactgtttcttgaactaaattaaagattacttgtggtgtagaagtactccatgcactccattctctgtcctgataagaattaagcattgaggaatgtttaagttttagcttaattaacaaaatgggactgagaaacagcatagatcaaacgatgatgttaaagaaaggctaagataaagaatgccttcatcttgaaatctgaattatccttaactaatgatactctttagttataatatgcccttacttcatttctgagttataatgatcaccagaagctccagagatcccaccaactgaattctgtattatcagaaacataaattgtttaaaattataaaagattatgtgaatcatgcaagtgtttgactccactttgtcactaaattataccacaatggaagggcatacagcatgaaagaaattttactcatgggaactgggtttattatttagtattcaaagcctattcacaaaaaaaattatgatgtagttaagagcttaggattcatgttcagatgggaaaggaataaaaagttaatgtcagaaaaaattgcctaacagagacgaaaaaagaatttgatcttggagtatagttttacaataaccaagtaacaaacaaaagctccttggtatttagtggaaaggaaacatctgaatatgcaccatataatctttctttactcacagcccaagtaaacatcaaggttacatccgcagaggtccgccctttgttagttacctgaaatcatagataaagaaacttcttaggacttaattcaaagaaaatgctactttttacaaaatttaataaatatatatatatatataaaatatatttccatccctaccgtgaaagtaaatgctgatacaggaaaactggtttctttgtaattgtggggaataaatggtgaaatttgacgtgaaacaattacaagttctgggtcaggttcacctacatttgaatatgaagcaaaacataagatattgcaagcaatattataagttctgccaaacagaacactaaagtctaataccatcatagactgtccaagctctgggaaatagagcatggtatgtacacttctctgcatccaaattccaatcccatgattcaatgccagaatttttgaattctctggataacaatcactagtcaatttagttgagatgtcatttcaaaaaccttaaagagtataaatcaagtcctgcacaccaaataactcacttggccacctctaggctcttagggcataatacagttgagtatctctcaccactgggccgtttaacaaaaacctgcgaagcaagggaattctgatggtcagtttgtattaaaacatttaggtaaagcaaaattagctgctaaaaaaatatgttacatgttgatagtacttgataaatcatttctccagacatggtgaatcataaaatgctaatctcaaatcagtgtccaacacttctataatctgattactgtctatgtttttggaagctatatttgaaccaatgaagaaaaactcactgaaaactgatttgctaaaactgggacttcctcatattttgtgggaaatagttgaaaacgctgaaactcgcctctgtaacttcttccaatgcttcctgcactaaagttcatggtttcagccgtaagaataaatcagagaatgaacttcaaatcaaagtttcgctatactttgactactaagtgaaaagtgttggttttccttgtgagaatcatctttaatgttatgttttcatcaactaagatttctcagtttcttgtgaaaaccatcatcagctaaagtctccaacaactaatgttactggacgtgtactattcttagagttgatttaacaggattactggaatttcaactacatatatgtcacctataactatttgtgattacaaatcggcagcaacattaagttgttttctgtggggaatgagtacctacccaataccacctaaaggaacaccgtggttacttgtaatatggcgcttcttgaacatgtcaaacattgatatctgaaatttggtaggaaaaggtgaatgtgaaggaaaatatagctgaatacagaattcttatcttcatacaaacgaaaaagataccaaatcattagtttcaaatttcaacttgaagtgagatgattacttttccttctgctgcttcttgtctaacaagtctcaacatccgaataccaagaggggccttcagagttcataaaattacacaaagtacagaaactagttataaaattggagaataatctaataagaaaaagagatcgctgatctcaagtaattaaattataacaaaatataaacttcttcatcctttcctagaaaagtcaagaaagtcacatatacattttccctttaccatctgaactgtctcactaaaattgacagagaactctgaaggaactttttcaatactgtctaatttccgttgccaagtcagggcagcaggtttcccaggattaacctaatatattaatagaacacaaaaaaaaaaaaaaaaagaattagtaaaaggtacattactacaaatacataaatttgactaaaaaaaagcactctttataggtaatacaactagacaatcagttaaacaaaataagatgaacacaaatttcaatttgaatatagagatatattgcaaatatacataagcagaatacatattagcttaccttgtgtgaagaaaactgagaaggaagttcaatttcgcactcttcttcataaccattttccattttcctaaagaatcatatagaaaaaagcaacgatttacacaaaatctttctaaaagtaaactatctccacactagaagaaacttaagagtaaaaaaattgatctagtaaatatagaatattgcactgtacattttatagcagtacaaacaaacattaattcaatgatatttcaggaagacccaacttcataacaagaatatatatttatatatatatgctcaagagataatgtactactagtacttgtctttacaggaaatcaaattcccattttaaggatcaaacatgtggtggtattaatggaccactagacaatttgatttgcccttttatcactttccattctcaaagctttaacccatcattttttgccataaaacagccatcataaatacaaatatcccattacaatctttctgattaatcaatcttattcaaagaaacaacggattcccagattattcactttgaagccgatttctgtcagaacgaacagatgccaaatctaacataactgaactgatagaagcagaaactgaataattcatcggagagaaaattaattaataccttttttgaaaaaaaaaataaaaaattgaggctatcaatttgagcagacaaccaagcgaaatgagggcaactaagagaaaagcagagataacatttaaaatgtatatacaataatacaagtgaataattgttttttttttttatatatatatatatataaagactatttaatatataaatatatattgggaac

SEQ ID NO: 225057 - DNA, 2180 bp, Cannabis indica
  modified_base (2123)..(2123): a, c, t, g, unknown or other
actagccaactttcatcaaaccccaactttactcctatcaaatctcaaagaaaaccattatattatctaatttcactcaaaaactataattttctttttcttttttaagtacgtaagagataagaattaattgtgacattagcttactatcaaatatcaatcatcaagctaaatatctccatggacaaacaagactactgatttggtttggtctacttagtttcaggttccaacctacttatgttaatcccttttagctactaagaagtaaaagaaaaattcaaagatgattctttccaaaactctttaccgtgattacacccccatcgtaaaccaaatcctagccaccatgcttcaaaaccgagaattcgacacccatctcgccgccttagccaccacctctcaccgctggagctccgaagcggtttctgaggtgttaaggtccgtgcccagattcttcttccggtcacctcgttccattggtacccaaaaaggcttcagacaccgttctccgttgaaacagcgcaaactgaaagaagagcttgataggttcggtaatggggtgcttgttcttgggccagctgcttacagagaccccaacaaggtggagttgggattggataaagcgttggaattctattactgggttgaggcccattttggattttcccatgatgagaaaacttgccgggaaatggctctcgttttggctaaaggtaatagattgaaagctctttgggattttctcagagacatgtcaagtagagggtgtggggagattgttactacttcgaccgttacctgtttgataaaagttctaggagaagaaggtttggtcaatgaagcattagctgctttctataggatgaagcaatttcattgtaaaccagatgtttatgcttataataccattatttctgctctttgtagagtagggaatttcaagaaagccagggctttgttggagcagatggggttaccgggatttagatgtccaccagatacatttacttacacaatattgattagttcttattgcagatatagtttgcaaactgggtccaaaaaggctattaggagaagattatgggaggctaatcatttgtttcgaatcatgctcttcaagggctttgttcctgatgttgtcacctataatgctttaatcaatggttgttgtaaaacttgtcgaatcgggagggctcttgagttgtttgaagacatgagccaaaggggtattactcccaacaggattacttataattcttttattaggtaccatagtgcagttaatgagattgataatgctgtcaatatgttgaggaggatgcagagtatgaatcacggggtgccctcgtcgagttcttacaccccgattattcatgctctttgtgaaactgggagggtattggaagcccgggattttctggttgagttggttgatagtggctcagttccaagagaatatacttataaattagtatgtgatgcacttatgtcagcaggagaaaccagttctcttgatgataactttcatactagaattaaagatgagattttgaagaggtataagcatgtggggaagtttaaaccagtaatgactcgcagaggatatgatgacatggaaaattgaatgaaggagaagatttttatttgacactgcggaattcttatggagggtctggactctggaggctttacttacctcaagttagcactcgtacaatctaacctaacctggttttcaccaggaaatttgttgtgttgattcttgtcgtaatggttgtggcaagcattttaaaataataataatagtataattttctcatcaagggttctgattgaaatctccaattccatcattattttcccatggaaatagtataagcttgtttattactaagcaagaatttttttcaagcaaggaaaaaagagtacacaaattcttgtgtcatgtgtgttggattgaatgaattattttccccatgggccatgcagccatgctcagcaactctacatgtttaatccaatccattgatcagagacacaaacacaagccagccttgaattcaatcgtgaccttggaatgctgctagctacgtgggactgcaaattgtgaaaattangttttttttttttttggatttgagtctaaaatttgaatatagatgattcagatgata

SEQ ID NO: 225058 - DNA, 2834 bp, Cannabis indica
ttaaaaggtagtgttcgtataaatataaatatatgtacaattccatatatatactcatatttttaaatacagtatcaagttttatatacctactgctggactggaaaatgtcactgaaaagaagttgagtgtaactttccaaatgatttctagaaatttttttaattgctaattacataaaaacgaaggccaaatgactttttgcgacaatgatagaatttttttttctttttttcgcttaacgattgaaattaattattgggattggtttgaatcacattcatttgtaagctcgatttggttcaaacctaccctttgtactaccctttcaaaagaaaaagaaaaggaacattttgttattgacattataaagtactacaatgctatcattttagttatatatttcatttatccagtctagtttgaatgataattcacataaaatatcaaaaaatgttggtgaaagaagctatcttggacataaatgcaaattgaccaattttaaataatgatgcaactcaccaattatctttgacagccctcacgaatgaaatgctcctcagtggtaacaaattaatgccaaattaccattgttttgataaggagcaagaagaatgtactattgttataaatatgttcataacttttgacctctgtttttttttttttaatggtattttttctagaccctcaagatgaaattttctttcccctatgtatatgattggacaataatattattgtgctatgtgtagcatatatgccatttgaagctaaaaaaaagttcggaaaaaaatgaaaagaatatatttgtttaatagcttaaacacttcaaaaaaaaagataacattttcttttggcccctataaatttggaagtataacactatttttgttttattagcctacactcttttgctgaagttattagcccacacttagataagaaagaaaaaagtggaagagagatattaatagacgtttaactattgcttgaattgtcaatgaattaagaacaaggaaacattgacatacattggtcccaatgtgttccttttcccactttatcattacaactacgggaaccttccatttacaaaatcattatctatatggtttccagctataattatacatacatctatatataacttccaaaatgctttcatttgattgccacatattttgatattatctcaccaaacaaaatgggtttttttgtgtgtctttattttagcacttaccatctactaatgttcagctaagtagtttggacagtttgtgatcttttttttttctttttcttttttttggtggtgttgttgtttaactctcataagatactaataataacataaataatgcaattttgtactgcttctgccttgacattttcttccactaagtatgtaaatgtaatgattctttagcagaataaaaagtgactaaaaagtctttcaacttgccatgtcttctagtgttgagcctaagatattggtctacatcaacagcagaaaacatacttatagacactcataacaaggtttgggatgtaatgaattatgcaaattaaagatgtttggttatgggtctttgtccattgaaaatgcatctctttcaacttaatttatctaaaattgactgtcttcaaagattctcaaagtttcacacttgtaagtgttaaaatttgccacaagtaaaagaacttcaaccattttatcttatctatctaattcactttcatacaagtgcaatagaaattctaatttacactcttttaaacaaaaatacacctctcttttctacattttttaaaaacaaatcaaatcttttttataaatatatataaactgaggaataagacggtaacgtgagagtctaaaattacttcaaatacctctatatatctattttctccttaattctcttatttttctatttttttttctactttaaattttctccttaaatctttactttttcaaaattttttattctaccttaaattctctcattttttttttatttattttatttacaccaacaatagccctaatgatatggacatcaatatttggcatgtggcaagaaagatgacatctcggagttgagtaatctcgagtcatagaaggtcaatccctacaaaaaaaaacctattttcaccgactaaatttttagtcattaaaactcgttaattagtcatcgaagattttttacgactaattatttttagtcgccatttagtcgctgaaagtcggtcgtagaaaatattcaacgactaaatatttttagtcacaaaatagtgttattttctgtgactaaaatttagtcataaatgattttaaatttagtcgcaataaaattgatatattggttacatgagtaccaatgtgcactttcaatgaccaaaaaattaaacttcaccaactaaaatttagtcattaaaaaattaatatttggtgactaaataatttagttgtcagtaataaataaataattatataaattaagcattcagtgaccaacatttagtcttaaaaactaatttataatatttttttaatttagaatttatattcaataaattatttattaaaaacaaattatattcaaagctatatttaaataatatgaaacacatttattcttggtttcaaagaataatacatttattctttacataaaaatttacaattacaatgaaatccttccttgaaccgtactttgtccatgctgaattacataaattctaaactagagattacaatagcagactccaccaatcaaagctgccaacaaggaacacagaaaaagctaagagagagagagagagag

SEQ ID NO: 225059 - DNA, 2036 bp, Cannabis indica
actatttacccttatttaaaattataaatttttaatcaatataaatttaatatttaattttgtcagtacaaatcactctattagtattatgaaaaatttgcatgtaataaatctacttttaacaaactcaaaatttatatgattataaatttaacacactaatcgaatttaatgaaaatataattttattaacctttagtatttatatcattaaaaaaaattattaatttatactacttataaacttaaaattataaatactagaactaaaaatatccttaataatttacatataaaatatgcacgcctacggtctaattgtattgtgttttaaattttaaaaagagcattgttagtgggtactaatacccaacacttactatagatgacgtctcacgattagtcaacaataattcctatctataagttattttcttaagttatataagacccgatacataatattacatcaatagcagtatgataacaaaaaagatattagtatcttttagtatttcttgaaatacgtgatcaaattatcaaatagctaggtacatatttttttttttatcaatgttattaaatattagtagtgtctaacattttttaaaggtgtcagtgtacgattagttagcaatattttttaaaaattattatataaaattatataaaacttgatacttaattacaccgataataatataataacgagtataaagtgctagacactaatagggtttagggtttagcatttctcttcttttttctcatgaatccagcaagtatatatgccttactctgtaattatactgtgatttcaagcctatatctaaaacatttttcaatcttttttattattaaaaaaatacttgccaaattcaccaaacaaatttattattgaagaagatcatcgtggctatatattattttggctgttgagttaatttagaaaagcctactgattttcgagttattagttgttattcttcgagtgtgtacttttgcatgatctatatattttagtactctctccacaatttattgctcattaattaattacttgagcaattagtttctttcagcacaatctctatctataatcttttacatatagctaataagaataataattacttcatatataattaaaatatataagctaggccggctaattatgaaatgatgagttactattacattataatactgagctatatatatatatatagtcacctgaatagcctttttaattatttgataacttttattaattaagttcagcccaatatgcatgcacgtactaagaattacttgcaattaactaattgtaataattttttttagttctagctagctattcgtttaccctattatatcgaaaggaaggaccattcacaggaacccaaattcataattctctatataaataaggtatttattgataataaaaaaataaaaataaaatatatgtaacatttatttattttatgtgtggcaaattatgtcacagagttgtgtcttgtgtctgtgttaggacgggttgttagataattaatattaggatggtagttaattcagttaactacctaaccacttattgttttacgtggttaattgctttgttcatcactcgtgtgtatataaacttgtaaatgctcagattgatcaataagagactcttttctctttctttctttctcattctttcttcatcttcttcctctattttgttctaaagcaactatgtcaaagagattgaatacttctcacatggtatcagagtcatttttgccattaacggcgaacatggcttttattgatcctggcaactcaaatcatcaacctgcatcacaaggaacttaatttgctacctcaagaaatctcaccagaactcaggatgacacaactcacgttcacttcaaccacactgtctcgatcaagctcaatgatcacaatttcctcttgtagaagcagcagattctagcagccatttgtggcaatcgattacagaaattcataccgatgttccacctcct

SEQ ID NO: 225060 - DNA, 5824 bp, Cannabis indica
tcctgctgaaccgaagctccaagttgctacctccgactacttcttcttcttccccttcttcactcaattccttcacggcctattgctcaatcttaacatccgaaaattccacctctatagctcccaagaatccatttatgaaggcccaagacgatcttatcgttctgggtattgaaaccagctgcgacgacaccgccgccgctgtcgtaagctactgtcctttctattctttttaagtgtcgttttttgttatggtctaataatgggcattcaaagttttcgtgctctttatttgatggggctttggttttcactactttggtgcgtacaggtcagaagcaacggtgaaattctcagtcaagttgtgtcctcccaagtatgtgtatatctatatgttttgtgaatgtgtttgtgtttgtggtattacgagttcattgtactggtttttacatagctggttcattcaagctaaatgggaaaatttttacctacatgaatttaaattattgattacttcattgaaggcagatttgcttgctttatatgggggtgttgctccgaaaatggctgaagaagcacactcccaagtgattgatcaggtacagtaaattgctacttatattgtgtacgataatcattggttgttacttaaggcaatgtctgatgttgtagcttgcattgcataactgttcattcaccatgggactattggttttctcaaacataaatggctattttatggacttagtttacgtcttttgggttagttttatgctgtctttgcaggtgaaagagtcttggtggctgatgctatctttgtcataattgtggttgttaactacaggttgttcagcaagcacttgacaaagctaatttatctgcaagcgatctatcggcagtagctgttactattggtcctggtttaagcctttgccttcgtggtaatttgactagcatagcattttattttcttaattaatgcagctttaactgaagtatccttttaacattatgtttagaaattggattttagcggggaaagaggcatagaaaatgtagagcaaaaaaaatgtttggtatggaaagaatcgtacggaaaaaagttaattcaacaaattttttatattgaacatgaaaaattgattttttattatattttccacactttctttacctttttctttccttaccaaaatccaacttccaaatataatctaagagtgttgttaaggatttctttaaagatataacttcaaaaaatatgatgcagttggagtgcggaaagctcgtaaagttgctagtagctttaatctaccaatggttggtgttcatcacatggaggctcatgctctagttgccaggtaaggggttatataggggagttcttctaaatagattagcatacattttttttgtgggatctctatgaagcattttgtacataagtatatatgcttccaaaatgtgatttgaggtgctttcctacatcgtattttctgttctcttttgttctagattaactgagcgagacttgcaatttcctttcttggcgttgcttatttcaggtaataaaaaacaaaattttcaccccacttagtttgttaattatttaccattatagtaaacttcttctagtcaaaactcatgttggggaagggttgtgtacttaaacaactacccaagtttatagttatttgaaagctgtgacggtgcggtttgccatgccaggcacaatatatgatgcttgatgtttctcaatctcaagattcaatccaacgtttagctagcttcatactaccttcttggtttctggcattttggatttccactctgttctctaatttttcttaagtcacttacctcttgtttggatcttggagtttaggaggggaaaaaaagggattccaaaggatttcattttctcaaacattcattgtgaactttttaaaaatagaacttaaatgtaatataaatatattcagaaagtgaaatattaaaaagaaaaagtatgttataaagtttagtactcttttccatcataaattttttccaatccatgcaaaacctttttaaacactacgacagccatgcattcaatttgaacttctgtgttcttaatggttacttagtacattttacatttgaccatccataggaggacacaatcttctcgttcttgctcgtgatcttggtcactacatacaacttggtacaagtatagatgatgctataggtgaggcctatgacaagactgcaaaatggcttggtcttgatttgaggagaagtggtggtccggctattgaggagcttgctcgggaaggagatgcacatgcaatcaaattctctgtaagttgtctttaatgataaccacatggctgaaatatcatcatagagtttttataattaagcttgtctattgtctagactccaatgaaacagcacaaagactgcaacttttcatatgcgggtctgaaaactcaagtgaagctggcaattgaatccaaaaatgtgtatgtaaatttccctaaactgcataatgatttttaaactgctatccaaatttgtttattttggctattaagatagcatcatttctcacatattgtgatactacagttatttaaaattttatcagaagatttaattaagtatctagaggtataaattaatcaagtgggaaaaaaattgggctcaaaaatctgattgatgcctaatgatagttattataattctagtaatgatcatgtggttctatcctatgatgtgatgtagggtagttaggttgtctcctcatactctttacgatagatttttgtatatatttttgcctgcagaaatgctgcaattcccatttcttctgcaagtagcgaagatagaagttctagagctgatatcgctgcatcttttcaggttgccatatgtatgtttatactgtattatttcgccaagctttcatgaaaaaatcaagattgcattcgtcctttcactttttctcttctttgtctataattgatattgttttgatgcagcgagttgctgtgctacatttagaggaaagatgtcaacgagctattgaatgggctttaaagattgaaccttccattaaacatttggtagtgtgatatgcaattttgtgtttttttgtcttctgtaattttaaaattttatttttccttgagcagattgatgatttcatttttttactctgtttctgtaggtagtttctgggggtgttgcatctaaccagtatgtgcgggctcagcttgatcaggttgttaaaaaaaataacttgcaccttgtgtgccctcctcccagcctttgcaccgacaatggtaattccttttatgcacgttttgacttcacctgtgaatgagatgaccatgagggtttttaccattttacttggatgctttcaaatgaactgaaaagaaaggactaaccaaactttatatgggaacttcatggtgtcctgttattcctcacccttccccataatcatcagttaccagtgaacatgttttttccttttataaaattatgtagaaggcaaaagttcaaacttctatctcaagtatattggttttctattcttttgctttgtttcatccaatttaaaacaaaccaatttgagatttgccatatacatgcatatgtagtactcacccatttctgtgttaaactggacaatgtttatttccctgtcgtaaaacttagtttctcaagtttgtaattgactaggtgtaatggtggcttggaccggcattgagcattttcgtgtgggaagatttgatccagcaccgcctgctgaagaacctgaagattttgtggtttgtttgatccttctagttttcaatgacttaatatttgtcagctttgtcatttgatatttgacaagccgtctcatcttgtgcatttttttgtaaatcagtatgatttgcggccacggtggcctcttggagaggaatatgctgaaggaaaaagtgaagctcgctctttgagaacggcccggatccatccgtctctcacatccattattcaagcatctctacaacagcagccatagtcttctctgcgacatctcctatatgctgagttgctattacacttaatatcagaaaaaatcggctccaatccaatctgaacaattagcagaagttgctttgcaaatacattgccagattatagaattagaatttggcatcatggtaagagcaatttgagagaacaatgcccacagtgatacagacagataggacattgaagagtccaactcaagctactatactaccactaccagagtcctcaaatcaattttctttaaccttgtcaataataatgatacagtaacatttttcattcgacagcttctgactttctcctccgcatctttggatttaagttagtgtgatagagaaatggtttgaaccacattgatacgctacctaattttgatcaccaacttgtatccaagctttactctagtaaggtattgagtattgatggttgccattccagagatcttcagtacataaaagaaaaaatctttattattaattatatgtgcacacataatttacacatttagttgaaattgaagatagagtagaaaacactttgtggaatatatatatatatttttttttgactaagtactataaacactttgtggaatattaatattgcattatcttgattgttttaatgtttttttaaatattttttatgagtaatattttataaggtaagtttatagtacaccctcgtaaataaaaatttcgagatagacccgctatccgtttgtgtatccaaaatagctttttaatttaatttttattcatcattgtaaatgttgtagttataaaggattgcatataaatttttagaaaattttgagtagtttacaacattgaaaataaaatagataatttgttgcacgcacgactatttttttatgcgtgtagtaagtaattgtttgaaccttcattttaatactgtaaactatttatggttttttaaaaatttataaatggtcttaaataattacaacttatgccatcatgaaaacaaaagtagattaaatttttatgcctaaacagattgtaaggatactaaaaatttctaatattatattcaacattctaattagatatacacaatcaatttgagaccatctaattgaatttgagtaaaaaagatacccttagttattttaattttatttatcggttttttttttattttactattttaggattcaataattatattgttagtatcaaaattgtactagaagtttaatgctttatatgattttggaaagttttacactcctcaaatttgttaaaattgtgtgtaattactaagaattttttatgttaaaaataaactattaaaaaatattattttctcatttaattattaattattttattaaataaaatattgcaatgcttcgtatccaaacatatcatatattataaaatatagtgtaattactatactttataattactaccataactgttatacgccttagtaattacacaataacttttaaacatgtctttaatgattcatattttttttttttgtacaaaatagattagaatcactcataaatttacgacgcagacgtccaccaccgacgttggaaccgttctcgtaaccaggatagctcatcgtctaattgcagatcatgctttgccaagtcatgatttgtctaaattctcagagcgagccacacgggggcaaaactgccccccgaaatttagtacaataaagttaatagcatcttcaaacaacgtttctaactcgttgaaataca

SEQ ID NO: 225061 - DNA, 5581 bp, Cannabis indica
tgagaattggaattggatgtaattggaggtaattacacagtttgacgtgtttgtgtggccacgtaattacatagtaactgtgtaattagaggtaattgggaggcctcaattactctctccaattctcataccccatgagaattgggtgtaattacactgtgtaattacataccaaaaataaattcaaattattttaattaattgatatgatattttaattatttttaatgtattgacttttcctttttctatcaatcatcaaaaaacaaggttggattgtattagcatgttgtgtacttcacaactttattcgcaagtggaattgggatgatgaatttttcgaagaggacatggaaaatgaaataggaaattgtgaaagtttgaacaatattgattttgattcagattcagatgaagaacttggtgacgggccaacagatgatgacaagcaatatatgtttaattttagagatataatagctcaaaatatatggaacgcaagagcaattagatagtcttaaaaattattttaaatatttgctactaaattgttatagttttgactttattttatgaagagattattatttatttatatattattaattgatgaaatttatttttaaatattataatattaatttactgtgtaattactaactatcatgccaaacatgatattaggaattcacatgtaattaccacttgacatccaaacacaccttgtattttaaaatacaatgtaattactatacagtgtaattactaccctagtaattacactacatagtaattacacagttgtttccaaacagaccctaaaagtaaaatttttttgtaattgtttttaattttttatattaaaaataaagacaaaaatgtgttttttattattaaatttatttaagtaaggaccgattcggattcgggactggggccgaggtccaagaaggggacgaagtgtaggttgggttttgtcgagttcaggctagtggtcgagggtcgtgtttgggtcaggggtcgatatccatgctggggctaggtgtaggaaggggtccaatttggcctaggtgtcgtggtcttgggtccaggccgtgtccgggtccgaactgggagttggggtcggggttctggtccgattctggcccaagtgtcggggttcttaatccaagcccaatccaaggtttaattatgagattagggttcaaaatattgaaaaaaaaaataatacaaatggactataattaaaaaaaaaattaaaataatatcttttttctttttcaaaatttgattctcatttaacaaaaaaaaaaagaaaaatagtgttacgaaacatatttttaaaaaatatttttactttcaaattcttacaaatatatccatataaattttagaaattacaaaaatattgtggcaagggaaaaatatcatttatactaatatttacaaaaatattatttttaaagtttattattttaaatagtattgttaagataatgcctaatcaaagaaggagagagtaagactcacatatgaactatatgtgtgagtaaaactcacatacaaatgaaagataaagccatcaaaaatggttaatgtgcgcaaagctattgcgtcagaacacgataaaggccacaacatggcaagtttaggcaaagtagcgtaacgtagcagtaacacaaaaacaattaaataacaataacaaaacaacttaataaaagtaaattttaacccttagaaaacaaaattggaatagttgaaaatgtagggaagatagaaaattgagttgatagaaaagaaattgtatttctctttatgttatttggtacgagtgaaggaataaaaatgtaaatatttaattacagtttaataattatatatataacttattttaattaaaaataaggatagtcaagtattttagttaaaatataaattgtgaattattttttttattattttatttatttttgtatttggagagaaaaaattttgtgatgcatacttacatttttttttcccattcatttatttctttcatccactcttctttccaaacttctctttcattcccattttctcttcaattaaacatatgggtaccgaaaatacaaattaactacatcaacttatttcgtcagcactataaaaccttataaataacacaacaatagcttaaaaaactaaagaattataactaaaaaacatacctattaaagaccaaatacattatcatttttttattaacaggaaaaatgacaacaaacaaacaaccaaaaaataatccaactttataaaaatcaataagatatcaacacattgtgtcaactaaaaagaaattaaaaaataacacaaaaataatcttaaaaactaataataaaaaaaagcttaaaaacaactattataccttttaataaaaaaataaaaataaaattctacccatcattttacatgagggtccataagacaagaatacaccttaaagacacaaaagttaacaaagaagaccttgactaagtgacaaagggtgaagcaaagtgccatgtggcacaaagagggaagcatgcgactattgccctgaaagggtcgagtgtcagtagtcgcacccctagggtgtgtctctctaacaaatctgagaaatgaatactcagtttaaagccctaattcgagaaaaaatccaacaaggaggctaaaatgtttaactttttgagaataaaagagtacaatggataagatgacatcaccaaatactaagggaaatgtgatacatgactattgacacttcctaatgttagtagtcgcatactaagatattcccaaagagaattgacactttgagcaaaatatcacatgcatacactaagacttgatacctaaagtcaaaattgcacaaagaaaggaggaaaatgataatacacgagtactaacactccctaagtggcagtactcacatagcacatgagtattgaccctcaggatgtgtctgtacttgcctaagaggaaggatgaagagattggtgaccaaatggttctttccaacattaatgatcacataacaaatatgtgaagtccctaaagggtgtagaagtatcttacacgagtactgacactcctttttttcgtagtaatcgtgtgggctagttcaaagagaaatcttgggtgttttgacgctcaaatcctataaaatgtctaccaatcttcaaaaacttgtcaaagacaactcaagatgcccaaatagagaagtttcacacgagtactgacaccaacatagtgtcagtactcacccaactatgtaccatatgagtactgacactctcccagtgttagtactcgcccaaggacacttttctccaaggatggagccccaacaacatatcacacaagtactggcacctcccaagtgtcaatactcgcacatatggtgtcttacacgagtaatggcactaatctggtgtcaatattcacccacagtggtactcttccttccttcagcattttctcaacatatttcttgaagatggaagcttatagaagacattcaaataattaaccacccccaaaaatagagaagatatttaatttttatgtaatttctttattgttattaaatgtaaagccttaaaccattgcaaccattctcgcagattttagggaaatgggtagtgaaacccttgtcctgtataggcatatcatctagacctagggagagggacctaaaacttaagatccaacctctaattcattatctcaccaaatcttagagcgcctatcttaagatctattgggatttttttcctaaataaaactcattttagttatttgttatcaatagaagattagaagtcatttaagttagcatattattttcatgataatggtttaatatacaatttctaataaatccagaacatattgttattcataattacagtgatgtcaacacagtggaaggtgattgtgattatatgtttcaaagcttatgtcccatgatttatcagtgcactggatttacactgatgtgataattagcgataaagttcatttacaccttggataagtgttatgtcctttccagggcattggtaaagtatgctagtatcagatgtatggagtatacattggactggaccaatattgaatttggtaaagatatcataaacttactgttatatctttcaaagtcaatatcaccaagttgaccttagatcaaaagatctaatcctaatatagttaggttcgatctcaagagtgttatttgtgttcttagagttggtcgttaaaagcttaccaaattggttcgggccaatacttatatcttggaaacatggtagtacaattgagtgggtagcgctaatcatagatactaaactctactagcttctatctagatggcttaatagagataaatagaaaatctcttatttcagtaattatattagtttactgaaatatcatttataggaagctaagtgttttaaggataaaatacattgagcggtagaatggtaaatttgttcctactcgatgtaaatcatctagagaggatctttgattatgtagattataacaatggataattaataacatatgtatatcttagaacatatagagtattttatataattaagagtgcaattttgaatctatattggcgcaaggaggaattaataagttagagaatttacttggtaaattctagatctacttattggaagcttgattatacaggcccatggtcccaactagtataatactggttgtagactcagttaattggttttaattaatcaattatgttatcccaagatatagcaaaacggtcaagcagcaaccgaatggagtgaaatgagccctcaaggagttgtaccaacatccttggtcggccaagagaagcctataggccgaccagggtgagcctataggtcgaccaggatctatgcacaagctggccagccaagaagtaactttcgaaccaagggagctttcgctcgaccaagggaatctaacctttagaaggaaacgatatacaaagttatcctcaacttgtaaaaggttggcgtccacatccaaaggctggcctcttcttggtaaagctatagtgacctgccatatccttacagggacatgaccttctagatcctggcaagaagatgacctgccagatcctggcaagaacatgacctgttagatccttgccagaccttggcaggagcatggctgactaggattgacctggcaggagcatggctggccaggattgacctggcaagaccatggccggctaggattgacctgataggaatttctggacaactctacacgtggactgctaattgggttgcgaattgggccctaaaagcccaataaaacaactagataatatctactttcaagggcactttagtcttttgtaattatctaacaacctatacaaatatccaaggatttaaactgtaatctagggtttaggcctcctatatagaggccttaaccctagcctagaaacctaagttacttagcctccaaattactttatgtctgaaagccctattctctcttctatcttctctctctctctctc

SEQ ID NO: 225062 - DNA, 7561 bp, Cannabis indica
gaatgagccgatattcttcgctgatatattccacgggaagaagttttaattagacactaaactttcctagtgtagtagttttttttttttttaaaaaaaaaaaaaaaaaaaaaaaaacttttaacaagtgtgaatccatagatagtatatctgcttttgtctatataaattttcttttattaggatctataaactaaacaaaatttaaacccaaaaaattaataaagctaattaaaaagatgcttttgtcatagatacactacttattaattcaatgtgtgaatcaaatcatttaatacaagtagttaatttcttaatcttaagtccctattcttccaaattacaatttgtattttattttataaagtctgtgttgttgtcatgtcatatagcaaataaaaagaaaaatagaagactaaattagcatgcttacaacctaagcttgaaaatagccattaaggcggctaatataatcttaattatcttattacctataaatacacttttaactcgttcggccaaaaaaaagtctaattgtgatacagacccgactaaaattcattggtagattactctctctgacaaaaaatcttatgtcacaaaacacatacacgctccttttatgcctttcacaattttggtgctgacgatctctcttcatcgatctccaactcaaggtctgttctttattaattttagttttaaattgtattttgattgaattcgtttgtaatttgatacgtacgcatgcttaattttgtaatatttatttgttttggaatagtatactagtgggtggtttcagtattgggttgggggtatgtataattgttgagttttgatgtttttaaacttcatgatcatttttatcattttattgatttctgaaagaaattcgtgtgggtggttgtggtgacaaattatattagagaaactgtatagttgtacccaagatcgaattatttttgtgggtttttgatttttgtgttgtttgttgttataaataaagatgtattgcaactttaaggaccacgcagttgagtacgtgaagaaggcagttgaggaggatgatgctggaaattatagtaaggcatttcccttgtatatgagtgctttagagtacttcaggacccatttgaagtatgagaagaatcctcagattaaggaggcgataactcgaaaatttgttgagtacttgagaagggcagaggagattagggccattcttgatagtggaggaaagaacagagcgaattcgaacggtaacgctgctgtcaattctgatcgaaaggcgaagcctaagggtggagatggtgaagatccagaacaagcaaagctcagggctggccttgactctgtgataattagggagaaacctgatgtgaagtggaatgatgtggctgggcttgaaagtgctaaacaggctttgcaagaggctgtcatattgcctgttaagttcccacaattttttactggttagttttgttgatttttgaatttttcagttggattaagattaacatgaaaaagtcttgtttatggactgttttaatacatgaggcagaggagtttgtactaacgaactttgcttatattcatagactttggacatggtacttgaaacattattatattaagagaaaatataactaatgaatactttattagatgttcaatttcggcattaacacatgtgtttgatctattattcttttaggaaagagacggccatggagggcttttctattatatggtccacctggaacagggaaatcctacttggcaaaggctgttgcaaccgaagcagattcaactttcttcaggtaggataatttccatcagtgctttatatgcgtagatgtaaattgattttgataattaatggagtgtgggagaagaaatattgacttttattgaaaaaactgcagctgattttttgagatcaaaacccagaaatgtcgcagcattagttcaagagattcccatattcttctaaattttaccttcttcttcctttttgtgactttcctatattcttctaactctgctcacatggcaaaaacgataaaaccagcactaaaacagaacaatacagcacatagctactctgttcacttagacttttaacgctaaaagtattaagatttcatcactctacgacaacacacaatcacttcttagacccaattcttctttctcacattagtggttagagtggaaagtttatcagatagcaaatataggtgtaatgtaatgtacattgaagtacaaacctcatctttcttatcttcccttttattgttaaacatatcattttaattttcattgtggaaatatttcatggtgtcagcattctagtgaatattactgaaaagcgaaaactgaaggcagttgttatttgaattagtaactgaaacaaatgctcaaactttcaattggtagacagttaaagtggccattgcatatcaatttagtttttttttttttttttcattttttttcaagtttttatgcacaaggttaactgatccattcagtcactgacaagcaccgcgatgttcctgcagtgtatcttcatcagaccttgtctcaaaatggatgggggaaagtgaaaagctagtttcaaatcttttccaaatggctcgtgatagtgctccttcaataattttcatagatgaaatagattctttatgtggtcaacgaggtcaaggcaatgagagtgaagcatcccgacgagtcaagacagaacttctggttcagatgcaggtactgtgttgtacattttagaaattgtctcatatctacatggctcgtatcagttgttataggccttggaaataatgtacattcaccttataggaactaggaagactgagggaaaaattatggaattgaaaggttggaaacttcttccaacgcttacttttaaaaccctgaaagccaaccggatggagattatgcttattcttaacaatatatgattcaccaagaccatgtcctaaagtcatacattatgaattttacttataatctctgttttttttattggttgtcacttgtcactccaagccccaaatcatcatgtttaagcttataatatatttaaaattcaatatgtcatgcgaatagtgattctcaaattctactagaatcgtttttcacagccagctctttgtcattggattgatgatatattaaagctgaacctcaaatgtattttctgtcattttgaacatttatattcagggcatggggactgatgatcagaaagttcttattcttgcagccacaaatactccttatgctctagatcaggtgacaatatcaccattttgatcagttagtttgaaaaaataaaaaaataaaaaattgattttccttcagagtggaagaataatgaaattaaactgcaggctgtccgtcgacgttttgataagagaatatacatccctctgcctgatttgaaggcaaggcaacatatgttcaaggtaccatcttacccaagatcaaatagatattaaaggagcattctgctctgcatacatcatgtacatattttattagtttgtgagtattttgatgttctcatagtgcaggtgcatcttggagatacgcctcacaacttaactgaaagtgactttgagcatttggcccgaaaaacagaaggattttctggttcagatatatctgtttgtgtaagttctaacaaaataaagagccagattgatgtcttggtttaaatgacataaactatcttttactaggtgaactttcctttttcaggttaaggatgtgttgttcgaacctgttcgcaaaaccagggatgctaaattctttaggaagacctctaaaggtatgtgggttccttgtgaaccaactaaacgaggtgcaattgagatcacattgcaggaacttgatgcagaaggccttggctcaaaggtatgtaggaactcaaagaaaaagggttttgttatttcttactaacatttgagtccacttttcataacattagctctactacatttaaatgaatatagaatgtattgtgattatcaatggggggtttcattgactgcagatcctaccaccgcccattacaagagcagattttgataaggtgcttacaagacaaaagccaactgtaagcaaggctgaccttgaagtgcatgagagattcacaaaggagtttggggaggaaggctgattgttttgtgacttgggaaacaagcttcaaccaaagtgtgcaaacataatagcaataacattactatgtaatttagaacacaatcctaaaatgtggagtaatttgttgtattagcctacaagtgcgagatataggtgctactttctttttatgtttggctccctgtatgttgtacagttttgcacaatgatgtttatagatttgatagtttttcacaagtttccttaggcaactcatatattatatacatacatgaattttgtagaattaaagtcacgtttggagaatagaataaaatagttataatccaacaatttaaataattctagtattaattccattggagagaaaaaaaaaataatcaaccaactctcatcttcatgtcttttgctcattttaaagggtattcatgtttatgctcaatttaatttctcctggtaaataatcaactcattcattctatattttctttttccttatattgttaatccaatctaatctaatttttcaaacgtgatctaagataattgtttggttagtcacaaaagttcaataattcatgttctctatcatgatgttcaattatcattaacttttccggtagaaattggtcactttatcatcagtaaattggagcagcttttatccaattaaagaaacataatccacatggacaaataatttatagtgtaatgaatcaaccttttactattgataaaagtttggcactgtctgatacacacatgtaatcaggactgaaaaatatcaaaacatatttgtggaatgaaagtgcaatatgttgttcttgtatggtcaaatttacttgaaccagaaacaaactgactgattcaatatgaatggtagcagttggcttgaatgtccctaaacctaaacctataatgcctcaactagaatcaatatgtatacatttgacagtaataataatttaacaaacacaaaggttcaaaattctggaggacatgaacatgggagataaatgactataacttagcgtcaacctggcattacctctctccatttcccttgcctgaatatctgcttcggcctcggtcatatcttggaatgctactctttggctttgcagcatcgacaactatcatccagccattgatgatctgcaagcaccaccagcaattaaaatgtcaccttagcttcactcttgttgaaagcactgaattacttttgttgtagtttaatatcacagcaatgaggaatagtccaaaatttgttaagagaaataaaattagtgtctaccgaacttgccttgccattcatttctttgagcgctgcactagcagcttcctctgttgtgtactctataaatgcataaccttttgaccttttagaaatcttgtccatgattattctaactgttgaagaaagcagttaatcaactgaagatactaacaaaaatgtgacaggaatacttataacccaaaaagaaattcgaggagaaaaggaataccttccactagctcaccaaagccttcaaatgctgcccgtaaggttttctcagatgtgtaaaaggacaggcctgtttcaacataaagatcatccagcaattctcaatgttcagcaaatcaataaggaaaaaatgttgcaggagcttgtgaactagtgctccaattggagaaaagcaaggccgggattccttttttttcattcaaatgaatcttaaagtaaaaagaaactacaacttaaaatattaccagtcacaaatagtttctttgtttttacaggtattgtttgattttcttcagaagaatatgatgaacttgtagagctctgtaggcctgaaagaagaggaaagagtttactacacaaaggaaataactggtaagtgttaaatagtaagcgtgaaataagatacgaatgaaagtgactgaactaatttctaaaagaaaatgcaagggaaactaaaacagggtcaatttttccatgttcactattttctttgtgaaccaaaaatgcttggccttacaaaacgactcattgtgaaatgtaatgtttatctcatactaccaagaaaatctggtcaaaagttaatacattatagaacactataaattcaatttctgtttattttaaacataatttctgttcagaaggctgtcaaatactcgcaaatgacttcccatcttttaaataactttcctgcaagaaggaataaccaaactataatggcatatttataattcttgtacaagttttaagagcaccaaatcatcatattatagcatatttcactcgagaaaatataaaatgctattgacaaatgacaataaaccccgaaagacatacaggagtaagctagttattcatgacaacatccctgtatcacaataactccaaagatgcaagtggtgtcagaatcaaacatcgggttgaaaccacaaaaattccacaaggaaaaaatttgtaacttacaaaccacatagaatcattaatgagagaaatacctccataatctttattatctgatccaaaattttgatctagcaggacagattgaacaccaggaacacctgcaccatgaagggtattttgcccccaagttataagtatgccattatcccaatgtggacgataaaattaacaaggaaaaacaagactcactagctagttcccgagcacactgctcgtcaagttcacagcaaaacccaaagttggactgccaggaaatgtgataaatacacatttgtgcatccttttcactaaatacataacaagcatatgattccactatcagagcaagaggaacaaattgatgaaaataagcaaaatacatcaacatcaaaacatttaacactcactttcccagaacctttgttagtatctgtgcataataatcaaccatctgagcttttgtaacgaccccaatcccaggcttgtccaaactaacaacccaatgtttagtattccccataggaaacaaaggggtctctacaatttctgagttgttaaaattttctggttgaacatttgaagaatcataattctttttcacagaatgtaaatctgggtctggcctaacggataagacccctggcaaacctacaatagatacacatttttttattaaaaacaaaaacttgatcactcaacactaattatataagccacacctcatcaacttccaatgtccactcagtcatctaaagaaaaattaaggattagaaacatactagcgagctgaagagaaatgtcttcatcaatgtcacagcaaaacccaaagtgggtgtcccaagaagcatcatatatacacatttgagcatcttcttcactgtaatatatcagaatttagtccaaacctactttaaaaacaaagtaattaaa

SEQ ID NO: 225063 - DNA, 5637 bp, Cannabis indica
gttaataaagatatatatatatatatatatataactaaaatcaaaccagaaagagtatatatatatatagatatatacacatagagagagtcttgtacactatatattatacagaaataattaaacttagctatagtgcaagctatagaaagaaagatgattttgattattaaagcatgacacacattacacatcaaatctagctagctagctagctagtagtactaaagatgaataaattattagagataatacatatacatatatctatgtgtatgaatattttgatacaaaatagcacgaacaacacataatttgctagcaggtaacaaatatgttaggtatgcatgatccaacccatatatatatataggaattaataaggaacacaataatttttatatataatcatgataatatagcatggacctgaccgattgagaaactttgatcatatattaattcatcaagaaagattctcctcaaaccccaattcctcaatcatattattaagaggattaaatacttcaatcccatgagagcacttattaggaagtagtatatttatgggggcaccagcagaagcagaagcagaggatgatgatgaggtgttgacacctggcagtggcatcaccattggatcatcatcacaatagtggtgttttcgagctataacaactgagttaataacttcatcagtgggatgaaacacatcaagaacctcaaaatccagttaaatcagaatgagtatcaacaactgggtacaagaaaactactagcaccatgagcactcctaagcataagaattgagccttgagccatgtacttaccccaaatgctcaatcactttaattttctcatctctatccataccaacaacgagcagccaagaaaacgacatcgtattggctaagttcactagtaaacattcataacatcacttgttttaaacaccatacgtttcgacacgtcatcatcgttaacaaccaacgcactagcctttgaattggccgaatcatcgatgtcgtagttatggaaagtggtatttttgaggtggttcatggcaagtacgatggaggtcagaggcaggggaccagagcccacgaaagctatctttttgggttgttggttgtttttgaaatgttggcttaagatttggtactccagttggcttagctttaggtaattgttgtaataagggaagattttgagatggtttaatgggtttttgtatgatgatgtggttaggattgttgagaaatgtgactccaaaagtccctctgctttaccacaaagcctaattaaattagaccttattttttgaacccttttggggagtttgtcaatgtcaaattttgggcaaggtggtatacatgtgtggactaattgggtgaagagagtgtcgacatcttttgaaggctttagactctcgaggcttgagatttgtgagtagagatcacagattttagttactaaattattaataataataacttcttcctcctctttttcttcataattctccttcttttgctggacaaacattatgtcgacactatgaggttatttgggagaaaaaatataaaaaagaaattacccagagaggaagagagagagagaaggggattgtattgtgtgtgacgacttctctatgtccttcagaggggtcattatttatggacacaattgtgggtccctctttggccacatcgaccggctaatgtctttttttattattattattattagtaattcgatatatataacgaaacaatttagtgataataaatgaaaaaagagatctagtgttataattaatctttatataacaaaatttagtgtttttttttttagtaaaaaaattagtggtagatcgtgtcttataatagtataatagtataatagctagctagggttaagtgcttcaaaatgtcaacatgcaattggtctcctccttgtctacacatatataagtaaggctttagtaaggagaagagtattgttattaggcatcagtagtccttagcatctttagatatgtcgttttgcgtgcgattggctagtaaaattttctaaaaattattatattaagctatataggacttgatatttaattagactaataacgataatgacacataaagggtagtaggtaccactggtgtcttttagcatttctcgttagagaaatgcaccattgatgtcttttagtatttctcgttcaccactggtaactagcactttcctcagtattatatcgctattggtgtaattaaatattgagtctcatataacttaaaaaaataaaatttaaagaatatcattaaccaatctacctataaaatgtgctggacaccactaatacaagaatgttcattgacttatgcaaatgtaaccattcatgtataaataccatatagtgaatgctatacgtacacacagtacttttaattaaaattagcacatttgtggggaatattcttacattttgccatatatacttttttttggtaaggttaccatatatacttgacaaaataccaagactcatttgccatatatagagaccgggagttagtaaatacaattatgtatatgtatgtatgttatattagggttacaaataattattacaagagtataaataattgtgacaattaagggtacaaaagtaatattttttggaagaatatatatagttatagtcagttgagaaatgggttatatatacaaaggatgtggaaacatgatgacatttccatattcctcacattcaaaacttttaatctctgtcgacacagttacagtgtccaaataaaccccttttcatgcaaagtcctatatttatatattatatattatatatttatagatatgccatgatatatatgtcaggtattggtttgaagaccatatcgatcaccatgaaaatgaaagaaacaaaaatagtgagtaattgctccaattaatggtgggcatattattacttgacattccatattagtactttaatatggtaagcatctcactatcaaaaatttcaaataattaatttaccttttcgaaaacaattaatttagatttcgttgtatcatattttctttttttaagtatattgagaactaattagtaaacacatttttattttggaacctgtttttgaaaaattactaattaattggactttttattttattaaatgacaatttaaatcttgtatttttcaaaataacacaaaatataccttgaaattaattctttttatcaaattaaatcttaataataatttaacttgaggtgcctgttactaatctgatttcattttttacatatatttgtgttagaaattataagtttaagttggttattatatattaataaaaaataattgataaaaattaaattaattgtctaatttgtaccattttaaaaaaatatagaatttgaattattatttacataatctaaaatagtattttcctaactaacattatatacactgtgtcaaaaaaaaaattacaattattttatgtgccataaatataaatgttattacccttaattatgtatgaataaaaataacacagctcatatatctacagagagaatattaaaaaaatatatggttatgagttattaaatttggtatataaattgtatggcagggttataaagttgcagattaattagttttaattaactcaatgaactggcagtagcaagagtgtaaaataatacaattgtgtaatttttcgtaaatatatataaattaagtttgaattaaatgtgttacttacttacttgtatataaaaaataataattaaagagaaacctgcttaaggagaaaacttgaacttaattatttttagtgtaaagtcttaattatttgtgtgaagattctcagttattaatgcattcacacggacacgtatagttataatatatccataaatacatatataaatttgagttacttgtatgaaccaaacaaatagagcaataatataaaaattaatcaatcataaaagtgatttttttaaaaaaaacttattgcgtgtaatgaattctcacaagttattatcagcatcattctgttcacactagctatatatataaatatatttctaaaattataatttcaattcaatatatacaggatggcaaaattgtcgaataaatactgtgtgtatatatattatacatcacaaaaaggattattatagggtccacgtacagcatctttaacatattgctatggaacatattaatagtactactttgacaaataatatatatcgagaaaatataatacaaatgatgctctataagtaacaatgccctaaaatcgattatttttattatttggtttggttttagtgaaattaattaatgtgattcttaacaacttaattagactttgtcaaggaatatcaacagtccaaggagttagttaattcagttagtcttaattctgttagtaactgttcctaatctgttaggatcataactaactcttatctttgcttgattctgttatgggttctgttatgagtgttgtatataaaccatgtactgtactcttttcattcaataagacataatgcacttcttcatttctctctgtgtttcaattgcttttacttcttgattgtatcttcacatggtatcatagcaagctctcgttcatcaatggagattcccgtttcttccaatggcacagcaacaagattgaataatgctcagccacaaaataatcagcaagtaccattaccaaaatcctaccctgtttcgtttaatcactctctgtctatcaagctcgacgaacataactttctaccatggaagcaccaggttctagcatcgatcaaaggcagcaaactacagaaatttcttgaagctgatcatgctcctccacagttcctgacaccagcagatcaaagaatcaataaagtaaatccagagtatgaggactgggaacagcaagacaaccttctcgtctcttggcttctttcttcgatgtccgagaaaaccaccaataggatgattggatgtgataccacggcacaaatctgggaacaacttacagagtattacacgaccttaaatgctgcaaacataagtctttacaagactcaactgagaaacacgaagatgacagggtcgctgaacgattatctgctcaagatcaaaggtttggtggatcgccttgctacgatcggtcatcgacaaactactcaagatcacatcgaagctatattcaatggattaccaggtgagtatgatgtattcgttacatcagttacaacaagaaaagatctctatagtgtggcagaaattgaagcattattgatggctcaatcggttcgaattgagaaaaatgccaagaatcttgacatttctaaagctgaagccaatctctctcaagctcgaaacaatggctttggcacttatgggcattctaactttcctgctcctacggttccacctgggttcaacggctacaactttggctttaataaaaattttcctaatttcagcaaccaaggacatcaatatcagtattctatggcacgtggtggtccccctcctcaacgtggtggtcctgcacctaacactacatctagccgtggtccccc

SEQ ID NO: 225064 - DNA, 1909 bp, Cannabis indica
attattagtaaataggtgatactattaagctacacttaatatatatgagggcacatttgtcttggattaaaatggcacatattgattaatgtatatgttattgaagtataatacaaaatagtgatattataagtatcaaaataatattaaattgttatgaaaatattatgtagatacccataaattaatttataatttgttgaggagtcaaattataaataccaaaactcattttataatgatctataaatagattgtggtccccaaaaaatattaagttcttgtattctcttttcccattagagaaaaatacataaagaaaagtgtatttttagaatatcataatcttctgtgcaaacagttgcttgaggttagtgtttctactcatttcgttatcatcatctttttctttaatttactaaaggttcaataaaatataatttaaatttttttatattaaagcacttttagaaatatgattaatctgtaattagttgaatttataaaatattttataaatcctaacaaatagtattagagtcacttctattgaattaattgaagatttgatcgttttctgtttataaaatttgcagattttgaagatttagaatttttttttctttgaataattctaccagtggaatattttgggtttaagattcagtcgcatatatcttctcatatggtatatagacaatttattttgatcaagtttatatttgattgtgataattgtatacatgtttcatctggttgtttatttgtaatacgctaattaatggcttttctaatgatatgattacttaaggatatttgagcttatcattattcttttatgtagtatatatatacaattgcttttgagaaaagttggtaaggagattcttctcaaatcggtaattcaggccatcccttcttatgctatgtcttgttttcgaattcccgtctctatctataaacatttctgtaggcttatgtctaacttctggtggggctccattggtcataagcgaaagattcactggaaaagctgggaccatctttgtatgtctaaattttttgggggtttgggattccgtaacattgttcatcacaatcaagctatgttagctaaataagcctggagaatctttaccacccctgattccttggttgcctcgctcttaaaagctaaatactttaaacacaatgacttcctcaatgcagctactggtcactctccttctttctgttggcgtagtatcctttggggtaaggagcttctcattaagggtctcatttggaagatcggtgatggtacttctgttagaatcactgatcctaattggcttcctgactgggataacattcctttcaaatctggttcatatccccctctcccaaatgtctctttcttcattactgaggatagacactgggacacaagcaaactccatcactactttgatgagagtgttattaattccatcctcagcgtcccaattgatccttctaacaatgactgccttatctggaaacatcacccttctggttgcttcacagtcaattctgcctaccatttggctaactcccattccacagctcctagttcctctaatcctgctgcccttaaatcttggtggtcacctgtttggtcgtctaatataccccccaaaaatcaaacatttcgtctggaaatcttttaaccatatcctcccttccaaccttaaccttttccatcgacagtccaggtcttctccttcttgctctatttgcttctctcatttagactctaacactcattccttagttacttgttctagagcaggtaaatgttggaagaactcttctttctcaaacttttattttactaataaaaattatgatattaaagaatattttcttcgtggttttgaacattttgaca

SEQ ID NO: 225065 - DNA, 5082 bp, Cannabis indica
ggagcagttttacgcttgattttccttgtttcaggtttccggggtatcaaagttcaaattcagtcaattgatgaaaagatgggacaaactagtgaaaaattggacaaatctgctcttcgggtgtcagtagtcgcgaccatggatcgtgctagtcgcaacccttttctatggtcgcgaccacagtcgcgacttggagttttggcagaaccttagtatttcgaaatttgcctgtagtcgcgaccagccgttaagttggtcgcgaccaggtacagaaaaacgcagttttgacctaattcagattttttctcaattggaggcacatctttcatccctatataaggaatacgactcatagggtcaaattcaggtttcaggattgtgatcctcaggatcatcatcttaatcttctggttcgccttcttcattgatgggttttcatcaaaatatttctcattatgttgacttttcttggtaggatggctagttacttctgatgtatctcctacaacagttgctttcgcatgtgtagtaggagggttcacaccattcatgggagtgtccccatcacaagcaccagatttaccgacagtggttctcgtggctaccattgtttcagctcacaactttggtatcaactctgtcttcggctcttaatgaaagcaccaaaatgtttactgaaattttcggaaactaattataattatatttaagctaaagaaatagattaaaaaaaaacaaaaagcaagacaagagattttatgtggttcaaggattaacgacctctaatccacgagtcaatattattatggctggaaaagcctttgaatattgcataactattttgctaagtttacgaaccatataacttgccttagttctcaagtatcgagattctaaccctttgcatgaatgcattttcttatatttatagacttagtattcctatatgtaacccttacccactgatggataaatacaaataacttattgactttaggttcatctagtgaagcctggcccatgaagcattgatcttttgttgacgtggatgccacgtcatgttgatagttgtcaaaatgtagcttacatttgtggacaataaagatacataaatgcttgattgataattacttcattttcttgcatagaatatctgattctcggacataatcctataaataaagtgttgatattgtgggatttaataataaatgagcgagatactatgatcaacatctagaggctcattaattactcttccggaagtgctgcttgatgctattcaaagacctattgtgctagatatttatcttgcctggacgagtcatctagatagcttgacttcgctaatggattcaatccattatcctggttgggcatttgttgggcctatagtaactgaattaagcaatcttgaaattacacgtgtccttcttctgaaaacacaaataactgtatgaaaaaaaaagaattaatttttgaaaaatataagttcaataaatttttttaacaaatttctaaaattataatttttaatttaaataatagtataaaatggtataagatattgtaaaataacataaaataaaattcttatcttaatttgttctctttggttataaatcaaagataggataaaataattgtgtttgtattatcaaatagtgattaattttttacacacgaacgatttaccttaaaagtgtgtggagaggttgagtcaataatgactcttaaatacgtttttccaaattttctaagatttttttgtctgcatagatagtttgggcttgttgtatacgttatacctatagttcaatctattggtcatttgtatagattttgatacgtcatatatttacaagtttagaggtgtggatgagtttattagagttgccgaaatgcaactaaattcttctagagttactcgatgtccttgcataagatgtgtgcattttaagacttttgataatattagggttttttggacgacagtaaaactttctcgcgaataatgtggttttacgggaaagttttaccagtgcaggatgtcaccgacaaaacattttagtcgaggctcaactggcgactaaaaggcagtgggccacatttcaccgacaaattttggtgcaagtgaaaactatatatgccagcgaaggtcctagttcgtcggaaaaacttcaatccttctccgattaaaaacacaccgacaacttttgctggcaaatttactcgccaacaaaagttccccgatgagtttagttgatttttgctagcgctaaaagtcactgacaaaagcctcttctcttgtagtgaccacaatccataaacaaccatttcccccaattccaaacattatgcaatcaatctatcgccaaatccattgtccccaaattctcaattaattattaagcgttagccacaattcaatatttaattcacatacaatcacctccccaatgtataagaacataataatggtagctattcggtaagtcctcagcaccgccttacctagacaggcatcaaaagtgatagtctcctatgagtactagtcctttgtatttctcgaatggtaggatctagtctacagtgactcaaatttatactggtagaaattcacaactacctatcatctcgtgataatgtcgtgattcgagtttttcacaactctcgatgaattatacacatccccaaggatagctgattaaaataaactcagtttttgcaaatattactagttacaatggacacactccccacaaggacaattggttattacaatctctatttctgcaattataacctacggacctagtcccccaaagaaaacttaacaaaccggtttctacaaatatgacttgtcactacgaatacatcccctaaaataactagttactcgaaactcaattttgatactaggcgcttactagccataaccactattcattgtgggaaaattacgactaaatgtgcagaatcaaaacaactaaactttaaacaatcaaacgattagcaatgacaagattatcaaatcgacaacaatgatcgaatgtaaaacaggagcaaacaaagtatatgaaaccagaagcaataaatgcacaaaataaagaaatcaacaccaagatatatactagttcgagattgatagttcgatgtgatttatggctctacttcagttctggaacaccattgtaatccttttttattgattgagcaagaatgtatacaatacagtcgagacgagattctctattgagttctcaccaagtttttcaactctcacacttacgcccaagaattttcttcatttataaaagattctccttacaaaacacaaactcaatctctcttttttctctgcacctctctctctacacctctcaatcttttctcactcaaactttcaatctcatatgagcagagttctgatctctcgtgatcttactccccgaaataacaagtcaagggtgatatttatagccttaggataaagatcctaaagtcggtcggtggctgcaagaaacgaggttgttaagttagttattcctaactaacttaaccaactcctctttaagcgaagtctccacgtcagcttaagtgtcagagcctccgggaacatatacgagcttccagactcgcggactaaagacactcgctaaagatgcttctcgataggatagagtatactgaagttgactatctagaattacccttccaggaaagacaactagctaacaagaactccatcctggagtgaagctagctttcatgaagatcggacccagagtggacaagacagacatccgagaactcccttccggactcggctatcattccgcaaactacgagtaaacaactttctagaagtgacatttgcggagaccttttcatttagaggaactataccacaaacaaacccctacataacctagtttaagtaattaaacaaaaagacactagtatcaacgaagtcaatttatcttaaatggatttcttatctccatgcaaaatccttaattcttgttaatcgttttctccttatctcaatacactatactaggatttagctatggcattaattagctaccactaatctagatactactatccctatgctaacccttgcaagctcctaatcacgatcctaacatgaaaacgggttttaggtactcgaccaataataacgttggagtctaaaattaaatgtaataacaagaccacaacacaagtatgctaaatttagacaaatactcaccataataatagaccatcataaatactacatattttaattcattaattattataaaaaaaaaattagatgctacttggtgattatgttgagcacatcaaagaaataatttggtagcaacatctgccacatcaatcaaacactttcatgcacgtatataaaatagtattaactaataataattattctttttttttatttttttgaaacagactaataataattattccatctctaaaagaaatactaaatagactcgctattatattttctttctttttttttttttttaaattcaaataattttctttctaattgagttacacattgtgtaacgttttaaactatatttaaatatattaaatttataccttcatttactttttactatttcactctattttgcccaattgaaatatttatttcccacataaaaaagtaaatgggtataacataaggtttatttgtataaaatatataagttttcgcaagttggttcctaaattttattttttggtaaattagttcccaaacttttattttcttcaaaacatataaaattctcactcttaattgttggtattttatttgttttagttagttttcgtattaatttttaaaatattttataaatttttttatatttgattaacacctttataaaatttaaaaaaaaaaaaacctctaatattttttttaaattatattatattttttttttaaaaatattgcctaaaataagattaaaaaaacaaatcaaagatatatttttgaatattacaaaactatataaacatgtgaaccaataatttatctttttattgaac

SEQ ID NO: 225066 - DNA, 7632 bp, Cannabis indica
aacattctagagagaaaaagcctcactgtttttctgactgaagtaccattatacaacacagggaagagttgggggactattttattgggttgaaaagttttaggggttcgtaaaataatacatttgtgaaattgtgaatgtgatagttcagcggtaaatatcctaaatgtaaaatccacttgctcaatagaacgcgcgtggcgcttgaaaagtcaatctaaaacgccaaacaagaaaagtgagaagccaaaagatttttcgcggtttcttttccttctcctccctcgtacgagagtttctcaaaaacgccatagccaacgagtgctacctttcgtcttcgctccatcttctctgaaattcgtatctagttacttttatcttttgttttatctcaatcaagattgttagcgctctgcggattttaaatttcgtttgtctcaaaaggtcaaaagaagaatattcatcgagcttgatcgtccagttagggtttactggtacagagagatgggtagccccaagaagaatgatagcaaaggcttctttgctgccatgagttctggcctctctatttttggtaacgccatgcaccgatctgtgaacgggtaatctctatctctctcataacttagaattgaggaattattatcttttcttataggcttctcaatagaacttataattcacgctcttgctttagtttattaattacggttctttggagtttcttgctttgtaatttacattgatcgatctgattaagtttgtatctatttttttagtaaacatggaataatatttttcattcacatcgatttctgttaattttccaaatgctttctattcccttgacgtagttttctatctccatgcacatattattataatcatgacctgatttaagcattacgcgcttgatagccgaagggctttgccaagttcaacccacataaatggcctttttttgttttaactttcgcaaatcatgtcttagtaacatgtgtaccgatgcgattaaggaaatggtaatttggttggttacaagactcaaacaaattttcatttacgggagcagatccatcataataagcatattgcatattttggctataatcaagtgcctggggaagtgattttcatttctagtggtagctgctttttattgtcccggcccttccggctacattcagataattcactctctaaagtttggttctgtatttgtaaatgaattctgttgccactggtcagaactttttgtacgagcagcttgcacaattgaacaatggaaaacattatttggctgactaaaaacttgctataattgaccttttgatatttggtacatctttttctttgattgttcataattaagtggtattaccactgtaatgacttgtaaaagatatgtgctgatctgctttatcttcggttaagggatgaggaaggtctgttagaatttggttcttcagcatctctttttattttctatgtaggttgcttggttatgaaggagttgaagtcattaacccagagggaggaaaggaagatgcagaggaggaagctcaaagaggaaggtggaaggatgaggtatgctaaatttttatattgttcctttttccttttattgtgttgtttaactgatcagtataaagatggcttttattttaatttacttgtttttctacttatcttatgagtaataactactgctttcagaagcatattttgtcttcattttatagtcattgtcagtagtttttactaaagtaacccacggagtagctgtcttgaaattcttcacatataatagtcgtttgtctttacaatttatctatttgttgtgtcctgtgtttctttgctaattgcgttgaatacttcaccaactatagacctgatatttttgtatttatttcctgttttaaggagcgagatagttactggaagatgatgcagaagtatattggttctgatatcacatcactggtgacgcttcctgtcattatttttgagccaatgactatgctacagaaaatggcagaggtccgtggctcattgttacttagtatattatatatatgctacatcctcatggattatatatgtacaatgtgtgatcttactgtagattgatgctatgttttgaaaacagttaatggagtattcctacttattggatcaagctgatgaatgtgaagatccttacatgcgtttggtttatgcatgtgagtatttgctttgaattcaattttaaagatgcacatggatgacccttcttatcattgatggaatatactactctatgttacttcttgcagcatcatgggctatatccgtctactatgcataccaacgaacatggaagccttttaatcctattcttggagagacatatgaaatgattaatcacggcggaatttcatttattgcagagcaggtgagcttcgtaggcctatgattctgcaacaaactttttttttcattttgccttattaggggtttcatctcttctttaaatgtacatgatggcctataggccatttgatttctgtatgttctatacgtttcagaacccatacatgtttactgtttagagtaagaagtatgaatggagattcgatgaagtttaaattttgcacttcttataaccaaatattagacctctagcattgtcctcttctcctacgttatattggtgaatatttaaaatgtcttaccatattgtttttactttaggtaagtcatcatcccccaatgagtgcagggcatgctgaaaatgaacacttcacatacgatgtgacatcaaagttaaaaactaagttcttaggaaactctgttgatgtgtaccctgttggaaggtaatagcgggtttcctgctctgagttttctctttctagaccaaacttgtgtagtcttttttttttgttcttttcacttattcatctaccatcttatatttgcttatttgctcttcttctttttatacttgcctatttcttcttcttcttcttcttcttcaagcttgttcattattcaacaccctattttatttatttatataaaaacaccccttttttttcatctttattttatcctttgatctcatttgctcattttctagtttccctaatatttatgtgtcatctagtttttcattataacctatctgtgtaagaatctcttcttccaacaatcacggaatgtgtgatttttaaatggatttgattcttatataccaggctgctgtgataaagctcttttgttgtcaaatgcttccccttcatttgaacttggtcgtatatatatacttatgtacttctaaatattttcagaactcgtgttactcttaaaagagatggtgttgttttagatttagtacctcctcccacaaaggttaacaatctaatattcggacgtacctggattgattcaccgggggaaatgatcatgacaaatcaaactacaggagataaggctgtgctatactttcaaccatgcggttggttcgggtaattaaccaaaccattttattttatttttcataatcttaaaggcatcaagcatgttattgtgcccataaacctaaaagcacgattttccaccaccctttttttaaaataatgttgtcagttcatgtgcgaaaggaatatgagagaagacagagatgattcagtgtagtaattaaatttatttccatacattccaattccactaaatttaaagaaaccttttttcttatctgtgctgtgttttaatcgttaaaaaattatattgaatttcaacttttattatttcccctttaacaactgagaaaaagaaaacttgttttgtgttagtggtgttttaaaaatgattgtataattgcagagctggtcgctatgaagttgatggatatatttataatgctgctgaggagcctaaaatactgatcacagggaaatggaatgagtcgctgaagtgccaaccatgcgatttggaaggcgaacctattccaggggcagagttgaaagaggttacttactgtacattcttcttctaaattattttccttattcatatgggaatatgtatattccaagtattactcatttttctcagtcactaatgtgtgttaattcgtttatttaatgaagtttgaactggtaaaattgttatttctgtagctgatgccaatctggttctacaggtttggcatgtcgctgatgtgcctaagaatgacaaatttcagtacacgtattttgcacataaaataaacagctttgatactgctcctaagaagttgctagcatcggactcgcgtttgcgtcctgatagatttgcacttgagcatggtgatctttctaaagctggttcagagaagagcaggtcttgtaaaaaattatcaagtttctctttgattttatgtatatgctgttatttcttcggttctaattacattgctgtctttttgttcattacagtttggaagagaggcagagagctgaaaagaaagagagagaggccaaaggtcatcagtttgcaccaagatggtttgatttgactgaagaagttacccccacgccttggggtgaactggaagtgtatcaatataatgggaaatatgctgaacaccgggctgctattgataactcagaatccattgatgtggctgatgttagatcaactgagtttaacccgtggcagtttggcaatttgtctatggaatgaggtactcttgttatctgctttacttatcagaatctgcagttggttaatggaacatcttggtgtaatatgtgaatgcaataggttgtttcctagtatgttgtgaataaatcaaactagtttcctctatcacagttgcatttctgattgacgaaatctttacattctgtgtcccaaactcgattcatcaacataacggtcagttgctgctgcaactgtgttccattgaaagattaaaacataaaattgaatataaaagaataggaaaaacaagaagatattattagtgagagactggcttctaattctgttatctgtactgtacgtacttgtttctttcttttttctttgggttatattattattaccagtggcaattgaagtttaatgacttgcctcctaatttagcattttacttttatttcttgggggtaattctaatttctgtatatcttggtagatcgtttgatcgatgccattgttagaattacttaacaattaattttgtctaaatattttttattttgttttgagtcaggtagccacctactatgctcgattactttgcaagacaattgcaagttatagttattaaatattttcttttttgtacaagaatattttcgacatgccatattgtatataccatgcatttttgcattttaagatttattgaatttgcatgggaaatttcacgcttaaaaatttacccattaccaagttctagacctttaactaatttgtaccataatattctaatattttcctaatctacccaaaatattcatgccattctaatattttcctaatctacccaaaataccccttcaacccaccctcgacaattcgacccactccaccatttggccatttgacaacctagagtccccaaccaatgccattcccccaccgtcgacccaccttcttgatgaaatgttagattttgttgtttttcgaaaaaaaaattgtgagttaagaatttgtttggtggatttagtttaatttgattattttatgtattgtattattgtatttcttgaatttttgtgagtttttttgaatttgtgtttgtttgagacttaagatggtggtgggtatggtttttcggccaaaacgttgttattgatgagttattgatactttattgatggcttttgtccgtgcaccattattttgttcataaatagaaattatcgataatctattgataacttattaataatctatcggaaaatgtcaaattgacgaaattgtgctacacaaacagaaattattgataaactatcgataacacgtttggtcagaaaaaaccataacaaccaccatttaaggtcttaaacaaacccaattccaataaataaataaaaaaaaaaaacaaaaacgaagatgaagatgatggcaaaatttcgtgggcttctagtcaggctcagaggtgaggttgtcttctcagtatggatgatgttcgtagatgaagagagagacaaagtttggggcctttgggttttgtcaatgcttgaatgctatggaggtttgggtctttgggttttgtgtgggtttttggggcttttgaggtttcgtcgtcactaaggttgaagggaggggggctttcggtagtggtgctgagcaaacagagagaaagagaaaaacgagggagatagagagttgtgattttttaattgaaaggggtagaataggaagggaaaatataagtaggtatctattagtataaaattattgggaagctaaattttgatattgggtaaagttttaagtattatttatgatatctcccatttgcattccattttagggaatgttattattattatttttttataacaaaaacttcattaaaaactaacaaaaagaaattagtttatagtaacaacaaagggtgctacttccctttccaacagtggacggaaaacattatgggacgcagcccaagccgccacattgtgggccgagttagccgaatggggcagccaaaacacacaatcgtgagccacaaaagaaagacaattaaacaaatgcagaaaatgagaagagagctgccaaaccgggatgacaaacttattaatggcagcaactaactgaagacaatctaaaaagaagtttgcctccctgcagccccacttcacacacaacgaaaatgcatgacacaaggctaaacattcagcttcaagaacagaggcaatggcagcctttgcagataaagcatccacaaatccccccatctctgtcaaacaccacgacaacaatgaaggcttcgttcccacgaactgcagcgtccacgtagaaattgaaattcttaggatcaggaggaatatagctgcgcacaccagaattctcctgcaaagcctctgaattgatcaccaaagcctgacgaaattcttccacaagtttatatttacgacacaaaaattaaggaaaatttgggttactatagttaaatgtaaagaatgaacctaaattaatctacccattaaacacataacttaaatatgttaatagagaaaaggaagaggaagaagagagaaaagagaagttgaaatgagaggagtatttttagatttaggtggaataatactatatttttgttgtgtttaatgggtggattaatttgggttaatgctttacatttaagcatggtaatccaacttttttaaaattaattataagagttgtgatatgtgcgcatataaattatacattaaattatttttaataagaagaattagtatttttggacactatctgttcatgcctcctaaatataatttgttaaaaattctcttaaatataacagttacaaaatcatatcctttttgttgggttttatttttttttacagttaaaaattagcatttttactctttgaattttaactaatactaaaattttcctccttttatttaaaaaaattgattt

SEQ ID NO: 225067 - DNA, 8389 bp, Cannabis indica
aaaaccaaaaccaaaaaccaaaacaatccgcttgttatgttgatctcccacgattcttaacgtacacccttctcctttcgtttttcagatcccattccatctcaacgctcttccccaaacccgcttgcttctcttccttgcattcttatggttgatttccccgtacacttatgtgcaccggtctttgactcgaccccattggtgagataggcggtctctgcaatcttcagcaatggagttttcttcttggttcatggttttttctatttcctgcttccttttagcatctgggtcattctcggtcgagaattttaaccaggcgtaagtcatttcccactgttcatttttttctttttcttaataaaattaagaaagtatgtattttgttcgaagatgtgtgtgtgtttccattttttttaatcttgcctatgactagaatgaagctatttacaattattggaatgttcatttgtttagttttgtgattgttaagtttgatcttattaactgttagctgttagtgataaaggtgaatcttttaagttatgtttcttgtcatagtgaagaatttcgcttcgtaatttggttacagaaaatgatttgatatgctaaaagagttgcttttttcagtttggtctctcaaattattggactagtttggatagttaaacatggaaatactcgctctaatatcatattagatttactaatttgattataatgctaatagaaggggcaccgccaatattagaatgcatgctttccacatatcggagagtttctaacatgggttcttgatttgattgctatgtaacttgttcgacaaataatgattttgaacataaattgatttagctttgtttatattaaacttgacagttactgcccctttgtaacctctacaatatgtttacactaatgagaacttaaattgatgcaacggagttattaactaattgtgttatcttctgagattgtttgttttacaagtgcttctcagtttgatatcattatggggcacataattgtcatgcaatatatttttgttcactgcttaaattttagaagagttgtttaggtaaattgttcagaaagatttacacataattttttgttctgcaaataacatttgcaagccgctatatctaacaattgttgcaacactgcatgctcaggttcccaattgtcgaacccgatcctggtcataccaaacttcagctttcaagggaaggtttggaggccatcaagagaataacaactccaattgcagctgttgcagtaagataattttatggagcagcttgtactaagaattaatatattttattcatttttgaattacgctattgcttgaaagtttaacataaaggtatatttttggacttcatgaggttcaattgtttagggaaaccttcaatacacttgagatggcctatttagcatgtaaagattaaagtagttgtcatgtcagacataggaaatctgctctttctttttcttgttttcatgctaaaagagcttgtcttttttttttctctttccaaatatttcttcaccattctttttattctttaatgttttaaaatatcatctgtgtggatttttggagctgaaccagaaaatctacacatgtaatagtgtttttcattttcagtgaaaaaaaaataggtgcaagtaattgttttgagtacccttatttatgagtttggtcagattttacgtttatgagcttcctatacttttcattagcttgattccatatcattggtggcttgttcttcaggttattggaccttaccgctctggaaaatcgtttttgcttaatcagcttctctcgctttcttgttccgaaggtgcagtcctatttatttttgtattgtttctgaacaggtcttgttgcgttaatctttctgcatagtttggttagtttatatgatgtagtatccttgaatatccaaatgctttttcttcaggctttggtgttggacacatgcgtgacacaaaaacaaagggtaattaccttgaaatcactgatgtgcgtactaatagtttgcttctttcatttatgtggctgctatctgacagttttgttctttcttaatatctgtttcagggatatgggtatggggaaccccacgagaaatgacgatcgatggagtgaaaacttccgtgcttttccttgatacagagggttttgagagtgttgggaaatcaaatgtatatgacgacaggtaatttccacgccaataaagtacttatttaaattaaacaaataaataaattaagtgctgtttttctttggtgtgcctttccttttctcccatactgagttccctgcttctgcaggatttttgctctggctactgtcttgagttctgtacttatctataacctgcctgagacggttagtggcaataagtttgatgttattattttagaaggctagttaatctcgcggctcctatgaccaaattaacttccttatgtcatttgtgtagatacgtgaggccgacatctctcgactatcatttgcagttgagcttgccgaagaattttacggaaggttcgtgcttttttctttccttctttctttcaaaatattttattaggcatcttagttactgtatttttccacttagcaattgttttaacatttaacaatgttttggttattgtctatatttttattggcaaaactaatttttttagtggcttggttttttcatggcaaacagagtgaaggtaatttacaaaacctttttgtatatattacctcccccctaccatacaatttattttctatgattctaatgatttctattggctatttctgatgatacgtgtcgtgtgatatgcataaataggggcaagatattgcttttgaacctgcaaagcttttgtggcttatccagcgtgattttctccgtaagtttcatttgatatgttttttgtaaggaacctgatctgtaatttatgtgacaacctaccaatagatcctttagctcagaaccgaattgtgtaatatttttctaccttcttgttgtcctgcagaagggaaatctgtgcaccaaatggtggttgaagctctccatcgtgtccctaacagtgaaggtcaggtttttctgctcattggctgaactcttttgtttttgtttttttttgtttgaaaaagttgcaagcccagcagtgaaaggcaagggtcatttttattattattatactactaaaacctgagctgtttttgtaaaagcaaactcttactgttgatgttttttgaaaatgcaggggacaaaaatatcgatctggtatatcctctaataattgatttcttgattttcccatttttttcaattattaatttaaaaaatttcttttggaacttatctttgatttgctttgtgtttttatcaggttaatcaaattcgagattccttggctatcatgggtgataacagcacagcgtttagcttaccgcaagtacgggttttactttaatatttgctgtccattcaatattagtttcctagttctataagtatgacatgtattcacgcacactagaggctgtgtgtatatttatttgttcatgttttgtattttgtttatgtgatctgattctatggtgaatttgaattctgtacatataaacagcctcatcttcagcgaacaaaactatgtgatttgaatgatggtgaacttgacccaagttatgtcaagaagagagagcaattaaaagatgttgttggcagcattattcgtccaaagattgtgcggggaaaacctcttaatggaaaggagtttgtatcttttctagagcaggtatctcttaagctggctcatgcgaattaaaacaggaaaaccagggaaaaagttcctgtcattggagattaataatatgttgtaaagagtagtagttttaagccccttcgttaacatttgtgatcctatcaaacttttgggcattattgatacgtttttctaatattagcaacgacaatcaaaatgaaacgtgattatgtgttatcacatttatttgttatgccattcatttcctgccttcaatatgttttttaaaaaaatttattattactactattattattattattatttgatttgttattctattaccaatacaaaagagtatacttcattttgttatgttggatgctatctcttgtacatgaattgaaatttacacatatattgctttttgatggtaatactatgcattttaatattttcttattcagatccttgaagccttgaataaaggggagatcccatcaaccggctctcttgttgaggtttttaataagggtattcttgagcgatgtttgaagctgtatagtgatctgatggcaaagttgcatttacctctctctgaagaatctctgcaaaatgcccatcaaaattccagagaggaagcaatgcaactttttgagcaccagcattttggtcgtcaccatgcaaagaaatcagttaaggagctagatgaggaaatagaaaaggtattcattcaactacacatatatttatatatacgtaatcggaagttgtactaggttatatagtatatacaactaaatagatggtactaggttatatactgtacgtgatcagtgtacctgctctaaaattcttgggtgtttccagtgctgtttagtgtctttcttctatctgattattgggcacttctgggagaatatatctaaaattattgagcaattatttcatgaacaaaatagaagttttgtcagtggtgaaacctgtagacattgattatggtgcttaattgtgtttgttgaactccatttggacttcttcactccaacatatttcgtactcatatcatattacggttttgcattatgctagaagtacgattactaattctagaaaaattatataggcttacaagaacgttattctagcaaatgaaaataaatcgtcaaagctctgtgagggattgtataccacgtgtgaggatgaaatggatcatcttcaggttctcagacttcctacaatggcgaaattcaatgcaggtttcctgaaatgcaatcaaagttttgagcaggagtgtgtaggaccttcaaaagcaagctatgagcatcgaatgatgaaggttggtcaatttttttcgttcttttttgtttgagtttgacatttcctttagctattaaaatttgaagttcaaatctattttgatacttgtttgtcatttggatagcagaatgaagccataattcattgtttggcttcatctctatttttgacaattttgttgccttgacatagtctgcaactgcaaaaattttagacatacccttacaaaaacgacctatgacaatttaatttcgcaaactgttcttttctaagaagttacaattaccaattgactttctttattgccataataaaattaattaatctagttacatattcagtgtcgaaatatgtcagtttggtatgctggagccagataactgaattatcatacatacaattttctgcagatgttggggagatcacgctctctatttatcaaagaatataacaacaggctcttcaattggttggtgaccttctcccttgtcatggtggtgttaggcagattcatcataaagtttattttacttgaaattggggcatggatactcttcattttcttagaaacatacacaaggatgttctggacagctgagtctctttactacaacccggtttggcatgtgatagttgccacttgggaaacacttgtttacagcccagtactggacttggacaggtaaatgaactctcctttctttgatcctcaatcagaagttcatgtagggcacttaccaaatgagatataaatcttatcacactcaatcaccattaatactcaattactgtgtttttgatttggctttttttcgttgttcggaacagatgggcaatcccccttggtgtagtactttcattattcatactttattggcggtgttacgggataaggaaacacgggtcgcgatggcttttaccaatgtacaatcccaaaggcggttcaaatcgccccagatcagactgagaaataagtgtttacttttgaagtgtttaactatgcatcttctctttgtacactgggcaagctcttctttttttatggtacgtgaagcctgccgatgatctattcttttggttcttcaaggacttgatttgctactgcagaaaaagatgaaaaatggtgaagaagattgaaaagaaaagggaagtttcagacagtgtaggccaaatgtagcattagccaattaattgtatctttgttatttaaattatttccaaattcatttatttctagcgttttagatttgacaatgaattaatactcaatttgtataatctgaatttctcatcacgaaatactttaaatacgaaaaaaggaaaaaagaaaaagataaatggtttactcgaaatatctgtgtcaaatgcttgtggattattcatgagattttgattaaattccccgttggactttagttgtaaaactactaatgacacattgttcagtattttaatgtaattagcctttgataacacttatattccctcttggcgaatggaaatttttcgtaaatatgagaatttaaagaatttttcttttgttaaatatgagatgttacgcaaaataaaaaagagatttacaagatggttgaaactcaactttagattgaagataaatgattttaatggaaaattagtcattgaagataattgatcagtctaagagcatatctaatcgtatactattttattaaattggtgtgaattttttacactattttactttaataatacactaaattatggtctaattctacatcattaataatgttaaattttgaatttacaccgatttagtatataatttttttttttttttacattctaacctttatttaattttattttcagatataatcctacaattaagtcctttaattaaattttatcacaaaaataataattgatttaaaacattaacatatgtgcaaatacaaaataacaataaaaaaaaatattaatactaataaaataaaaataacataacactaagttataaaactaaaatcaacaacatttaagtaattaataatttaatagtcaaattgatcacttgtggatcttagctttaaaaaatattaaaatattgattatataaactttaagtactttcagaatattgatatttaatatgcttaatattattgatgatctcttttttgcataatcattttttgtttgttttgaaaatggtcgtgtatattaggatcaactatataacttcaataagatttttttgaaaaaatatttagtgtttaattgttttaataaatatttattttactaaattattttaagattctaaattcttactagtagtcatgatataattcttactaattatttcataaattaactatttttggctattaatgtaaataatataaaatgtgaaaatttttaagtaaaatatatttatttggtagaatattttgtgtatttgatgtgaatcattttagttattgtaccaaaaattaaatcttttaacattaaattggtataaatttcacattatattaatagggatatgattttgttccgtgatgtactctcacggaatgtattctgtggtacattagatgggtctcagggtacattaaatgagtgtgagggtacgtttctattttttaaccctaattacccctagatcaatctcagctgttagatcaaataactccatcatctgacggcttgatctaacggctgccatacaccacggattacaattcgtgaaagtataataacaggacaaaatcatattaatataatcattggagattgtctaaaaaaaattatttatgaaagtaatcttttatgacaaaaatataaggctataagaaattaaataaatttgttgatgttcatttttaatcaaattgcccgtacaatatcacaacgcattaaaaagaaaaatttataatagcatagacattatataaatttattacaatatacatattttttttttgaaagggacaatatacatatttaaaaacataattttgtttgttcatacaatttgtttattataaaaaatatatttacatacaattacacaacgtatataattggtatgttgatagggccgtctcaagatgttgagagacttggggcgaaatttaaataaataattacataagacatcattttttataaaaaaaattatattttgacgtttacagatttttttttacatttttatgattttcgatagaaacaacacaaaaacaacaagaaaattacataaaagtaatatgaaaataacatctaaacaacaacaaaa

SEQ ID NO: 225068 - DNA, 2455 bp, Cannabis indica
aaatccaaaaacaacccgactacccgaaaacccgaaaatccaacccgtgtgcagccctagtaccaacctcaaggattcattgatccttagtttcccaactatatctgcaagttgaataaggtaatatacggtttaaaacaggcccttaagacctagtttgacactctcaaatccactttgctttattggggattcaaaaattctacatcagacacaaggttgttctttacaagaatagatggcaagttgctactactgttagtatatgtagatgatatcttaataacaggagaaaatcaagctcaaataagcaatatcatcactgcacttcacaccaaatttgctctcataatccttggctcagttcattacttttttggttttaaggttcttcgagattccaatgctatatatctcactcaaaccaagtacattaatgacttgttgacaaaaactaatatgacagatgccaaaccttagccaacaccaatgtgtgcaatcgctaagttgtctagttcatctggcacacctcttgctgatcccaaatagtatcgtagtgtaattgaggctttgtggtaccttacaatgacaaggccaaacatagcctttgttgtcaacaagctcagtcagtatctcaaaactccaataattgatcataagggtgcctacaagagaattctgagatatttagttggtatttcaacactaggcctctattttacagctggttctgatcctaatcttcatggttactcagatgttgattaagcaggatgcagtgatgacaggaagttcacctctggctattgcatgttcttaggcagtaacctcattagctggtgtttcaaaaagtaaagtgtggttgctcgatccagcactgagtccaaatatcaagctcttgctttagctacatcataaatcatatggttggaatccattctccctgagttgtctattcctgtgtcaacagtcccagtgttatagtgtgacaacttaggagttggtactctagcttcaaatctagtttatcaggctcgaaccaagcatatagaaattgatgctcactttgttcgaaacagagtacttgataacaagctggatgttcaatacgtggattcctcataccagattacagacatcctcactaaacctcttcacattcctcaatttaactatttcaaaaacaagttaagactcaagacaaatgagtataacttgaggggagatgttagagatagtcaggactagttttcccgttggcttttattttctgttagttagttacaagtctgttacagtttccgttggtggttggtgtatattgttttatctaatgtaactaactattgatatacaaaagcctgaagcctaccattgcaaggtcgagcttcatttccattctcctttctttacattcttacaattagaatacgatgcatactggaaaacatacatatatatatataagaattaatgtgtaaattcaatggaaatgaataatttaattacataagtaataattaatcacacttattaaattatacattcagatcgaagaccttgagttggataaacattaattttcatcatcaaacttagtcaaatatgttggttgatcattgaaaattatttatattcgattcttgttgtattcacacaatatataaaaaaattccttatgatttgaccaaaagatacatacatattctacctagctttaaatgaccaatgtaaatggttgaataaagaaatggtataatatgataatttgaaacttgtgtttggacaatcacatgctacatacatttagttcctttcatgtgtatggaatttgtacaaaggaaaattctaggggaaaaaaaggtttgaggtgaatagtggtctacagaggtttagggcaccccatattaaaagcatgtgacattcctcatcatctcatcaaatgttaactactataccagttttgttttatttgatgtgtattgtgtatacatttttaattttcttttcttttttttttttttgagaaaattttaagtttctaatttttatggagatttcttctgtctaatatggtggaataataacataaaaaattaaaggaattttacttttatttggagcaagaggaaaaatggtagaaggataaatacatagtatgtatgaggatggatagagaatctagcatgagggtattttgggaagagaaattgagaggggcaaatggttgcgtggaggtggtcaggattctacttttggaatgcctacgctagctttttttttttttttggttcatattaaaaacaacaacaaaagttttaaaaagaataaataaataaaaaaagatataagaaagaacaaagaatgaaattttttgagggtttgcgggtttggtgggaatgcctttcttaatttgcttcccactctctacttagatctagagccataaaaaaaa

SEQ ID NO: 225069 - DNA, 3832 bp, Cannabis indica
aaacacaaacttttacctactcacatgacttccatctcagtgtaaccatagttttcctcctaccataaactacactagacttgcccaaagaagccaaatttagataatattccaaagcaagatacaaaaaaaggatttatacagaaaagatgggaaattcccaattgttgtaaaaaccaaaactaaaaaacaaatctatagtacagctatagaaaagtagtagcctccaactacatcaaattttttgaaaacacagctttattcccccaaattcaaaactgaatatcaataacacaagacataaagccctcaactttaaggtttacctgcttaatatgactccaattttaggaaaaccatagcttttctagctaatccaaactaaataagacttgcccactaagccaaatttaataactactccaaaagcaaggtaagattaatgggtcctaagggtttcaactttcaactcaattctctaattcaaaatttaacaatactgacatacccgatcagtatccattgcgctcgtgaaatttgaaggcttcacatatctcttccctgaaaatcatcaacatgaaaaagaacaccagagactcaaaattaggattatggctcaatttaattgcacaaaggaggagaaagcaaaacatcaataatacctttacgagttgtgggtgcctttccatggcggtttagaggaacggttttcctcttcttttggcctttgaataacccacttttctgcgtcatcttctctcttgctgattctcgggggtttttcagatgcagagttctctcgctagggttttggccttctttcttttatcaacttccaatttctgttaactgagccctataaacgacacgtcgttttgttgataaaatagaaactttaaatacaaaacaaggcgtcgttttcaagtaaagaacgacttgtcgttcaattttatccattttcacgtatcaaaacttctaatttatttacacttaaatatttttttgtttttgtaaaagtaccaaaagttgtattttttaataaaggataaatttactaactcgaagtcaaataacaaaatattgtgaacatgaagaggaacatcatttcctcgaaatatactgatattattactaaattatgagcaacattattagcagaccgttgaacaaaaaataaaacatatgaggtagagtttgtaacaacatcttataatcctcaaccaacacaccgaaaaaagaagacatgcaactctcctcccatgtagataatcgataccgaagtgcttgcactacgaaaaactagtccatctcgacaactattcttattgatactgaatccagcttaacccttctttaagcctaatgactttcgcaactttcaggctaacaaccccatgcctacatcctatctgagcctcaatcaattggaaaataatgcaacatcaacatttactttgaaggtgtctagcatccacttctcaagaccatctttggtacaaacgagatcatggagataacatgttgatcttgagcacttacccattgttcaagagtaattattgctatcatgataatttactgaggtgattattatttttgcttccaaatcaatgaatttacgagctccctagctatattgccctacaaagcatagccactttccaccaccttatatctttatcaaattgttggaaaatatgctccaaccaaccagtaaaagatatcccacattgtttgagcaaaaatacattgccaataaaaatgtaatatggtctcattaatatgtactaaaactttgaataccttttatttttaaatttttttaagtaacaaattaaattaaattaaacttacctaaagtagaaaattaaattgataattgacactgaaaattataattttaccaatattaagtatttatactctatatcaattacaaattcaatattttgagtacttataccgcaaatatcattgtttcttttaattaagaagtgaaatgaaagatatgaaagatggcatcaacattatcatgatgggtttaagttaaaatgaacaacaatgtcacaatcaaaaagaatccttgcaatgtgggcattggtgtgattgtccatgcaatgtgagcattggtgtgattgtccaagaagattagtgataatctctactcaaattagttgattaagtaagaataatccaagtaggcctcataacatacaatattaaattctaaggatatatatatatattacttaaagcatttttccaggttcaaaattggaaatcaatcgaaattattctcattaaattggaactattttgaattgataaaaaaaagtttatattaagacgagtgacacaagaatcataagacaagcaaagctttcactcaagttccaatgatctcaaaacacttctccaataacaccattatactaaggcaagttgagtagagtatctatgttgaagaaggttcttctgtcccgccactattgaccaactggtaaaaacagaatacaaaaacatcagtacttaatacgcattaaagaaaatacaattttctttttttaatattaaagttttattatctagcttttcgagaacatctctttcttgtattagtcgcaatgttaatgttaaaataataaaattgattatggttgagtgttttataccaaagaaccgagttgctcgaatgcttccataacttttggatctttctcatcttcatatccaacttgtactatccttggtccattcacagaccaaaaggctctccgccccgcctcctggaaaaatgagaaaagaatagagttcaagagtagcttcacaaaatttgatgtctttttagttattagcatagaatatcagaacacaaatcacagcatgcagctaattatttaacctgtaaagatatcaagtatattgcttcaagggattgaatgcgaatatcaggatctacaactggttcacgctcgattgagagcacactaccaagttcaagtggcatttttgatgtgtcttgttcactgtaaatctgaaaatttccaccaagcaaagagaaaaaaagaaaataaatatgagttgaaagttgaaattctaaattcgcttataataaggggaggagcaacgaactataacaagcgtataacagaaacgtatcaccttgtttccagcaaccggtagaagcagagctggccaaaggaactcagacatcaaaagtaaattctgtagttcattctcagcttcaaaacaacagttccgaacagttccataaacctatagaaaaaacaaacgccttacaaaaatcaagttgagttgaaatacaaattaccatgaactacattccattccatctctttgctaaaatgaattaaaagaagcattgttcaatatacaccgctaaggcacaagcaaacatacccctttccttctcaatgaattaggtgagtcaaactgtctaaccatctgtttcaaaagccccctcttaggatccaataaaagttcccttccagctttgttctttgaaatatttacaattatggaaccgacatgttcaaatgcatcttctgctcacggcatcataaaaagtgccacaaatgtcaaaacaagtactacctaacacaaacacacacattaacaataatcttccactgaagtctacctttggcttcacttgaagatctgcaaaatgatctaacaagtttcataacatagagtccttgcatcttctcatcgccagtcttaaatgtaaaatagcaaaaataaaaagttagcattccaatttttttaaacagatgcagccctgaaaaattataagaaaaacacacctgaa

SEQ ID NO: 225070 - DNA, 5743 bp, Cannabis indica
aatgttgcagagtccgtttggcaattgggtattggtggtgaagaatcgtacccagaaagacccgatgaggataattgtatcttctatatgagaactgggtattgtgggtatggctcaaggtgtcggtttaatcatccccgagaccgcgcggcggtatttatttatttccatcaattttcttaatgcttaatggatagttttttgatggggtttttgtcatgatcatttttgttttgacggttcaatttggtttgatctttgtattgcagttgagaaattgtggttttgcatgtagatttgattgtgggttttgcaagttttcagcttttctttttcgtgggattttgtggttttccttttcaacttcatttcttaatgcgttagcagggatctatatggatatctagtggttgaatgaatatttgtgttttctttcttcttttttgttttcttcttccgagtagtcaattttgaaagatacacactgctcaggttataggagttgccagggctggtggaggggagtacccagagcgacatgggcagcctgtatgtcaggtaatttgattgttctgcttgatttttgaagctccatttgttatttttcttatgattaggcaatgcacattttcttatttgatagagatgaaaaaacaatgtttggatttttgtttttatggtttttggttgctgatataattctcttatatggcagtattatatgaggactgggacatgcaaatttggtgcttcttgtaagtaccatcatcctagacagggaggaggttcttctggccctgtttcactaaattatgatggatatccattgcggccagtacggttttcttttttaatctctgttcttttctatagctttccatatcagttacctcatttccctctgcatttctcgattttcttttattttttcaactaaaatagggtgaaaaagagtgtacctactacgtgaagactggacagtgcaagttcggtgtgtcctgtaaatttcaccacccccatcctgctggtatgccacttccgctcccatcaccagcagctcaagtgccacctgcacctgctacaccggttcatggacctacattatatcccccaatggcatctccttctggttcctcatcacaacaatatggagttgtagttgcaaggtcttccatggtacaaggctcatatgtccaaagcccttacggtcctatgttgatatccccaggcatggtaccttttccggggtgggggggttcttacatggtgagtaaagttcctttcttaactcccattttcaagtttcatgtgtatttttcccctcattgagtgtttaaccatggtttgcagacatctataagcccagtgccctcccatagcaatcaaccccctgctggttcaggacaagtttatgggttaagtcaagtatctcaccaagcacctccatatactggaacatatcagcctgttgcttctcctactgttccttcagtcagtagccagaaggaactttcttatccggaaaggcctggacaaccggaatgccaatattatatgagaaccggtgactgtaaatttggatcttcttgtagataccatcatccaccagatattaattcacccaaaactactgttgtccttagctctgctggtcttcctatgcgtccggtaagcttccttgtcatttggtttaaattcaacttacaattatagagaaagaagcttttcgaagttatccaagttgaaaagctgatgttataaactaggggtattctaggaaaatataaatactttcaacgtggtaactttttctgtgtgaattgttcatttaacatatgaaaagataacatattttggtgcctagcacagtaggttcaaataagctttctttttccccttgtgtgagaaggaaagcttgatgatgtttctgactttaacaacaaccaaggttactaccttgaagagaaattgcatgcgtagcatattcatttacttgccatctttttccttttattggattcatgttttttatgttttttttgttttttcagtaacaaattcttattaaaaggaattccatgcttttgttttttaatcattattatttctgtaatatgcaaagatttgcatgctttgtctctaccatcccaacatacttgtcttctagcatgtcttaattatgaagatgattaccaaattatgtcactcaatgtaagctgaatataacattttagtcttctatattctctgttgctaccctacaatattcaatattttattattatttttctggcattagtcccccacatttgttggtgattctacctgcaaaatgtgcttgctttctgcatgtccgttttaggtttgtcaagacacccaattgttgtcatcatcatttaatcaatatgccgaaatttcttcgacagcattttttattcttcttttaaatgacatcgccctttccccttaaattttgttttccataacttattctgattaattgatatgttgttcgaaattcagggtgcaccactttgctctcactatgctcaacgtggagcatgcaagtttgggccagcatgcaaattcgaccacccactggaaacactaagttatagtccatcagcttcttcactttctgatatgccagtagctccctacccggttggatcctcagttggtacgctagcaccatcatcctcatcttcagacttgcgtcctgaacttacaccagtatccacaaaggactctacttcagcaagaatgtcttcatcagtaagcagttctagtggatcagttggttcaacattttcgaagggtggtcctgtctctcacgcgagtcttcaacagcctgcacagaatcctggaacttctactggtggcaacaccagtaccagctcagagcctcgtacttcgagctaagcaatttcccattcttctttttttcttcaaatttctccaaccaaagcatcattttttttcccttttggtgcaagtcctctaatagaggcttcatatctcacttatcatcatggtttcacaaaactcctagaatacaatcttgctctgttcatttctgtgttcatataatcattatattggtcatcctttcaatttcaaataaccgatggccaaccctcaaaaactttttagcagcctcatatagccttccaatttgctcatgaataaccatgaaaaaaaaagaaaaagaaaagatatattcttgcagttctgttaggcgaaatctgaatccagctctccactttaaagagctgttgtgtttattgtgctccattctctttcaaaatgaaagattagtcccacggtgctctaccttttacactgaccgtgtttttcgtgtctatccttttaaatttttttcttcctttttcatagttttattttcatttgaattcggagcaagcttcaaattgaacattagcatttgagtgtcttgttttcccccacttgtttttttgtcaaagggtctactgtgaacaagacaagtacttcagattcagagagaccacaagaaagccatcagatcagatgctaatacattatataatgatttaagatatacatggaccatggtatgttgtggctacaaaaagaaaaagcttgacctgtttattttcaattccattatgaaatacaaaaacaatatatgaagatgcaactcttgactctgcaataatggttgttcttcttcttcttcttcttttgtccccgttttactagggggattgatacctgttccttataatttgctttatttgatactacaatattagcttgacttatatggaaggaaaaaggaagtggttgattcgattattatttatttgtaaaacatgattgagatattaaatcttcatttatgtttcagtaaagatcctctgcttttatagttgggggtgaaaataatggtcctgaaataaatgagctccaactccctttttaaagcagcaaagaagtcaataagactggtctggtctggtctggtcttcataataataataataataattaataatcatcatttttatttgtccaagctgtttttgatgccatgttcctttttttttgaccatttctctcaactgggtcatgtaattcccatttgtttccagttttttggggtttggtttccctgtaaaatgatgtgaggacctttattgttttgtccctttctgccgactaattccactacatgacaacctctcttgagaatttaaggcctcttaaagccacatctccattttctatttttttaaaaaaaaaatttatcaatatttattccaatccaagtaaaagaaaaacttagctttgctttgtaattatctaaatactaaagcaccaataacttaataataatgataatgattctcagacatgaaagggttttgtgaccaaattcaaacctctctttaaatggtaaattatttatatggactatttattactatctaatttagactaagttttccaaaccattgccaagttttgtaacccaaaaataaaaaaatatttaccatgggccagaagatgatgcatcatcactgacagagtaaagaaaaaaagagtcataaaactcacgtgccaaccctaatataaatatatggtttccattttcgacagatttgtctttttgattttttttcttctccaatgttccctttaaactttccttaaacgtgagaaaaattgaaaccattagaggacaaagaaagtgacaatctgcaaaccactgatgcccaaaagtgataagaatcttctcttctgatctctccctctgttttttttttaatgagtgggatgaaatgaaataaattaatttacaagatgagtgatactattactctcctatttcaatctctcgaaaatacatatttgattttttttttttcacgacgatgttagttatacttacaaattttaaaaagattctgaataatttacagtatccacaatagtgtttcttatattacagtttaccatgtgcatttaaaaaaatttaaatctgttttcggtactgtaaattattacaatattcggaatttagaagttgtaatatatagcttcttctaattagcactcctcaacttataaatgtttttattcttttggttagtaaatgtgtctatatattaaaatcactaccaaacaaagtgtaaagatgcatacagtttaaatagttgtgatctgagatgagatctatgacagagtaaaaaagaagctgttgagtagagagagtgcctgagtttgatagcattaatatgacccacccctactgctaggaccaaaatgaatggtacacaataatagagtaaatgaaaacaaacacacaaacatataaatatactcaatgaccttgtcatgtcttgcccttggtgatgatcctatattccttaaaagttgggactaaaggatttttatgcagttacaccatgctcctacatcctcacccctctttaatatttaagacccccttttatgaaaaaaaaaaaaactatatatatatatatagagtaagttgccatatggcaacatgagatttgtcgggagcctgaggtcagtctcagcctcccgatcaatcttatagtgtcacgtgacttgagatcaatcttgtagtttcacgtgactcggagattactcttattggaaaatacattatgtttattttcacaataattatatcaatgtacacacctcttgaatcaatgattgatcaaaccatgag

SEQ ID NO: 225071 - DNA, 4843 bp, Cannabis indica
gcaaaaatgaacgcgaagcttcactcctttccaggtacttcacaattaattgccttaagtagactactttagcaattttttttatttatatttagtgacggaaaggggctatttatgtaactagtttaggcaacatttcttattgagaaagaaggctgaaaacggatcaatacataggctatattacccctactgtaattcaatgtaacaaagatggctagcaatgcaataggtatttttcaaaattgtgataaaagggcagctgaaaatgcaagggatttcagacaaaactcctcattttcactctttgtaaaaaatccaaaggtttagtcaatagaccagtctcacaatgcaatagattttaggaaatatttcctttttaggaaagaggatgacaacatactgattgtgttcctgatgaaaaccaagataaatatgcatcagatttcaagtgacacttccttctagggaggaggttaaaaatgtattgaagttcaggcgatgttttcattcatagtaaaaaaattaaaaattttaaatatgaaggtgggaaaaaaaagttgaatatgcaatagattttaggcgacacttcctaccaggaaagaggctgaaaatataatgaaatccaggtgatatttcactttaatgttgaagaaacttgaaaaaatttaaatataaataacataaaaataatacgtgggcattgtatgtttttgagggcacatatctaggtatactcctgccaagtgagctagaaattttggacgtctccgaattcttgatcacttaattaaaacatagcttgtggccagagataaaaagtgcaaattcttttgtaaatttcttctgttttcatttcatttttcccacgggcttacatttaagaaggaagatatacaagaaattaaaattaagctaaaaagatgtttagatctggatacccctagcttattgataatagcaacttaagtagtcttcattccaagcacacaagatttctgatccatccatcctcttaagttgatatgttctattacccaccctgcgttgaattttataaggtccttcccaattaggtgctaagacccccactcctagttcttatgaagtagagaatactcttaggatgagatctcctctatcaaatctaagattcctagagcagagagtggttttaggttagatcgtaagtctcttgtctgtgggaaggaatagtggcttctactgggatggctccctcacaaccataagccattgaatatggcggatgcctcgttaaagttctctctattgttttgtatgccctaacgactcacgaatgctcctctggccaatgggctttgcaagcatgagtttcttgttcaacactgtctttaagatcttaaaaatagcttttgctttttggtttgcttttcatgattttatgttggacagaaaagttggagaagtgttcactgtcaaattgcttcccattatcagagacaatcttgtgtggaattccaaactggtacacaatgttttttatgacaaagtccatggcctttttggaggtgaccgtgttcgtgggctccgcttccacccatttggtaaagtgatcaattgaaactattgcatattttactcctccttttcttatgggggggggggggatcccactaagtcaattccccaaactgcaaaaggccaaggactacttatgagtgtgatctcagtcagtggtgcttgcagaaccttggcgtatcattaacagtgttcacacttttggacgtattctatgcatccttcatggtgggctaaaagtaacccaaacaaaggatctttttggagaggctcaatccagaagtgtgatccacatagaaacctttgcgaatctcgtaaatgatagcacataccttggttctagctatacaccttagatatggcacagataaccccctgctgaaaagcttcccatccaatatcacatatcgaggagcctgaattggacgttctaggcagcaactttgtcagttggtagctctcctaaactcaaaaatttctaaatgggacctatctaggagtttgagtgatcaagggtggcatttaacccctgtcctccaatactcgagactttcaggcggcctacaggcatcacttcatattgcactatctctaggtctgttgcaagtttggccaatatattcgcgaatgagttttggtcctttaggacctgtcggatgtcgtagctcttaaaaccatgcaataactcttgggacctcatcacataggcatccattttctcacccttggtttgatactctaatgatatttggtttaccactagttgggaaacattgggctcttcaatgtattggactcctacttccttagccaattgtaatcctactaacattgcttcatgttctgcttcattattagaagatgagatctcaaagtagagggcgctttagagctgatgtccttaaagagacattaataacactccaactctagctccattttcatttgatgcttcgttaacatagaccttccaaactggcagttttggaactggcttgtctggaagtcattcattccaaaacactccactatgaaatcgactagggcctttcccttgattgaccacactaggatgtggcactagatgttaaactggtgaagtttcttggcctatttcagcaacttggcagaggcctctagcttttaaagcacttgggaaagatgatggttggttagtaccttgatggtgtgggcttgtaagtaaagtctcagctttctggaggcgattagcaagcaaaaggttaacttttccatcatgggatacttgtttttgcacacagtattcttttacttatgtaatacattggtcactggactcttccttcttcttgaactaatgtgacacttacattgtgaccagacactgccaaataaaggtataacccttctccttccaccagcttcgacaggattggaccctttgccgaattctccttcaatttttggaaggcctctttgcattcctcagtccattgaaacttttttattccctcgcaacacattaaaaaattggatgcatttatctgtggactttgagatgaatcaactaagggctacaatccttccaattacactttgcacatctttgtgcttcttgggagaagtcatgtctatgaatgctttaatcatttttaggtttgcttcaattccccgagagctgacaataaaaccaaaggacttcctatatgaaactccaaatgttcattttttgggattgagcttcttcccgtacctccgaaggactgagaatttttgagattatgccctaaaaacatgtaattaatggataatatattagagaaaatatgaaatatatttttaagataaattatattttaattataagagtagaattattaaatatttgaaagtttcttattcatatggagaaggtataatctagtaaggatgtacaagagaattaagattatacgatatgaataaaataagtcggcaacgtataaaagtttgagaatctttaatataataatgctaagtatgatttactatacactatacttctagtgtgtgtaattcggatcacatatgttgatgggcatgtagtaaaggttttgtgtataattttattatgcattactagaacgatatgtaataaacatgtttcattaacttgtcatttaccatgaaatgagttactcatatcagaatgatgatcattagtagatcagcctaaatcctgagtatacatgaactcttatttgtgttcattgagttctttgatacaatcgttaaagtttgtcagagaagatgattcttacaacatctagtttgggagcttaataacatgagtcgttaggaacttgtcatacaatagtaaaatccaatctttcctaacggatcgaatattagttctcttatagtgttaattctgagattgctaatagttttatccaaatctataataagttatagattaactgattacattgaattaatagtacataaggaatgaagagataattagaagggtaaagtggtattttgattaactctaattatgaactaataattggagggtgagctacttatattgattatatcaatagactataagtaagaattctgtaaaatataattctacatttacagtggagtgataattgaataaataaaccaaattattctattaatgaaattgataataatcttgggtttcttggagctttgatgcataggtcaatagtccctgagtcacctttatacacactgtacagtggaaggttttatttgatgaatgaattttgactaagaatcaatttctatgggaaataaattcttaaggctaaaatagtaatttgtgaaattatttttttaattaattattgcaattaggaattgcataattaatggtatttaactatttagttttgttcgataaaactacatcaattagttaaatattatattattcttaaataatattaaagagaaatatattattttagagaaaataatatttattttatttcttgtaattaagagattaatgagaattaatcaattattatttattgacaaaataaataataaatcttatttatcgcaaaattgagaaattaattttctacctcaaaatatggcccacacgtctaggcccattctacacttgtaaggtgacatataaatgcctatgattaatttagttcaattatttcattaaattaaaataattgaaattaaattaatctaattatgttttaattgttaattaaatgaatttatttgataattgtttaattaaaaagataattattaaaataaa

SEQ ID NO: 225072 - DNA, 4115 bp, Cannabis indica
ggattacatccatactttattctcacttatataggacctaattgtttttttccttctgaaaattttgaaatactaaatattatataattggagtcttgtgggttgcttcaaatatttaaagttcttctcttgtttcatggtatttttgcatttaagtcccatcatcttgcttaattcaagaatagatttttgacctttgacaacatgacaacaaagagaggaaagcactcccaggtacacttactttaatgtgtgtgtgtgtttttttttcctttttttgtgaacttgaatcatatcaatactaattattgtcaatgtcttttcttggtatggttggcagcctttttggccttctcttgtgatgaaaaaatggctaaatattcagcctaaggtgtatgaatatagtgaagatgaggttgacacagaaactgagagtgaagatgatggtattattgtatatactatatacctttgaataatgaatgttcattctgtaatttctcatgttcatcacatttctacattatgcttctttcagcttgctcagttaaagattctagaatgcatagttgtgagagccgtgccaataggacgccatggaatcaacctgtttcgattcaaacttcaggtacaagaactgaatttgttgtaattgtttagtttagtttgtggttttgatcattcataactttttcaagtatgtatgttggtgtttcagataaatcttataactgttaccggtcaagacataggagaggaaaatcagaaaccttgcgagtgcagtacataaacacaaaggatgtgaggtttgtttgtgtctttgttgcttgaattggaacaaagtatggtttgatttgatgaaacaaattgagggtgttttttggttttgttgtagggtgacaattggcacttggaatgttgcagggattgctccaagtggcgatcttgatatcgatgattggctctccacagaagaaccttctgacatttacatcattgggtgagttttagtttctcactaagatatgtaactttgaacataaaagatcattaagtgtttttgctttataggttccaagaaatagtacctttgaatgctgggaatgtgcttggagctgaagataacaaaccaattccgaaatgggaagcaatcattcgaagaacacttaacaagtcctctgaacctgaaggcaaacacaaaagttacagtgctccaccttcaccagtaatgaggacatcttctgttgctgatgttcttgcagatgagattgatgctcatccattagaactacaaaccaatgattttgatgatggttttgacatggaaagggaagagttcaacaaagctattggtttaggaaagaatttacaggtgaaaagattatatgggattgatgatagtaagttggattggcccgaacgctcactagagccaactcaacaagttatctctactaactcaaaactaagaagagttctcagcagttctgcaagaattgggtttgagaattctcttttggtcaatcaacatgttccactcaatggtagtagacttaaaaggtctagccatagctcgggaaacctcgggctaatgtggatggagaaagaactggagccacaagtccttgatgtggctgaactatcgtctgaagatgaagaagatgatgatgatgatgacatgtttcctgatctttcaaatgatcaagttgttggtgatgatgagcttgttaatactgtgaaatcgaggccgagatatgttaagcttgtgagcaagcaaatggtagggatatatatctcagtttgggtgagaaagaggttgagaagacacataaacaatctgaaagtttttcctgttggaactggcctaatgggatacatgggaaacaaggtaatgatttgcatagtagtaacaatcatgtcatgtttgtttttatgtatgttgaatcttaggattttatggttttgttgtcattgcagggatctgtttcggtaagcatgtcgctctttcattcgcggttgtgctttgtttgttctcatctaacctctggtcagaaagaaggagctgaacaaaaacgcaactcagatgtgaatgaaatcataaggcgaacacgtttcacatcaagtgtttttgatggtgaacaacctttgacaattccatcacatgagtaagcatcacatgaaacattcatattgttttattcttcagttgaactacttctaaatctaacatggtgtgtttatgtcaacagtcaaatattctggtttggtgatttgaattatcgactcaatatgttggatcacgaggtaaggaaactcgtctctttgaaaagatgggatgaactactaaagactgatcaggtgagatcttcatttcaatgatgaactttgttctccaatgaattcagtttttggttttgttatcatggaatttggaactttgatgttgcagctaaccaaggagcttcgaagaggacatgttttcgagggatggaaagagggagccattgaatttccaccaacatacaagtatgaaatcaacactgatagatatgtaggcgaaaacccgaaagaaggagagaaaaagagatctccagcatggtgagtagagtacagaactagcaaagttttagttcttcggttctgttttgctaagcttttgttttcgctattaagctaaaccttagaaaactactaaaactgacttctgttaaaagaactttttagagctaaaactaaaatttcgtgtttttggagctttagaagcttaaaaacagattttaaaagcgttgcttaagaaaactactaaaactgacttttgttaaaggaacttgttagagctaaaattgaaatttcgtatttttggagcttcagaagcctaaaaacagcttttaaaagcgtagtactaaaactgacttctgttaaaagaactttttagagctaaaactgaaatttcgtgtttttggagcttcagaagcctaaaaacagcttttaaaagcgtagtttaacaaaactactaaaactgacttctgttaaaagaactttttagaactaaaactgaaatttcgtgtttttggagcttcagaagcctaaaaacagcttttaaaacatgtctttcggtttgaagttgacatgcctaaccgccgatgatgaatccttacaggtgtgaccgaatactatatctcggaaaaggcataaaacaactttcttacaacagatcagaattaagggtctcagatcatagaccagtgagttcagtattttcagttgaagttgaagtcttaaaccaaaggaagcttaaaaaagctattaaattcaccagtgctgtagtacatcctgctgttttttctgatgaagagagaaactaataacattttaggtaaccatcttaacatgaataagtattggtgttttttgtatttatgttctttcatctcatagtcataacatcaatttttcttgtttttttctcagtgtgttgacaattacactaacaaggttgggaagtgttgtgaatttttgaccaatgcattggagaatgctgcagcatcatgaagattatagtgttatatatgaccaagctatactgagatactatacagagagatttagtgaaagagaataaggtgtgaatgtacatacaaaagccaaacaaatctggtctattttatcataagagacctctcatcaagacacttaagttcattactgatttttgatgtggtttttcattctttttttttgtttttaattttggtgtatgtttattggacagacaacaattatgtctctttatttaaatccttattttgagtaaagataatgtatatatatagtttatgacgtgtaacttttgtttgccttaacaactaaataggtggggatggcttatattgtaaaatatataggaatagttggagaaattggttttgccaaatgagaccaaaactcattatgtttattattatagttttgtcttgcatgaaaaagtttggccaatcttatttttattagtggacttagattctcacaagtcggcagactttaataataaaatttgaaatttaaactaataaatcaaattttggctttgtagctttgacatatcttgttcctgg

SEQ ID NO: 225073 - DNA, 2995 bp, Cannabis indica
aatcacgtaatacgcctatgttagttagggtgttacatccctgcttcttcttcaacttctgaaaaggagtagtctaggaaaagaagtaaagaagttaaggtcgcttcccctgtccaggatcttggaaaagggaagtccaaagttattgaggctggcgagggatctcttgcatctccacttgacattttttttggatggtgctaataatggtactccaaatccttgttcggattttgtggagcagctgcatgcatagagcacgtggtttcttgttagtggagatgccttgatcaaatccaaggctgagaacatttcattgaggaactggttatatacaagcctccatgtgtcaatactctaagatgcttcattgatatctttgggcaacataattcttgtattgtctttagctgactttcttatatttaccattaactggctcatttctttgcttttagacttccgttggttacgcctacaccatggagaatgaacataagaaggtttttgagcttcttgagaaactttcagctatagagaagtgtgccaccgttgcaaagaactaggtggttaacttagaagaagtcagtagtgacttggagagtagtgtattaagtaattaaggagtggctgacaatgctaaagcttgagataatagcttaaagaaagatctaaatgctacttagaaataaactttcgaggttgaagactcttttcgtcagtcacttaatgagaagactctaagcactagttagctagagcactaggttcaatgtcttgggagccaagtgactgagttggagtagaaagcaacaactgatgtttccttctatgatggcttacgctttgatgtcatctatcattcctagttgtctaatggaagtgcacaatcattcaactagatggccttctctcgagataaagttccattcattatagagcattgggagcaacatttaattgatgatgctgttcaaaggattaattttgacttgaatggtggtgaaccggtggttgaagaagctacgaggggagaaggctacaaccttaagcatcctaacattcctcctcctactgatgcgccaccaatagagaacgaggaacaaattgaatctattgttgacttagatagctttttagcttccgaggacatagtcttagtccttcttcttatcttttttagcttttagctttagtgtatcagttggtcgtctcgagcggccttttagtgtggataagccatagtaaaatattatcagacttgtttgaatgaaattagaaattactccaagttaataaaaactttctggtgatgttttttttttttatctattattgcttgacctcttaacacttacacataattccatgtcttaaaaaactcggttacaggaagtaacgtcaatgttactgaaagttgtcttgaccataaaagtacttacttgggcgtgattttttttgaatgctcatgtaacatatgactctcttatactataacataacctatatgcccccaaagtgataaaataagtgcctttattggtcacttgccataccaaatcctattgagatttcttgatcatgactcttagggaactataacacatgagagcactcacccactttgtaatatgccaaaagttacattttgataattagggcatattttatgaaatatgaataaataagcataatttatcaattacggagaatttattggaatatgtcaaaatgaaatatggtaatggtgaaataaaaaaatttcaggtttagcaactacggagacccgatcggtggccagaaatgtcacaacaatatatgtttgaattttttgtgggttttctccatcatttcaaatcaattttagggaaggtctagtcgattttctataattagtagctagaattttcaaggtactcctctcttcttagctctttattttctagtttggaagtttggtttaaggtttgaaattgcatgttttggtttgtatgggtttaattatgtttctaagttagaagtaaggttatgttgagaccttattaagcttagattacagctggctatttggagttaagcttgagtttatgaactcaaagcttgagctctaacggcagattttgattggtaatatttagaagttgtttgggttgtaatatctattataatttttttttagactgttatgtcaattttggttgaaattggttgagtttggaagggtttgtgaggcttaaaactcgaagtgtttgtttcctacagaaaatggtagaccattttctcagaaatggtctaccatttttctggtacactcctgacagtgtctatcaacttggatatttcattcatctgagtagctcctcgtgtaggtattggcctatgacactctgttttcgggtctgaatctgatcctgaacctgagttgaccatatcgacatcattaacaaacaaaatttaaagttagctgtataacaagtaatctatacaaaatattaaatggatgaacaaacattttgtattcagcataaacaaacattatgtattcatcataaacaaacaaaatataaagtaagctatatatcaagttaccaattagacacatcttctttactttttttatttttttgtttatgtctgcctaaatcacaattgacccatattccctcattgatatcgtttctaatgtatttagcatcgtcttcctcaattttacgatcaattccaataactttttcatgaattggttgcccaacactgaagtcatcataacataaatcaacattctcctcatcctcttcattctctaagaacctcctctctggtgtcgataaaacaacagaccatttatcattagccggatcagaaatgtaaaaaacttgaactgcttggctagccatgatgaatggatcattcttgcttcctctcttacttaaatcaaccaaagtaaaaccaagctcgtcagtttttactccaacgttgttgtcaacccaagaac

SEQ ID NO: 225074 - DNA, 3325 bp, Cannabis indica
caccatcacgctccaaacctgagaacttagagattggacattctaacaggttcggtttttcgaattattttaccaccaactccttccattatttgttctactctttgcaatgtttgaataatatatggtataggattttgaattaacgctctgttaaacttactgagatgatttcttagagaaatagttcacaagaagaaagaagatgattaagttcccagaatttatatgataattatgacttttgtttatttgtattgtatctacaatttcgaatgtctgtattttttctggtgagaagaagcatttgtttttctgttaattttttggttgaagtgaacactttcttttaaaagacacaacaaaaactgttaagaggtaagatatatataattttatatttgtatatatttataaatgtattcaattttattcaacaaccttcactgacatgcttgtaacttggtattaagccacaaggagtctttgtgttcttgatttgtttgatgagaggtcttctttttaacagtttgctaatgatatcatatatattttttttatatctatctcatgtgttgtgattggcatgtgtctgtgctagtgctaatggtttgattgaacaatgtaaatttggtaaaacaagttcacaagaaagtaagtttaatgagtttgtatgctgaaagtggttgcaattacaatgcaagagaactgtttgatgaaatgtctcaaagagatagtgtgttgtgtaatataatgtctgattaagactttattttcactagtgcaggtgtttcagcttagttagctgctgagacgtttgagtttgttataggcaacttctgaagacctaaattcaaatgtcatacctagcactaatccctaatttcatgtccctgactctctgttagtaactagatggatacggatatggaaaaacccaactttcttcaatctgattgtcactcaatcttgtctacaatcaaacacaaagagaagcagcttcaattgaaaagaaggtctgtacacaggtttcattaaatgtatatatagttttgtttatgtttgtaaaatcctaagtttgtaacttttaggttaaagaagttcttctgattttggttttgatgtgtgggtgcaggtggttattgggtcttccctcatctgaagctgaaccaaaccgatctaaaaagaccaatattttgcaaacaaggtgtgtggctgagaactccaactccttcatgccttatatatataatcaacctcaatttttcatctgataagtttgtattctattgttttcccaggtcattgcctgaatctttccttagagaagatgatgtaagttttttaagcctctttctaatacctgcccttttttatttatgaatgtcttcaaatatggtgttaggtcttcttgacatgtctttcctttgcttagatattctacgatactgtaaaatcacgtgtggaagaagcatttggagtgcgccctgctgtaacaaggaatgatgttgaagttgatatagatgacttgggatttcttcacatgcccaataatataacaaaggtcattttatcttgcattgataatttgaccaccaagggtctttaccttcttgccaagatactcacacaaggtcgagtggagtttgagaaaacacgatggaagatgaaaaagattgtgacagaatctgtttcagtcatttttggaggccaaaattataaacgtccttgtcatataatggaaatttctggacatctaattcaacttcttaatgaccctggaaatttccgagataatcttgtgccatttttcatttcaaaatctacaattcagcgtgctgtcgctacaaagttattgaatttacttgagagcttttcaacagagaccttgattgtgatgtataggaagctaaagggatacaaacaaaagatgcctcagttacaacccgaccgatgtggatggaatcgagaatatctggttaaggaagtgagaatagtttgtgagaagatgctttcacaacttggtaaaggagatcagctacaagaaccattatctaaagccttggcaatagcatgcttggcactaaagctagcgccgggttttcacaattcattcacaacagagttttgccaattctcagctgagataaaagccctccagaatgagctaataaaggctatctggttagttagaacaaatgtcaaagtaccagagctgaagaacataaagaacttggtggatccaaatgctaaagtatcaaacaagtttttgcggaaaaaaatttcaaattttttagttcagtaccttctgcagtgcagtgatttggattcaattccaagttttttacacaaagctcttactataattaacggaaaatctcgaagcacaccagaagggttccagttgaaagatgcaattgatgaagaagtagaatgtatattggatgttagtgctcacacaaaacaaatttttttggatttgctgcctgcacatgatttcggagatgattttactgacgcatatatgcacgatctgtctgaaagtgaggatgattgcagttatgttgatgatggaaggggtcaagatgatgatagtgaagttgaaagtacagcggattttgtaccatttaatgtgaatttgcctactgctgaagacactcaccccgtcgaaccagaacataggttagaaccagagatctctagtggtgtggataactttaattgttctgctgagacggcaaaagaaatgaataacaagcaaacacataagaaccaataccttggaatccaagaaatctgtgatgagacaagcatgtttgcctacaatctaatcggtcgaatgatgaaggagtttgaacaaaagggaggtctggatatggattggttcagtactttgtatctccgaggtggttgttcagaacacgaagaagaagattctcaaggtatcttccgttgctaattattttttatttattattattatcattattatctaatgggtactaaccttgatctattgttttagattgcaattcttcttccccattaggggcacaacctagttatcaaggcaaaaaaggaatgcattcacggaaagaatctgatggggcaaccattgttagagtgactgaggagcttctaccttcttttcccaagaggtattaaattttcaatgcttcacttagctttgtttgaatacttgaacaatttatatatttgtaacatcactaatggttttatgtatcatgaaagcataattttaatcatgaaaagttcatatttccattgcaatgaatccaatttctactaatgcagtgtaatggaa

SEQ ID NO: 225075 - DNA, 4083 bp, Cannabis indica
tccaagtcaggacatgattgacaaagaataaaacagtatataaaattatcatgaattataatataatcataactactctttaagtacgtttttttttttttatgtgtacataatcttaaataaaaatataataaaaaaaataaatttccctgctggccatcaagtgggcatatatactattattatatataaatgcacactctggatcacttcttattacagctatgccttaatttacaaagcctaaaagaaaacacaaaagatagaaaaacaaaatgggaggtcacatgggcattcccatatgggacccctaaacaaacggctgaaccccactttttttgttcataaaataataataataatgtgctggtgaggtgtctatgaaaagaaaatctcttcctatataaacaaaagggcattgtttcatttcaaaacctggtcattccaaaatcatcaatagtattcataaattccataagcaccacacccatttcaccccaaaactctctcttctctctctcttattcaaggataaattttgtatagacaaaagagagagagagagagatacaatggccttttcaaatgcgtcatttggggtggtggtggtggcacttgttgcgctcatttacgcccttgttttgcctgacgtagctcgcgctgcgcctcctttcgctccggctccggcccccaccagcgatggtttagtttttatttttatttattattatatatgtataacacaatcatattgtaattatttcttatagttaactacatatatagtataatgtttctctcaataatgtttttctttcccttaactatttatgtataatcacaatatacaatatatgatttagacaaataattatgtgtatattgtcatttttaattatatatattcaaatagaggaaattcttaagtgtgtgtgagagagacagaatgaaatgggaattgaagcattgaagctggcgagcttatatgtttgtcgttggtgaatattttacaagacagctaagatattacccttaattaagatagaattatttgagaaatgtcaaaagtcatagactactttctagtatcctcctacatgttaatatcgttattggttcaactaactatcaaattctatatagtttaatgaaataacttttaaattggaaaaagacatatataaaagatatatactaggtacctctcatactcaataacaatgtttggagttatttatatcactcaaaaagtgaacctatgtatatttattaatatgcatgtcatatatcatattatagtatgtaaaactgatcattgtataaaataagtgtgcctctatgattcatactctttatacttcatatttgttgttgatctatttgacaaaagaagtagtttttttttttaacttttttttttttaactttttattagaagaaaatatatatgtatggatgatgaaaaactaatttgtatgtatgatgcaggcacggcgatagaccaagggattgcatacattctaatgttgttggcattggtgctcacttacctcattcattaagcattaattaattattatttgatatctttaataattcctacaatcaaattcaaatgtatatgaaagaaattaaggagattgtgtatgtggaattaatcatggcaaggaatgtttaatttttatttattgtgtagggattttgttttggacagttttgttctcatgtattgaatttatttctccatttgtaataatttattccctcaactttacaaattcatgtcttttccttaagtttattattattagtagcttaaaatccataaatatacctatttcttctaataaatttagatgcaaaaatcttacttattcaaaaataaatagatatttcgccttgtcaactttatctcttaaattattagcaatgttcaaaatttacccctcagcatatcaattggcaataaacaccaatcattctacacattaatgtgtccaactatgtcattgatatgtggtaatttgaaaaaaaaaaaatttgaatttacctcattaattgattagaaattgtattacaaaaaaaattaaacaaataggaaactaaaaagcaagaaattaaaaagaaaaaaggacaaagaaaaggtttcgtggtgaagaagacgaagggaaaaggtagtatatttttctgccaatttttcgaagtaaaatctctagtgcggtgcagtttattgaagaaggacgaaaatagtaagagaaaagaaaaattaagagcaacaagaaagaagaagatacaatttctaaagaaaccattttttaagatttagaatctggtatatctcaacaaggaaagtgatactgacataactactttatccagatttgagcagtataggattgcttcaaaggattggtttgattttgcagaaaatatttctaaaagtgtcaagtatattattaaagttgagattgttgttgtatatgaaactatgaagattgatgatgaaaagaaatccatcaaggttgatggagagaagcaacatagcaaaaaaagcaaacttgatccctaagggaatcaggaagggaatggtgttaaagattgagatttgagaaaatgaattctgttattattgaaatagaaagactacaagctataaaaagaaagactagtttactttacatagattagttgcacaaaataactaattaccagtgttgttacagatttacttatttatcctaaagttgtaaaccactactcacaggatttgacaaatatacccttacatcaaatacaacaaagatcaagacttaagaatataaaatcagttacaactgaaacagttacaaaaacagttacaaatatctctagggctctgccctagatcagaatcgcagatcatatatataagaggatattttctctcttttgagatatacagagccagagagaacaacaacagagaaaaagagagcctttggctgagagttgtcccctcctagtgagctcctcctagagaatcacttgtgtgttcatgtaaaaggaaaagagagttttgttagtatccaaagagagaaaaatagagagaaatcatacagttgtaaatcaagagtgtaacctgttatttgatgattaatggattcaagctgagggcttgacggagaagtagccggttgttttgggcgaactccgagatcaaatttggtgtctccatctttaccattactgtttgtatctctcatcttaatctctatattgtttatatttgtattggtgtgtgtattgggtgttcctgctattttcggctttggtatattgagttttggccgagagaaaggagagttttctaggttggtagtttcgggtagaacaagtgagaagagcaaggaaaaattcaagaaccctaaccctagaacctgtagcaagaagaaaaagaaaaaatatgagaagaacccatagaaccttagctgctgtaagaagaagaagagatagaaaactctacctatttcgttgctgccattagaatagaaaaggaagaagcttgaaacttattagaaccctaaaatattattttgtgcagctgtcatttttgttgttgaagagaggaaagagtttgaaagtttctgaattattttgaaaggattttttgtggctgtcgaatagtgaagaagacacctttagggtttgagatcattacctgataacttaccttttatattgggatattagggttgcatcaatattgggatgcatatattcttgttgggccgaatatattgtgaaaaagtagaagcctaattggactcattctttgtttgctttgaccgagtgattggagagagagagagagagagtaagagttctttgactctttgttttgtttcatattgggctcttggttgttgggcctgaaacataaattttcatttgtgagattttacaataataacatctactgttgtggatgcacaacagtggtaataaattttgaaaaatatcacttttgtgtgtttgtcaaaacaaaattccaacagtggtatcagcgccaattaatttccgcaagaaagattcaaattaatacat

SEQ ID NO: 225076 - DNA, 3622 bp, Cannabis indica
ttaattattttttttaataaattaaataaaagcgtgttatttcaacaaggttgagaaaaaataaaaataaaagtaaattttgtataaaaatgggttttttttttatttctattttccctaatttaggctgagagattccatatagcttgaaatgaaggcaacctagctggattgaccccacaatttctattgatcaagttgcatagactacatatgatataataagcaaattttagcttattatcccactttgaagattgaatctctctttcaattatttcacttaaaacaattatttaattaaacacttgtctttttttttcaagtgtaaatgaaatttctgcagagaacaaattggatgtttttccaagttttagacagcatgtttttctatttctacagtacaaaatggtgattgaattgattgatctcattacaaattgtcacattaaaaagagttccaccaattcaaaaagtgactaagcaaataagaataattgtaaagaacaaagcaaaaagaaacatgaaaacaagttcattaatttgactctaaaaaattacaattaaaaagggaaaagaggggtcaagtatgtaactttctgtggaaactgatggcagttttggtacaattattaggagaagaatgatgagaaagaacagggagaccccattgagaagtaaaaataatattggggtacacaccatcaagactcattctactaacaatttcattgaatattctaacaatcttgctagtaaaaacaaccatagaaaacactttcaaagtaatcttcctagaccgagatagcctaatacccttgaccctttttcttcttccaaacttggacttagtattatttcccactttttcatcaaggctgattctactgctgttgttgcttagcttctcatatcgatcacatctatggcgtccaccaataatttcttgaaaacccatttgtagcattgattaaagagtagaaagaaacaatacaaaaatggggtctaatgtgtttgatctctggttttgaaatttataggttcaaactaaaggagaaaagattgtaatggcagttttggattccattaacacatggttaccattttatatataaaaactccaaccaaacagagaagagagagagatgagttgagcttggaattgaaacaaaaatattatagtttcaaaaaatttaaacacatggggagcatttagatttgtgtaaccaccacagagtgaaaatgtttatgttagctaggcttattaaaagggaaaagaaagaagagtgtgattaggaaaatggtgaaaaggaatataggatggcatgtgcaatgattgaaaaggtttcatattattatgagaagaaaaatcaaagccaatcatttgggaaagagaggaatgtatgtggttggttgtgaaatgtgatgactattaatgaaaaaagaagagatttgattgaaaagtggtgagtccaagtcaagagtatgaatgaaatgttggtgtaattttttgtcttgtattgaataaaacaggaggtttagcatttgtttaagttgaggttcggattttgtggtaagttttatcttaattaataatgttaagctagaaaaagacaaatatgacagtgggagagagtagttgagttgagtgggcgtcatatgtatgtgtccatgttcattgtgctcagtaggcccagagtttagcagcccattttgatgctctcgctcttcaagtccactccataggcctgttggataaagcccatcacacaaaaaggctaacgaactgcttaaatagttgggcttttatgtttgcataaataaacccacttaatttcaaacctttaccaataagtttacacaaaatatacaggagaagatgattttagttgcttaataaaaaaactctaatgatactaaaaccttgtcactttcatacctatatgaaaacactccaatagtttagtgtcaaaaataggcttgaatatttttgaacatgctgtattgagaatttttaaaacatgtatagggatgatgtaactaactacaacgctcacctaaataaattttcttttttgaaaataattataaatatttcgatgtgtaaaatttgagaagtagacattattgagccatagcaataactttatagtatagacctcacatagcctatacatccaaaattttcatattatgctttactcagatcatctcatttttcttacaaagattagtctgtttccttatacggactccaatccgtactccatatttttacgtttttattacaattaataaggtaccaactatgtatttttataatttcaattacttttatatgatttttcaataatattagttacacacaattatatataaatatataattagtttattttatataattgataaataaatatgtattattatttttttttaaattatcgagtatattagaatttttcccctcgaatttggacatgtaccaaatcatgctccttaaactttttttatcgttaaaaatccctctgaactattgagattgttagatttaaggacttttgtctaattttattcaattttattgttttagtaattgtttatgtactaaactatactccctagactttgatatctaccaaatcatgcccctcgaactttgatatatactaaatcttgctccatgaactttcattaatattagaatatttttactaaaactggacaagagttcttaaattcaacaatctcaatagttcaggaggtatctttgacgatcttaaaagttcatagggcatgatttggtacaagttaaagtttgaggaaaaaaaatcctaattagccaaaaattatcgttcttaagctagtctatttatgattatatatcgtgcttttgggtttttcgtatcgtgtgtgcttataagcctatatttttcaagttgtacattatgctttcatatattttatatatataggtaatattgatttattctatattataattcttgatttcttattaatagaatacacatatgaaaagataattgattatgcaaacttgtttttatcatattataagaccatcttcaacatgatgtaaaaattgagttatattttgtataaaaagtaattttatgatatttttacattaacttttattattgtgctccaatgtataattataaatgttaatataaaatttaatatgttatttaagaaaatataaaataataataataatacaaagttaaataaaatttaataataaaacaataataatgtaagttatttaatgcaaatgaatatgttaactaaaatttaataataaaatagacaaagttgtaaaaataaaagcataatatttattgtgatgtaaattttgcatcatactatattgtgatgtaaattttgatcattttttgttatgtgagatatttacatcacaatttagcacactatcaaaatagatttttaacaaaatgaattatattttacatttatattacttatttgcatctctattagaaatactctaaaaattccgtacataccatgaaaatcaaatagtcaaaaaatgatgcctcttatacctattattacctagtagaatttacgtggtata

SEQ ID NO: 225077 - DNA, 3454 bp, Cannabis indica
gttgaaccatacggcaaaagtcaaaagcgtatcaagaggagttaccttgtctttcataattgaagtatttcaagtcattcaacattcctttcatgtcctctaataatagaattggtgaggcgacattgagagccatctcaccaatgtgaagcaaaaacttttctttgtcaccctggtaaggcggcccatatatgcctagtaacaaccaagattctctcggaggatcagacgtgatttctccaacaatcacatacttattggaggataggattttgcattggaccccttcatccagcacatgcataggcctcttgaaagtccctcaggagagacataatgcatttcctcaaacttgagtttgttacaggttctagcaatttttttggaggtagtctaatcttagataagattagcatctcacattttttttgacgaacaagggccgccaattgacgaactattgtggtgctccctagaccacggcagttctaaggtaggattttcatggcgaccgtggagacttttttggtcaagtctccgtagccccaaaagaaaaatccttcgtgttccttccatccttgctttcttgagatttcgacaattcatcatcaatctctttgatgatacaacttccttctaacttttgatgcttttcaatcacgacaaagtggttatttagatccacttttagatcaataattctaccttcccaatgactttgggtagagaaagagcttccagtaccgtttttggatgacttgcttcctttgaaggacttaggtgtggccgagatgcccggttgatttttttggtggcctgcctcttttcttgcatttacaattttcattaattgtgattgctttctttccccttggtcttcctttctgtttggataagcttgggttgccattggagccagtaaaaacttgcctgagttgagagtgaagtttgacccttccactcgtgtaggagtagtcaaggtttggggagggggtgacatcctagtgtcatcatgcattttgaacttgtgcaaaaatattggacaactgaggtttacactagtgtgggccagtggagattggtggaggagtaaatagaatcccatcagatgccttgcgtttcctaggtccatttaaatgttcatggactctaaagtcctcaatgtccaataacgggttgaaaagtgtgggttccctgtaatacttatccacagtaagcgagcccacaagtaagtcacaggccttaggttcagcccaacattccttggaaggccaactcacgacttgggcctgggtaccaagcagtgacacagtgtagggagtattagggcccttagacgtagcagtatgaattgttggattgagggattggttattagcatcagaattgattggggttggaagggactagtttgtaagcttcttcttatttgagccaatatcccttggaatcaaattactagctttcgatgtttcaccagaaaaggaactcctgtcataagtctcaatcaccttcggattcgtaagcctgtattacgagtcattatgcttataggaggtattggagttggcaatattattggatgaagtccctgtatcaatgggtgtagcatctttcaggtcttgggtgtataccgtttttgaattattactaaaaggggcaaactctctaatgcccgtgagacaaaccaagggaagttaggtaatactgtcgagacaagggatccttggcaccaccatcatcatccgtgacgactcttcattttgctaaaaattgcatgtgacattcttggagttcatcagaattgctattttaaattgccttatgaattttcatttgattgcggaggatgagatccttgcctagatgcgtttggagaacccagtcctgcaaccatttggctaaaggtgtggaaaatgtggatttttcttgggcatcacttctcagccatacgccatacatagggtgaaaattacctttgccgtctttaactaaagttggagattcaaagaaaatgctttgatcatgggttagcaagccccatttaaagaataacttggagaatctctaataattctattgaagccatagatatttgaggtgttgacgtcgaagaaagaagccagagaagatgggtttgttgaggtcagaaaatcccttccaacagtggactaagcagaccgagatctgactgaaccactatacttccttgtgttcattattttcattacttttctattgtgtaggcaacctcatttgaatactcgctattttaggttgagtactcattgttttttagttaaatatcaactctttattttatatttggtgctgtaaaaattccttcgacaacaggctactattgttgtcatgtagagaatttctccctgattgttatgcctttgacaaagcagacatggaataaagtaaagttgtgtgggatgagagttgtgaaggatatttctatgaatttaagtgaagattgaacataaaatttgttctccctatgcttaatagtgaggaaccatatattgcatgtactaatgcttcaagtacaagataggaggaattctctaggggtatgacaagtttgttgcctatgcttctcaaaaattaaaactgcatgaaaaggattacccgacactcaaattaatacttactccaaaatttttattatgtgtgggttttgttatgctacttgtatggtgcagagttagaattatacccttatcaaaaaagcttaaagtatctctttacttaaaagacatgaattttaggcaacaaatatatttgagtataatgaagattatggtcttaccttgtagtatcatcttgaaaggaattatgtggtagaaggtcaactaagtaggaaacctcctggtactttgatatctttggctcatgaggaccgaaaaagaagtaatcaagttagatgattataacttgcaatactacaaaggaaacattgttgcttgtgtctctagtatgaggactatgttaatgttgtttcagcaagttaaataacacaatggtaagctgagaaattaaggccaatctagaattgaatccacgatgataaaaagttagatggatagaaaattaatattaaaaggtacttataccacgggataagattagtcattgcaaatacctaaaatcatagaatgtctattatgattgaggcatgtagcttaaggtttattgtgcatcgtggtagtgcaaagatgcaccaagacttgaagaggcaataataatgtgaaagtatgaagtaggatgtggctagctttgttgctaggagtatggtttatcagcagggtattgctgagcaccaaagatcttcagctttgcttctgcctttgcctatacaagagttgaaatgggatagtatcactatggactttgtaactgggttaccattgacaaacccttaagatatgtcattgtctggtgatta

SEQ ID NO: 225078 - DNA, 2762 bp, Cannabis indica
aaaccgcaaaaatcgcataaaccgcaccgtattgcatcattttttgtggttttttagttttgcgatacgggtatggtttgggaaattgaaaaaactgtatgtgccaattgatttgaaaaaatagtcaaaaactacgccatccgcaccgcgaacactaataaatcttacatatttttgttttttcgtataggtaaataattgtttaaattttattttggatatggtaaattatatcaaatttgatgggtaaataaatacaacataagaaaaaaaattacactatttttttttatcacaaaacaagtagtgaatctatcagaaggaccatttaaggtatactcatgaatttcctatatatataattagtaaatgacgtcacctcatgaaactttatattatagtatacagataaatatgatgaactatatatataattatatgattacatagtactttagataaaccgttaaaatttactacgtaaaacgcaatgcatggagctgcatgctcggacacattaattaccgtcctctcaaattccattttccgtaaatgtttttccacaaaaaataattaaaaaaaaaagatataactgtccactcaaaacttttttttgtaaagaaaaaaataatgtatattttattatgtatgccaaaaaaggagcagaaaataaaaataaattatttaattgttggacgtacgtaccagaagtgatctcgttgatgatgatcgtggggccagagtttgcgagtatgttccagcggtgactcaatgatggtgaacccttctgaccacattcgcttagggaagaaggtcgacattcggggcaagccgtacccggaaaggctgtcgagtgatcgaatggccaggagtttctgatcggacggtagagaaaacaatcgacggctctgattctcgacttcgcggagtaggttggaaggaactccatgatgggtgacatgaaaaatgccccagttctcacaggcatgtcgcatgagagaaatggctttcgggtcggagagattaattacgggtattgactcggattcggaggttgaaagcgggttgggatgggtgagctcccaagtgtgggattcgggtaactttgagactgatttgaagtcaagtgggatgatggaacattggtgattgttgttatgatcatctttggtagttgtatgatgatttgttttcaaactagaatattgtgaggttggcatatttgttttggccatgggtgtaagaaaagtatttttttaattctttctaaggtaaggaaaagtatatatgattgattgtatatatatactagtttgaaataatgtagagatcaaaactctctcttccccatatatatatatgtatatatatttttatatatgacattatgaccaaataatcgaagtggacaagattacgtttccaatgagggacaaaaactatattcactatatatatatatttatatttatatacttcacatattcattttatgtttatacagttgtactcatctgatctgaaaatttgatgacattttcgtcttttatatacaatccaccaaaggctataataatggagtttaagaggttcccattcactcttaaaatagagcattaattttgaggtggcgttcaaagattagcgatattttataaagattattacataaatggaactcaatatatatctatataacaatatatatataacacattgagtggtaaaaaacactattagttctttaagatatcatcaaatgaccaattaatgaaaatgagaaactgtacatatgtgtgatgcaaaacacattgggaagagattagtactcagcgattggaattcgaattactttatataaatatatttatttgaattctatccatgtgagcatttgcatacattattactggtgctgtgtgatttcaaataattagcagtttttataattattattaaattaaaatatttatacatgaaacttaatacttattaattacacccttttaatatttttttctccgtgctatattgaaacatagtgtgtatatctgtgtgaatcgaaaataaaaaaaccaattgttatatctatatatatatgcattagttatgaaaaccaattttgatgaaatacattaatgcatatatatggattcacattttttatttatttacttttaaggagggcatcaaataatccgaattgtaacagaaaaaggttgtatatatatatattacaaatattagctagtatgtgcgcgcgtaatagttaaatatggaatatggagaatgggcagtagtggtttggtggagaggcctttaattgcttccaagttggtaggtaattaaccttggcttggcttataactctcctttagtactaattgcagctaggtgctcccctttttctctagctagggtccatggaccatgtagtgtttggttggttggtcttctctgaatcaggtgttagggactctatatagtgtgtgggaaggattcgggtggggtcgcagccatctcggggcgccccgtatatatagtagtcgctgccctaatgtcaatgtcgcttttggaaaatctttaaattttgtttctgtttttattatttatacaatatatttgcttttatttctacttgattaactagcttatgtgcttatgtttcgcttttatgtacgttttctttcttcaataatgttgacccttgtcctctcaggaatatgccttaatttggtcattacttttttttcttttttttt

SEQ ID NO: 225079 - DNA, 5968 bp, Cannabis indica
taagctcgtttttagatgcagttttcttcaaaggttttctagattctttaaattttgtctccacaattttagtaaataaacatttactcaaaaatataactaaaagataaaaattaatactgcaggaatggttaactggaagattccacccctaatgggggtgggaatttctcgtcttggcgattaatgggacggtggtattggtgaaaaataatttcaatacccaaagcgaagatgggacagagacgggaataatactactcgtaccatatctgaccccgatatagatatatataatttattttttatttttaacgtatatagtatatatatcattaataattaagattattttgataatcatctataatagaaattgtatatcatatgcttaaattatgaaaatctaatgacaataatgaattgatgattatgaattacaagtgtaaaaatattttcttctagattcttagtttcatctttatttactttttaatttattagatttatttcaattattttaaattattactttttttctttttcattttaccttaatgaacacttaatagattctccataaccgatgaatattctcctacacctaatccactagttattagatagagatgggacaaggatggagacataaatagatagcaatgattacatttcccgtatattaactgcctaatttccatatctaaatgtaactgataatcttgaaacttcctattatatcttaaaattaaaatgggacctaataaccaaaaacatacttggtgtgattctatccaaaagagaaaaaaaacactatatttattcctcataaaatatcaaagatagattgcacataggaagaaaaggcttttaacaaaaccaatttcaaattcatttgaatataaaataaaaatctcttcactaaaagctccatctaatttacaaaacaaacccaaggtaaataaaattggatgtacaaccagagaaaaattgacttatagcctaaataaaagtaaagcatattataacaaatgaatgggaacttgattttgatgaccaaaaaaaaaaaacataaagagtctctctactgatcgaaaaaccatcctcacagtttactctaactatgtcagctttcgccataacgatcccttcgaagctgttaagcattttactcttgggaaaacgaaacctgccttaggaggatttttatcaacgagagaattctcgtaaatctctttgcattcttgcacaacctgttcaacaaaacagaaaatacaatctcaaacttcggctcaagcttaacttaacaattaagtgaaaattgggagtcgtgactgtacctctttggcatccttacgcggtatgccttctctgagcccaacgagtttctcaacaacctcaggctgcaatagagttgtatcggaaattatcaataaatgatttgaggcagcaagttggttaaaaacaaaggtaaaaaccgaaagcaatgcttagaacaaaatgcaatttctgctagtaatcagataagttaccgggcagtcaggttgatgttcgagaatatttgtgtaaatgagcgtgaatgtatccaggctctctgctgaagcaagttctcttaaatcactcagtattcttactctgttttcaactttctgcagccaggtcaaaaaaaccacaatgtagaaaggttagaagcaattatcggtgacgataatcagcagtaacatgaagaaaatcgagtgtttcaccaaagtcaaagatagagattgcacttacagaaacacttatatactccctgaagaagtccatgagaacctcctcatctaatctcattcgttcaatggtctcttccttaaaatggttcctctgcaatcaaaggaaacaaatgattaggtaacaaaatttgtgactgaaaaatctgtaaataaagtattggtaacaaaaattataatttgttgtgaatattatgtatattattcaaaagaaattaccagataatttatttgtaatatatatcatacctgtgttagaagatgatcgacataaaccacgacagtttcctctaaacaagcctcaacaaatcttctaaaagatctttcttcaacgtaccttaaacaaacataaagcttgattagagaggcatgtgtcaaaaacaacagaatcattaccagttccagagggaaagaaagaaagaaagaaaagaacttacaatttcacatcattgaaataatcaccaaacgttgcaacaagatactcagtaacctgcccttcacaccactctgaaaattcataaggagaaaattaaatatggacgaaaaaacagcaaaaatatgtaagaaaagtaaacaaaatagtcatttttcacacgttaacaaacatattgttttctacaacattgccaaaaaaagacttatcatttattctcgaaatgagagctaagataaccaaccaaagagggataaagacaaccacccaacccgaacccctccaaccccaaagaaatcggggttttagtttttgggcttcaaagcgactttgagtccaaaaaattttaagatcaatcaaatccaacccacaaggccacaattcatttacaccgatattaataatatattttacctttctgataaagtttgactagcaattcttggactcctggatcttcaaatataacgctgacggttagatgcacagcctcctacaatcattaaaattttatattgaggtttggtcataaacgaggacgaatagcaaagcaagatgccttcctcataaactacctattgaacagacaatgaagataaaacctagtaacactacgattcagtaactagtaattatcgctgttatacatggtatacattatgaggataaaagttagcaagattttataagatacacaaaaaaataccaacacacctttgcaacctcaagaaaacctttgcaagtatcctcaaaattgacctgtaaaaatgaagttacaaaatttaagaagagacgaagcaaaaaaaaacgcaactagaatgaccatattgatatggtgtaacctgctcagcataattctgtggaagagcttctatgatgctattacttagctccattgcaagatcatagcagcgaagattgttattaatctgcaattaattgcaaaaagtcatgggatgcaagttcctcttaagctcaattttttcatttaatgtactagcgcatgtagataattacaaaccatagcacacaaaggttccaaaccaatttcagaagcaggttcttcgaatctccgcctttcagctgcttgaaagtcaatcattacctgaagaatcaagtgtacaggaacaaaatattaacaggatgcggaacaggtgggatcaaggaaattgataggataagtatgtctgaataaagatttccagcaagaataacatattattttctcaaagaaaaggtatgaataaacacaactaatgaacaaaagcaattcacatagatattaggaaaccaattgcctgtaaaataaaaaaaaaatacaaacacaatttatgcgcaagtgataggctgtaccatatattagattactttttaaataatatcgctcagaagaatgaaaggaacaatgaaaattacaatggaaattaatcaattattcttaaatggagactaaataacctgaataattgccaaagcaattctgtatagcatgagatcagtactattatctcgaacaatttgcacttgctctcctaggatcctgaacaaatcaacagcagctggtgtataaagctttccgtcttcatgtttctttggtggatgtatcttatcagcatctaggatattcaagtaccatttctagaaatagaacaagaaattagttgttggacaatacagcttaacaaaacaataaaagaaaagttaaaagtaaagtcctacctttgtattagcctgcattctctcgacatatgtattcataagagggtccattgcaccactctccgaacatacttgagcgagagagtcatcaacaccaaggccaataagattttcttggtattcaactacccaaccagttacctaattcgaaaaagtaagagatgcaactttaaccatgtaaacataattcataaataagaatattttacatattgaaaatgctagttgaattcaattcaatgcatgtcggaactttatttttactttttatgctattatttttataataaaaacaagcttctggcataactttttctctacattcccataatgtccggcaagatggggaaaaaatgattttgattatggacatatacaaggaaacaaaatcaaccaccccactttgatgtcttgtaaccaaacaagccatgtacggtcgcattatttatttcatttagccaaccaggctagttttcttatacaaggaattacagtctttgacaatgcaattaaatgtttgaaaaagacaacgaaacagaagaatacctttaaaatctctatgtttgtcagatcatttgccctgtcactgagtaatctaagcatttgaataaacctctcagtatacagattcaccataagttggaatatctcgtatctgcgatcatagaaaaatcaggggaggaatttttctcctacttttattatatgaacgataaactgaaacacagccgcagcctattttaataccattttatgcaaaaaccaaaattacaaacaaaaaccagctttaaactgcatcaaacattatcaatcccttaacaattctgagtgaaaataaaacagtttcttcgaaactctttgcccatatagtgaccctaagtttaactctctcccagagatgctccagctcattctctttttcttcaaaaattctatcattcttctccaaataaacttcctttttttattagagcctggtacaaacttttggaccatcaacccataacgtgtcataagaaataataggagaggataactactacagatgtccctatatacagatgtctcttaaatagttcgctaatgaatgcttcaacataatcacaccaacatccaagtacccatacgggttagcatgtatagacatgtagaaacatatcctcaagtgaatcttaaatgctatattagtcagatcagtcatactaattccatctacatgcactttgagttttagtgccactataatctgacctcataatatgtctacgaatatagaaatgaagcaaattgtagagcaagttgacatttcaaatccagcaaataaagaataaataagctgacacctcaaaaatcaagaaaactaacaaaatgttatatacaaaccttgggggaaagcaaggagccacgtagtcataaatatcaccaagctcttctccaatctaaaaaataataagaacaaaatttaaaggatcttaatcttctaggtcaaaatagggaacaaggaattcaacaaacaagatcaggatagaatgaactgcatcaaacaaaagaagagataaactttctatcgaaaatatcagcaatataaaaaaccaattcactttaatgaaaagagaaatgacaatgttgacaaagatgctaattaagcaaacaaaactaaatatcacaaatttggagaaaaaagaacagtcgtgaataccattcgagcttcctctaatgctgctttaaggtcctcaaaaacaagctggtacacaaatcacagttgaaataagacatgtttttattaaataataatatacattcttcgatatagagaaaaaatttgttacactatttgcatttctggggcattacaaataaaatacctcggtgagaagcttgttaaatcgttcttcaacagtcattctaatttgctcatagcatttatccttatagccttttccctgagcctttagcttctgctgcgttagatttcttgaagaagccactgatgtgttagattttctgcagagggcagtggagcaaagaataaaagatgagaagaaca

SEQ ID NO: 225080 - DNA, 6391 bp, Cannabis indica
gtatgaggttttacataatttgcgaataataataaattagaaaagaaaggtttatcctatctgttagtacagagtacagagtgcaaaaggaagaagaaccaagctcagctccaacgtcccatatccatggccacagctattctatctctctcttcaacttcacctcttaccagaccaaccccttcttctccattcaaggtactctctgtttcctgtctctgttgtaacctttcatggcttcaaaatctgatcttttgtttatcgtgttacagggaaatgttgggaatttgaagtcaaacccatctcaaattcagtttctcagactcaaactagacaatttccggagagagagaaaacaactggtggttgtgaataaggcagcagctcggacccaagccctgatttcatcggagaacaatgttcggttccgactcgataatttgggtcctcaacctggttcgaggaagaaaggaaagagaaaaggaaggggtatagctgctggacaaggaaacagctgtgggtttggtatgaggggtcagaaatctcgctctggtccgggaattcggcgaggctttgagggtggtcaaatgcccctttatcgtcgaatccctaaattgagaggaattgctggaggtatagctttacttctattttctaatgtttaattgatttgggcaattgtagaattgaattgaattatatactgttgttgttgtgtatgtgttttcatcagttcattcttgagaataggaaagttaaaggttggagctttagtcaaattgatagtgtttgagtttgaatagttgttatcccctttgtgttattattttaaagactctgcattatatacgtatgggatttgagcatagatatgagttctgattacaatatttttcttaacttccgagttcgataacacatgttggaatattttgttttatgacagtgttcgttataattacaatattatttctgtaaaattttaaaaaaatttaaataatttacaatggaaaacatatttgtagctttttgaacacgtatggtgaactgaaatattaagaactctgttgtcgatacaataaactatttaatttttaagaaaaatttacaggtttgatatagtaactttaatgaatatcgttatgaaaaaaattagaaaattgatatttcggtattgtgttttcgagtgcagaagttaaaataggcgtttgaggtagcactcgtcttcatataatcacaaaactttttcttactaggaattgttagggtgctcattattagaacacttaaagatcataaaatttcttgaaatgtgctcttattcattccttctcaagtaaaaaacagactagcacatgtggtttctgaacagattactgaattcattgctcacacttacaggaaggagaaaccgaatttatttattttttctcaaattaatgttgttgtttttacttatactgtgaatcctggcaaataattttggcctcagatagcaaattaatgtttgcctcactacaacattatgtatgtttaaagcattaactgaagcgtatgttttcgatttctttcttacaaggcatgcgcgctggagtacctaaatatctccccgtaaacttgaaagacatagaagctgcaggatttcaagaaggagatgaagtttcattggatactttaaagagcaaaggattgattaacccatcaggaagagaaaggaaactccctttgaaggtaaggatgaaatttggtttctaccattaaagtagtaagataaggttgataacttccacatttggattagatcacttaacagattttttcatgagaagagaactgctaacagaagatattgaatttcaaagtttggtaatatttgacattcttagacattagaagagggtaaaaatgcagtgatttttatggttatacttcatttatgctattgatttcgtatgagtcgtagttcttaattctatgctatgttgaatgtaatctccagacaaggaaatctttgtgcaagactctttggttttcagtttattcataaactgtgtttacggttcaaatagttgtatatgtgcttagttgctaacttgatacactaatggcatgattatgatatttaaagtagttaaccagtgcccaactctatatttggctgagataataattgttgtttcgtgtttcaagatacttggtgatggagagttaagcgtgaagctgaacataaaggctcgtgcgttttcagagcaagcaaaggagaagcttgaggcccttggctgctctctcactgtattacctggacgaaagaagtgggtgaagccatctgtagcgaaaaaccttgcccgagcagatgaatactttgccaagaaaagagctgctgctgctgctgctgaagccactaatgcaaccgaaccagcttctgcttgagcgatcacagttcatactctcttttggtagagcacaagtagcattttcattgctcttttaaggcttttcattctttcttgtagtttttgagtacatgctattgtacatgtttttttttgtaagactaaaaatagtaaggatgttttggcctccctctaaagctgtaaaagtgtattgttttcatataatgccaactgaaaattctatactggttgtgttgtaacaaaaagatagaacaacttattgtgatcaccactcaataaaataaaattcaacccgaaattaacgaaatggacacttagcttttacgaggttctgatacaatcggttcttgagctggactttgctccaagaactcggttttagagagagagattctaagttttgtcattcaattcttaagtcttgacatccttttatagctttagcataggagctgagtttaagagcaacggttttaaccgccactccagctgaggtggcaaaccgattttaactgattccatctaacagaattgagcttagagatttcaaccaatcaccatatgttacttgacttaaattggtaagtaatcactctcatcttgtaataacaaaagaaactgaaaatactatgattataacttagctaaacaaaactaaattctagcataattaacttggtttttatctttgtattgttgatttgatagagatggaccctcttttggtaaaactatcataaaataattaaaatttgtgttggaatcagattcaaaaagatgtgcatatattgaccaatagaagttgttttttcttaaaaagaaaaaggcctttaaaaatatcaagtggtgcaaatgcatatgatttagtgggttggcttacacaccacgctccatattgggcattagaatgattagagaaggaaatataaaaggggtgtgacgcgtgtaaatttgctttcattgtattttgtgtcttttgatttgaatttacttcttttcaaaactacaactaattctttttcttttgcccaaagttcccacttacacaacaaaaaaatactaaacacttatggtgcctaatattcttctgaaatataatattactattagtataatttaatattaggtcttagttattttactttaataaaaattatagaaaatagtattgtaatattgttattgggcaccagtagtgtccaacattttcaatagatagcgtctcaggatttgttagcgatattctttaaaagttatattcttaggctcgtttgatacgccgtataaaagtcgtattgtattaattaataaatatcactatgtttagattaagcaatgtattgtattaattattacgaatttaatacataataaatagtctgtattagcttgtattataatatttacaaagaatttgagatcaacaccaatctctaactcggacccagaccccggacccggactcgggaccccgaaaccggactcgggaccccggacccggactcgggaccctagacccggactcgggaccccgaacccaaactccagacccgcacccgcacccagacccgcacccgagacccagacctggacccgaacccgaactcgggacccagacccggacccggacctcgacctggactcagaccccaaacctggacccgagacgtggactcgaacctggacccgatacctaggacccggacccgtagttggtgttaggatcgagtgtattataaaatatattataactttacacaatcaattaatacaagtcaataccaaacattgtattgtattaaataatactaatacaatacattacaacacaatctaacacaatacattacaatacggcgtaccaaacgagccccttaagttatattgaattcaatacttaattacactaacagcagtatgacaccgaggagggtgctaagcaccaataatattttttaataattctctataaaaaaactagtaattaattataagacgtcacctcatataaatatttagcactttaataccgcataacaaacaatcacaaaaattataaaattgttgtcaattgggtctattgtacaagtttttagggtgcgcaagacaagttggaaatgattttaatggcatgattggattaatatggtactaaaatgaagtaaagacacggtttaatgagtcatgttatatgttaattttttttttttcaattatgattgttcaaatcaaacttagacactatactttttaaaaaaataaataaataaataaagtatttttttgttttcattcttttaatttgtagattaagttttgcaatgaatcaagggtgcaaaaaagaaaggaccattatattctaaactaagaaggtcattcactaataaataataacacatggacattattttaatttaaagaggaactattatataatttctcttaaacttttattttttttaataaagaagaagaatttcattaattaagacgcatacctcaactacccaaatggcataaaagtagtaatcccaacatgcaaataagacaagaatttgtgtatacattaacataataagatatatttaaaattgatacaccacaataccattaactagtttgtatttacattttttaactaaaaaaaaaaacttcatctaacctgaggattttagttttagaattcgaaaaaatttcactgattaaatatgaaatttacagagaaaaatgaatatacactcgagctagctttatatactaatgcaagtaactaagactagtaactaaaatgttaccaatcactatcaacttctaagtaactcatacaactcacttagtcaactaactctctaactaactaatgtttttacattaaacttttaatacttcccctcaaaatgggttgtatatattctccagtctcatctttattgcgataaatccaacacgctagtatacatatcgtttttacaagtaatactcagataagtgaaattattttcacgataattatagctaaaattagttatcttcaaaaggtgaattaggtttatgccaattagaattgagaatagagagttaagtgttgatctagtagagttggattcaactaggtttgatatcatacttgggatgtattttctgtccaagtatgcagccaacattgactgcacacggaagatggtaacatttcagctagagggtgaggaactgtttgtgtttgtaggatacattcagggttgtcagatttcaattatttcagtattaaaagctagagatttgctgcacaatggatgtgtagaatttctagtagttgtgattgactccaacagacctaaaatatttgggcatgagaatgttagagttgtaagagagcttttgaaggtatttcccaaggagtttcaagattgtcgttgcagcgggaaattgacttggcacctagagtagagtctgtttctaaggcaccttattggatggctccgaatgaacttaagaagttaaaaatacaactttaagggatgcttgatctagggtttaccagacttagtgtgtcaccctgaggaactctaattttattcgtgaaaagaaagatggaaccctttagatgtgtattgactacggagagttgaacaagctgacaatcaagaataagtattctttgccttgaattgatgacttgttcgaccaccttcagagaaaagcaattttctctaagattgatttatgatcagattatcattagtggagaattcgagaggaagacattccaaagactgcatttcagaccaaatatggccattatgagttcttggtgatatcatttggtttgacaaatgcactcacggcctttatggaccttatcaatgttgggttttatgccctaaataaaactccatttcaatgtaatctggattattcaatatcaataaagaaacagaagtattttttattcatttgtgtatgttttggttcacctt

SEQ ID NO: 225081 - DNA, 4419 bp, Cannabis indica
cttcggaagactgaaaccaattccgaccatttccttttcccgggaagttggcgtaacttgcagggaatggtgagaaaattcccattctgaactagtctgttctcccttctctgatcaactatgcatttccccaaacatgagtttctttaaaggactcgtcgactctctgagctcaatcttgtccactaattacagtgaaagtccccccaattctccgcccatggaaggcgtagccggacctggaattggcgcgtcagtttcgaacgagcgcgtggcttacaagcttaagggtttctttgatttggctacggaagagatcgacaaggcagttagggctgaagagtggggcgtagtcgacgacgccatcaaacactatagcaacgcccagcggatacttgtcgaagcaagttctactcctgctccttcttttatcagcgccaggtatcccaacttattgtttttagcaactttgagtttcggaattggtaattaagcactagttgaatgtcgaaataaattgattgtattagtgatattaaattttagcttctgtaaaattgagtgcgtatattctttcatggcagtgaacgagagaaggtgaaatcttatcgtcaaaaaatatcaaaatggcagggtcaggtatctgagagattacaaactttaagtaggagggcaggtttgtatttcccattgatttgaattcaattgcagttggtttctgatgctggtaaggattgtgggaaagtgcttataaactcatcattctgttttttatgctcttcttattgcaggtggtacatccattacgaaggtattctttgatcttttgacctgtttcttcttctaaacttttgcattgcctgcctttctctgcgttccttccaattaaaatcttttagctgtatttgagtaaacaatggacagagtggattcagaaaagtagcgtttgcgctcaagtttgtagctctattatgaattttgttgttattttgatgattaggtttctatagaactttattctacagtcacccctttcaccatagtcttgcaaaaatcgtgattaaggatactgttgagcgctgaacaagctgtcttacttaatactaagtaaatataacataaattgtgattatactgattgcagagcggattggttcctgcacaaaaaacaacagtagcatcaaaaacagtaaatgctgggaaacatgttttacctaagccaaccgtaaatgttgggaaacaagttttgcctaagtctactcgttccattacaagcagcgcagtggtgaggaatcaaacaaaaaattctgcaaacacgaaacctgcacaagagtctggtggtaattatgaagctaagttggtagaaatgataaatacttcaatagtggacacaagtccttctgtcaaatgggaagatgttggtaagaagatttgttgcattacaacttttctctttatttgtatcaccttctgcagttctgctatattgaactcagggttctcagttgagcttcctcctttgcagctggtcttgaaaaagctaagcaagctctaatggaaatggttattttaccaactaagagaagagacttgttcaccggccttcgaaggccagctaaaggtaaatttctggtacttatattcgaagtaagaacggtgaggcacccaatatctcatatcatggaaaaactgacgggtttagcttgataggtttgcttctctttggtccacctggtaatgggaagactatgctagctaaagcagttgcttcagaatcagaggccacattttttaatgtttctgcatcttccttgacatcaaaatgggtgcgattctgctggatgtggctttctttcatcttggttattttcgattaaaatatttaccgattgtcattctaactgaattaggtgggggaggctgaaaaacttgtaaagactctcttcatggttgctaagtccagacagccttctataattttcatggatgaagtatgctattcttttgaaattctataagtttaaccgtgcccttcatgtttcatgtcactgtttctgctccagtatgccacttaattaggagcctcttaaaaatgatttttcaaccattcatctttctttatgattgctttagaaactatgctacacaggttttctaaaattaattttttgcagattgatagtatcatgtcaacaaggctggctaatgagaatgatgcaagcagaaggttgaagtcagagtttttgatacagtttgacggagtgacttctaataataatgatctagtaattgtcattggtaagctattttaatataaccaagtttgtcttgaatgactaggttgaatttcatgcatcacgatactcaaatcatgaatcatgctctatttgagtcaattcttctcttatcaagtgccaacatgtagaaacaatatcaatgataaaagatagttatacattgaatcagcaatgaaggaatgttaaatctatgtacacagggtggagataaaatataatgccagcctattatctttttggattacccattatattaacctagaatagtgttatttctaactccccattctacttgcaggtgctactaacaagccacaagaactggatgatgcagttctaaggagattggtatgtatatactccagttggccgcatcttattttctctagtattcttcattcttagtatgttaagttagctatttatgcattacgacttatgtaaatcaatattaaattttagcaacataattatgctacgttgataaatggagatagaattgtgtttgagaatcctgcatggttttctgatgttaacacactattgctcttgtagtaaagatctgtaatcaaagaggtatataatgatcataatgaatatcctagtttccttttaaaatcttatatacaatttcaagaatttattttattctcgtaaagttgctgatcaattgttacttggaattataaattaggtgaagaggatatatgttcctttaccagatcatgcaattaggagacttcttcttagacacaagctcaagggccaagcattttccttacccagtgagaatatgtttcttaacttctattactttttatttttcttcttcttcttcggcatcctctttttcgagatagatcatcaacattgtttgtgctggtttgtgttcaatacgagtctatgagtttattggtgtcagtagttagattcttagggttaagttcatccaatcattgtcattactctttcattgtggcaggcggagatctggaaagacttgcaaaagagacggaaggtataatttattccattttagcttttaaagagttttcatacttttacgaagcatgctaaatccattttgttaaataacttctccaaattgagtcactagttatttttcaaaacatggtgtcatctgtcatgtaacttttgaatgcatgaatgcaatgatataactttataaacaaagcaaaataatttcaggaattgacagccaattaaaatgagagcataatgttttttctttacaatggactgaaagtgagcaacaaactatcatggaatgaattctaactccggtcaaagttaaatttattgtataattaccttgatgtgcaggatattctggaagtgatctgcaagctttgtgtgaagaagctgcactgatgccaattagagaattaggtgaaaacattctcactgtcaaggcaaatcaggtaagacttgtgtagtttcaccataacttgatatcttattattatagtttcaaaatcgttgatttaccatcttctatttatgctttgttttgaggagaaaatgcactaaccaaaggagattttgggttgtaaaaatgtatatgtttgaaaccctttatgtcaatgtaagaattaagacatatgacttgtgtattagttccattgatttttgctgtataaacttgtaaaggccaagattgaattgtctaaattagggagagctgttatttccagttgtctaacgtttaagatctcataacccaggtaagaccgctaagatttgatgattttcggaaggcaatgagtgtaatcagaccaagcttaaataaaaacaagtgggaagaacttgaaaagtggaacttggagttcggttccaattgaaatcctttgtaaatttttatacatcgatcttgactttgcctgaccgtaaggtttaaagtttattcttttatttgtataatatatttgacgtttttgttcaaaaaagaaataaatatatttgatgtttacttctcaactggaaaaccctagttacttgttttgttgcctcaattcaatatgcaagaacacacgtccattcgtaggtattatctattcttatttgggaagtttgggtttgtatttccactttttccttcttc

SEQ ID NO: 225082 - DNA, 5785 bp, Cannabis indica
tgaaaaagtctttacttgcctgacagaggaatgcctcattgagatacttgctttacaaggctgcaaaggggttcatggagatttggactacatacaatcatggagacactacaagtgaatccttggattgaagagattgatcttgcaagaacaccactgcagaattccggaagagccgatggaattcatcaaaggttaggccagaatggaaaaactgaacctgaaatggacttggatatggacactctcaaggacatgccactaacagtacctaagagctgtagagttttcttctgtgggcaagaatatgcaggtaatgaactttgtcaagatatgaaattataaggaatcgtttatttttctttttttaactttttgaatattattaattattattattattatcttcttcatttctattcacaggaaaaagtacactttgtaattccatatcacaaaacttctccacctccaaacttccctacattgaccatgtaagaagtatagtgaacccagttgagcaagcggttaaaacagttggaatgaagatcaaaaccttcaaagatgaagatataaaaatttcaatatggaatcttggtggtcagcatgagttttattccctccatgatctcatgtttccgggacatggaagtgcatccttcttcctcatcatatccagtttattcaaaaagccaagcaataaagaaccaaagactccggtagagatagaagaagaccttcaatattggctcaggttcataatctccaattcaagaagagcagtccaacaatgtatgctaccaaatgtaacaatagtactcacacaccatgataagatcactcaaccatcaccaaatttgcagggtacagtaaactcaatccagagattgagagacaaattccaaggctttgtcgatttctacccaactgtattcactgtcgatgcaagatcatcagcttcggtcactaaactcacgcaccatcttcgaatgacaagcaagacaattcttcaaagggtacccagaatttaccagctttgcaatgatctgattcaaatactatcagattggagatcggagaactacaacaagcctgctatgaaatggaaagagtttgatgagctttgtcaagtgaaggttccaccactaagagttcgatcgaggcacgacaacaaagagaaggtggaaatgagaagaagggctgttgctacttgtcttcatcacataggagaagtaatatattttgatgaactgggattcttgatcatggattgtgagtggttctgtggtgatattcttggacaactagtaagactagatgtgagaaagcagagttcaacagagaggaatggatttatcagtaggaaagagttggagaagattttaaagagaagtttggaaagccagattcctggaatgagctctaaggtgttcgaaaacttagatgcaagtgaccttgtgagaatgatgcttaaactggaactgtgctatgaacaagacccgtctgatccgaattcattgctactcattccctcaattcttgaagaaggcagaggaaaacctcagaaatggcaattaagcagccctgactatgtttatgctgggaggcatctcgagtgtgatgattcaagccatatgtttctcacaccaggcttctttcctagattacaggcaagttttgcaccatcctttatttatttatttttttcttataatcatcaattcttgtaaacaaaaaatacataattaaagaaaccatctctgttattttatggtctagtagggataaataaaatgaaaataaaaaataaaaagaataagaaagtatggtatcgaaagtcaaaaaagtaaaaagtcgattcttaatgcttaaaagtaatactaaaagttattacttattttgctttatccaataaatttggttgagcatgtcttggactaacaacacatcaattatatagattatcttttttattcattaaaaaaatctgctaaacttttgaatcttagtctttagttcaagaatcattccattgcttggcccataatggtgtacatacactttgttaatactatctaaatttattggttctgtactaatacgaaaacacaacaacaaaaaataaatttgcattctgcctctgtaatacggaaacccagcaacaaaaaaccacttttaaagagcaactctttaaactcatttgttgaggttactattaaatctgaaactaatctcatttttttgaaaacccaggtgcatctccataacaaaattatgggcctaaggaaccagcatggtgctacttacagtcttgagaagtacctaatttctataaacataaatggaatcaatatcagagttgagctaggaggacagcttggttactacattgatgtgcttgcctgttccaccaagaacgttacagaaactcttagacttatccatcagcttataataccagccatctataaactctgccagggaatcactttagctgaaaatattttaaggcccgagtgtgtccaaaatctgactgccccgcgatacagaagaactcaatttgtttcgcttcaacagttgaagcaggcattgctttcggttcctgcagatggtatgtatgattatcagcacacttgggatgaagtttcagagtctggcaggcaaattctgagagctggttttgatttagctcgagacctcctatcagatgaagatttcagggaagtactccaccggcgatatcatgatttgtacaacctcgctgttgaactacaagtctctcctgaaacaaacccggatgggacagagctgcaggcatcgtcaacaggtgatgagaatgaaaaagttgaccccagtttaggaggaattgccaaaggattggaagtagttttacagagactgaagatcattgaacaagagatcagagacttgaaacaagagattcaaggactgagatactatgaacacagactactgaccgagcttcatcgaaaagtaaactacttaacaaactacaatgttcaagtagaagagaggaaagtaccaaacatgttttactttgttaaaacagaaaactactcaagaagattggttaccaacatgatctccggcatgacagctcttcggctgcacatgttgtgcgaatttcgcaatgagatgcacgtagttgaggatcaaatggggtgtgaaatgatgctggttgataacatggctgtgaagagtttggctccttacatgtcaaagttcatgaaattaataacatttgctctaaagattggagcccatttagcagctggaatgggagagatgataccagatttgggcagggcagtagcccatctgtcagactcttcgcttctttacggagcagcaggggctgcagcagccggggctgtgggggctgcagccatggggcgagcagatggaagaaacagaagcaggtatggagataaaagggatattcaacaagatctcaaaacagcacagcagtgggttgtggactttctaagggaccggagatgctcaactggaaaagaaattgctgagaagtttggattatggagagtgaggtacagagatagtggacagattgcatggatttgcaggaggcacatgcactttagagctcaagaaataatcgaagtgcccgtatgaaaatatgcaacacattgtcaattttttttctttcttttattatgttttttatttataatttacttgttttgtgaaggcaacacaactttaacccaccttctttcatatctacatataaaactcaatggttaaactggttttgtagctcattactaaaaactacataacaagaaaatagtgctgtcaagtaggtggcgttctattgtcttttgggttctcaaagcattattataatgacaagcataattcattgaattaacttaatcaaacaattgaacaaacaacaacaacaatattaatagaacaagacaactaaacagtccatatttagcattattacgactaagacatttagtcagaaccaacactccctaaaaaattttcaccattatagatcattatgtccatcagtatatatggaccaatacattataaatctcctcaagaacacaatataatgcagccattggcaaacagagtctaaactcacatgttgattgagattgataagatatgatgaccataaagcctaatcatgcatgtgaatcgacaaatgacaaaaataacggatgcttttgctcaaatcaccacgtgaatgtgggaccataatggttctacgcataaatataaccattagcaatagataaatcaactatttcagtctaatgaccttatcaacaaagatgaagaaaagaagtaatgaaaaaagttcatatatatatatatatataattatataaaagaacaacagcgaatatgagaacaaagctcatagctagtacagagagttacatttctgtcatctaagaacatgtcaacataggatgattgatgataccattaattaccaaagctacaatgaccatacgttattagatttcaacactagtattagtcttcatttctaaaatctaagagtcacctgtgccaaattcctccgaacactttgtgaaaacaaaagggctcacagatcagaagaaagctctgctaccataaaacacacgggagccactgttctttgatgactgtactttagaatcagagcttgaattctctgaatttgtttttccagtttccatgtccataggaagcttcatttttgccaaggactcagtaaactgctgcatactcttcatgtacatttctactatctcctgctgcaccaccttttgctcaggctcaatgttcacagaaacaactggctttgtgaatgaatcacttgacaacccaccagaggaatcactctcactccctttaccatccacatttttctctttcagagctgaaacttgctcttgatttggagatttggatgcagctggagcttcagatgactctgagcttgcagggactgaaggagatgaaactccattagttgacacactgcttggtggtgagtcaacctttggaagtttaacagattcagcagtaaccgttgagaagctttcgacaacttgagctccaacttcctcagtgagctgattctcagcctcagcttcagcctcatgattgaccaaactctcagaactatcagattccaaactgttgcatggcatctgaatgtactctgaaaccattatctcatcttcatttacaattttaggatctgggaactcaatcttgtctaactcactaggaagagactcggatatctcagaatcctgtacacgagttgttccatgagtggccatgatcatttcaggggaagctccagtgtagttgagagagagctgaacaaaaccagctggtgaatgaaaaagatcagttgaagaaagagagaactctttctccaacttcccattgttcattagaacctcagacagtggcaccaaagcaaaacccaacaactggtcttcaagataattcctcaccctgctaagcatccagatctcacatttcagggaggactctacagttcttatattgagttgtagtttctcattgaagactggattccgaccaccaccattgatgattgtggtggaaacagccttttctggatcacttgtcaggcaaagcttggcataaacatcttgtttgtggtatatgcagatgttgtgaatatcccttgcttcgtgtatgtaaacatgaagaacaccaatggagttttcacgttaactgcttcagcatc

SEQ ID NO: 225083 - DNA, 2481 bp, Cannabis indica
tttaaaaaaaaaatacatttttagacttaaaaaaatatgataattatatattttcacgcttaattttatatatatcatattattttttaataaatcatgccattttattaatagcagttaactaaaataatagtttacaatccaatcagaatattttactgttcgagatacgactaagactaaaattaaaaaacgaactgaataatcaaccacttaattctcagattgtttgacaaaacattaaaaatcaaattagatcaatatgattgcagcatcacagttaaccttaaaaacaccaatattcagtttcatttacagcttaaaagatacaataatataaaatattgcagcaagtttgtttaatctcgtaactttagcactcaactattgtacaatgtacgtaattgcactactaacaatctcttccgtcgcagataacttgttattcttaactactaatagtgatgacgagtcatcaaagaacaaaaaaaaattaacaacaaaacagaacaatacaaaatcatgtcacataaaacaaaaataaaacactcaaaactatatcatagagacaatattaaatactcaaaactatgttacagagataatactaattacaatagtaaaaattgaatcgaaataacaaaacataactctgactacgccgcacttacacccaagaaagactggcgggtttgaatggagaaagaaaataactttatgttgctataaatttaggaaaccctaaaatatgtttttttttttaaaaaaaatatcctattattaatttcattcaacaattatataatagttgctaactaaacttttcaaaagcatccaattaaaaaagaaaaaaatcacttttcaaaacacacatatttaagctattgtagagaagacaagtcatatatgtgaaattaaagtataataattattttttatacattatttaaaaaaagcaaacattatccaagtatgcacggtttagtttagtttagttgggctaatcacttacgaagacttctgtttacttaatgtgagacaatgacacacatatttatataagataatgtagaaaaaaaattccccccaataaatatttgtactttatttgaaaatttctgactcatattttctttaattttaacatgattataagattggggagggtttggaaagtcattttgtaattagattgtagtgtaagtgtaattcaaattaattatttaatttaactaatttatttgattataactatttattatacaataactatataatttgagatagttaataatatttaaccactctctctaatttttagactcttatcggagtgtaattgcgtgtaattattatattctcatgttatataatattttattttcatgtatttactaactttttggtaccaaataaattagaagtcattactttcaaataactcatcaggtgcgaatacaaaaagcgagagatttacgagatgtgcttctattaatttccattctttcttactacccattgatgatgagatgaggaatccgagatgaggacaagacggaaaatcctctaatgtaaaaataaaatttattttaaaaatttaaatatatacaattattaaattaaataaaaattaaaatatatacattattttttattcattatactaattattccatttcaacaaaatatatacttattattatacaaaaacacaatttaataattgaaaataacactaatatactaaaaaattataaatacatactataacatataaaatattaataaaaagataattaataaattagatgagttcctattaggaggggagtaacattcctgtctctgtctcgttcaacattcaaggataaaaattattcttgttcccaccctatttcccatttaattgagaaatccctattctaataggacaagtccccacaggaccatcccgagaaaaatgtgcattcttactcaataatttaatattaagtacaatatatgtatgtacatataaatttaacacccagtaaatttataaaaatatgcgcaattactactattaaaatcacacattcatttttttatacaatttcttttatatatataattatataattcttttttaaaatggagaatatatattttttttgtttatgattatgattattattattattttctgtaaggttgtttattattatcttctttttttctttgtttaaattattatcttgaaagcatcttttgtgatcactactttaaagtctctctttgataatttgtttgtagtaaatatatttaaatataaatggaataagggcctacataattggtttgataaaatgatcattgaaatggaatgatatttcttacctaaaatattattccattattggtttgaaaaagtgacatgcaatatagagggtgagaggaagaacgaagaagtagtatataatatttcttaaataataataataa

SEQ ID NO: 225084 - DNA, 5483 bp, Cannabis indica
tattttaattatatatatattcttctttttttatgatatatatgtttatatcatatatagacaattacatactatgtatcccacatctacttattttctttatatatatattaatatatatatatatatgacttctacaagaattttcatttttggggatcaacatcatcccatatatgttgagttttaagttagtgtgtgggttataagatattaaaatatataatttttaggattttttttgtcattattaaggaaacaactaatatattgggactgttgatactgttctgggagcagtatcatgagagataggatttgaatcaataaagttcttgtataagtgttgggaaatagaaagagtgttggaaagaaactttaacgggataggttatattttataactcaatttctgtaatttttggcttggtaaaaaatgcttagggtatctctttataataggactctataaattactctaaaaacataattaaaagactagccacccccaatttaaacctgatttgtgactccaagaatgattgataatttaagaaatgtttctctcttgaatatcttggtaaatatatttactactttgtcttgagaattcatatactccactctcacttctttttttctgactaacaattctaacattataatgaatatttatttggtcttgtgcatgttaggtagcgtaaaacttctagaaagatttttgaagagagttaggaaaacttcttaggtacttcattagtcttattgagtaattaaaataattttatcttattcgttcacgtacatcaatgctaaggtaataagacatgagccaaatgtatgtcgtatcaaactcttttgtcatgtctttcttgaatttctccaacataattaagttgttatcagtgacgatcaagtcatccacatacaagcatacaaccaaaatatagtcattcttaatttttatataaagtgaatgctcatattgaaacttggtaaaattgttgtcatgaaagtacttgtcaattcgagtatttcaagttcttagcgcttgctttaggtcatataaaaccttcttcaagtttaaaactttatcttcatgcccttttacttcatatcccaatagttgaacaatttagacttcttcttcaaagtacactcattttataccttgatttatacctttccacaacttttaagtttcttcttcatcttgtacactcatttaactccaattggcttgtatctttgtagatgatttagctagctctaatatgttgttcttagtaggcgttcacattcagcaaaagactcattagagaaatgtcatttttgttctcagttactttatgaagttattattagcttttaaagtatagtttcttatcatttgacgaatcttcttgtatgtttctggttgttatgattagtggtgtaataggtttttgaggttcttcttccatccttggtagctctactgcatctttctcttcaaagtaaggatgaaaatataccaatcttctaaagttttctaatccaaagaatcttctctatcaaactctacatcgcgaatgatcatagttttgtcatgtgctactgcttgtctaggatagataactgggacccttacccaattggataaatgatctttccagactaatcctttgattttgtttttcaaggagtcacataatttatttgttctatgaccaatattgaagtcgtaataacaacttttatttgggtgtctctttttctttcctcatttgtacataggtggaggtatttttgtaatggactatattacaagtggtctggtaaacattctcacaattattaatcaagctagtatactcagagtatctcaattcttgagtacttccgttctttgtagactcattttggcttgaagctttggaacttcttttgctttggaaatgaattacctttgactctggaaattttctttgttggtttgtttgtttgggaacaacactgtatccaaattgtgctactacatagtcagagaaactggtttgtgcagctgggtgtacgaaaatattctgtccgtaaattgtgagagttataattgtggttgttgaaggaaagatattcagagcagccatctgtaaagtttgagcagttgttgtattaggagtagttgctggaagtactccacaagcttgagcgtaccttctaggtttatgaatccttggtctctggataagaagtaagataatgaatctaccctctacctttaaagttttccctattacaaggatgcagtggttattcctcatgtgaaagccatcatcttcatatcatcagtaaccttagtctttgttgtcgtatccatcatgcattagatgtacttcttgaggctttctcctggttgttgtttaatctttgtgaaagaactaacttccaagttgaaatcctttgttgctatgaattgtttcttaaacattgtctataaatccttccagttatgaattgatgtgaaagataaaatatttcaccaattgggcagacttagtaataagcgtaggcactttgcatcatcactagattttgctacctgcatcatttggttgtacattgatagatggtcctgggtccatttttccttcgtacaattccattaaggaattctaaaatgttcttgcaactgtgcatctatgattcttttcacacatgtttatgtatcctcctcctcccagtttgacacagttctgatttgattcaaggagatcctttcggagagcttcgttagctcttcaattttccactccaaacattgagtcatggtgtctagtgattcccttccataaataagatcattgatatagtttcttaggccatcttcgcgaggtctgactttctcaaacctagctttttctcttttgacgtttaaccttgttcgaagatctttcgtggaaagacttctacttttgtcatgtgatggcagatacacttcctcgacattatcacttggactgatagaatcatcacagtgatttgtgtccttccaagtagcagtcttcttggcatttctgcacaattctgcctctagaattagttggtcaccatttcctaaggtatgtagtgttcctttctttttcttttcagtttttcggatagatttggatttatttatttatttttgtttagattaggcaaccttcttttaagttttgcctactttttctttccttttgtccttatgacgatcgtaagttccatgatttttgggatcaactttcctggtagtgttagcttttggagcattatgattagcattgcttgtagaggttagtgcttcaattaagacctccattcttggcatttttttgtgcatcagcaaaaattactcttgcaacgatattttatcttcagtttcattcaacaatattgccataatgaccatcggatctaactcatttggatgttcttccttttcagcgtcatcatcaacaggcatgtcttgatgattatctttaggatcaacagaataagtctcctctaattcatcgccttcattcatgggatctagtccaactttgatggacttaaaatggggtttttgtagtagtggttgatccttcttgtggcaattggtcacctaagttggatcttcaacatctcctgtattaacattgggatcagcatcaccctttttacgttcagtataatgaagaccagattgggttcgggtgagcaccataattattgaatgtattcttgaatggtatcattgctttcttcaactctaactgaaagcaccaaaatatttacgaagattttcagaatactaattatttaatattagagctaaagaatataaaattaagagtttgataaatgaatgagacacttagattttttacgtggttagggtattaatatgtcttagcccacgagtcagtataattatcagataggctaaaaaaccctaagggtttatgatgagtatgagaactttattctcttcccgagcaagtaagtcaacaaattctaaccctttgcatgaatgattcaatatttatttatagagtaatagaggtcttacttagttaccctttctctctaatgggatgtttacacataatttggcttatttagtgaagcccaggccatgaggcaatacatctatgctgatgtggagatatgatcacggtgatagttgttcatatggtgtcatttcattatggataattaatgtggaattaattatttgatcttcaattaattcatttttcctttttagacaagttattattctctgcccacgatcttaggagaacatcccttattctatgtggagcattaaacgagaaattgggattgtcttccgagtacacgctaggactctctttcaggtacacagaatttgactctcttccgtatactgactagacttgacggaagctcatctgatgaggcgtgcatttattctctcggaaggctacataacattagggcttggcccaacatatgttatttgggcccattgatgaactataagcttctatttaaatctacgtgtctcttgtcgaaaacatggataacaataagaaagctctaataatgtaccatattaaatcaataatttaatatttaacagtatgatcacaatcaatgacagatcaagattgaagaaaaaaaattttgaggattcttataaattatatattatggatattatcttattatgataaattatgggacactctccaagagtctcttcaaagggattaaaatagttttgcaatagatttttgggaattaacctagcggaaagttaattaaaaaaattaaaatttttgttttagaaaatatattaattatgatgttattttgaaaataaaaagaattaaaattaatataaagaacaagccactattataattttctacacctaaccaataacattattgaactagattcactatccatagggattaaaataaattcctcatcctaaaaaatctttctatatattgatttgagagaatgtatatattttatttttcttttactatttatttgtaaaagatttttgtttaacataacatatgtgtagtttttttttaagttctatgttgagtgtaacaattgtaattttctttctatattattacctaataaattaatctagtccatgaattaatatttataaaaattaattttactcatgatttgattttagtgtgatatgtacgtgttattctataataaaataatttgtgtgttctgcataatcataaaaatttgtaaccccaatataaggccaattatataaataaattccacaactataataagttttacaaacatgttcgtcctgatatttttataatagagtattttacattatatattttctaattttaaaatattgtgtttagttactttagtaaacaaaattcaaaattaaaaataattattgactttttttaatattattattttttttaaaaaaa

SEQ ID NO: 225085 - DNA, 2700 bp, Cannabis indica
ctaaaacaactttttttaaaaaaaaacacacaataaaattacccaaaaaaaattactctgaaaatatacatggtcaaatctcacttattgatttgtgtgccaaacttagtaatttttcaacagtgttagtggaccaaacttagtaattgttcaccaaactcatttgcctttttttggagatgctacaaatcaatcaatgtcatttgtacacttaaaaatatattaattatgtaaatggcatacttttgtttcttattcataacattcatctactattattggataattattataggcattgtcctccataattaccttctttctttgtgtgtgcatttgtcagatacacatgcatctcacctaagtcttaggtggttataaatagaaaaatttgagtttattatacttggtacatgttaaaattttatgctaataattttcactattttcaaaatacaactcgtaaatttgaagatgaattctatcattaatagggaagataatctctctctcgcccaacccccattaaaaccatcagttttatatttaagtgaaagcttaaattaaactccatattataattaattagggtttatttggtaccccgtattatgatgtattatattgtattgtgttaagttatattgtattgtatagtattattcaatacaatactatgtttggtagtgacttaaccatcaaccaaacctcaaccccagcgtagaccctgatcctgaccctggccctaaaccccgaactcgacccaagaccaggacttgacccagaccttgacgtcagacttagaccttggtcccagacctcaaaaccttgactttggtctgaaccccgaccctgaccttagactcgaaacccgaccccaaccccaaccccgatctcgaccctaacccctcgatcgaaaccgaaacccgaaaccctaatcctaacccctacctcaaactttggacccaaacctattttttagagtgcatcatataaacaacatgttagaattatttttatcactcataaaatatacaatatcaaaatgtaatttcatgtacaaacatgttacatataaccatgagtatataaatataagtctaaagaaaactcttgatcactcaaagagaagaagaaccaaatagtatatgtgtatatttattcattgatagagacgatctttgtggtgataatcttttaggtaataatcttccactaatacaagacatatgatttttctcttaacaagggcagaagagaatagagtagctcttatttcttgtagactactaccaatacataaactaataagttttagtttttaatatttctaatttaactattcaataaattaaaaatatcatttaatgtatttatatatttagtccataatactttaatacctaataactcacaattactaaaataatcactttattcatacacactaatatatatgagtccatactaaagattttaatccaacacaccctaaattttactacacacaatatacataataatgtccaaaaacaactccatcacatcaaacttgaaccattctttctcgatcaaaaacccaacttacatgaatcaaagaagaagaattcttttgggccttactcttcaccatttcttcaatcctcttaagtctctgggccagcccacaaagatactcttgggcctgtcttccctcactagaaagcccaataagcttttcaacattccatttggccaccaaatgttccaatatttctctatactcagtcacagtataaaccccaatacgtgaggcagtgttggtgaagtgatcaaagagatttgggtcagtgccatcatacattaggtgaccaggcattgtgatcctttcctttatgatttgtgcaaatgccaaaaccatgtcgtttggatcgagctcgaagagcttcgatgctattttggtgtaagcagtttcgtgttgtttctcgtcacgggctattacgccacatatttgggcaagttttgtgtcaccatatttgaatgcgattttggctgtgtttcggtgtgatacaaatgttgctctttcttgaaatgatgtgtagattgtgaattcatagggattatatcctgaaccaatatctttatctacgcctgtctcaaaattttttgagaaccttaataaagagaaaatattaaaaatgagttattttcaaatattgcattgaaaaaaaataatatattgaaattcataaaaaagtgaaataatagaataaaaaacgatacactataaaatgatacataaaaaataagaagaaaaacaagacattatagtgaaattctaaacacaacaaattgaagttgacactattattggaaaatgattaaaagggtatttgaaaagaaaaaagcctataaaaatatctttgaataactatataaaagcataaaagtgtagagtaaaaaataaatacaaaagtgttgataacaattaaaacattaatttgaaactaataaaaaataatatttaaaatatgttattaataaccaaaacaaaataattgattatttttctaactttattttttatagtaattaattaaatatagagctacaattatcttaagtacaaataaaaactaacataataaccaaatataaaattacttatctcaataataagtcaaaccaattaaaattacattccataataataataataat

SEQ ID NO: 225086 - DNA, 3419 bp, Cannabis indica
gaatcctgctcaacagaccgggtagaagtcacaaccagtttatcctgccaattgctggctcgactttgtatcctgaattgccactcagatcctaccaaaaccagatctagcataggatctagtccattctcgggctcaaattttgcattattcagatgctcttgcttaagtctcacctgattttaaatgaaaaagccaaatcaataaaaggaaactaaaattataaacaagatttactaaagaaaaactttggattcacctgcgtagcaacaagatttacatcgccattctcgaaagtgaggatgcctttaggctgtatccgtttgggatgagctaggccatttaactcaagttcaccactaacaccaaaattaagaatcaatggatatactatcctcaactcggggccaagaagaagcttcaaatcacttagccggatatctacattgggtatgaaatccacatgctccatcttcttctcaacttcggatgaatcaactgcaattgcgcaaagggattgcagacattatttactatctagcaacagaatagaccattggaaaaagaaaaaaaaaaacaaatcaagcactgatgactacttacctaagggttgaaggaatcgagtccttgaagaagcaggttgagaattgaaaaaccgagaaacatatgtcaaagcaacttcaccacctggaagtgtagactgatctgatgccaatctattatgagcagatccactacccttgtcatgtggtagatatgcttctccatggctcagtttaatattcccggaaatatttggttgtaatatggaacctgttatctgcatctgagaatcaacctgggcactgcaattataggaacacattagtgttacagttaacagaagaagtgtgaagattcacacacaaatgcgtttcgtacgataagccatttagaaataagatatgaatttttcacatgatgagaaaatttcatagacccgattttcaaagtcaactcaaaagtttgttatgaatgtaagagaagaaaaaatatacatcaaaaaaagcaatgtctaagaggatagcgtaaggaaccttaagatattctttgcgcgtacttcaagaacttcacattttaactctatcttatcgccaacggctgcttcacttgtcctaagaggcaaattcccttttacaaacagcttaccccatctgctaaccctactttccaatgagctgatacataacctattagattttattttaactgcaccaccgaaatttgtcagcggtttccagagtactggagaagatatcgatgccctgttgaatgttgcagatccatcaagcactggttgttcaactgttcctctcacctatatttaggaaacatcccacaagtcaaaaacagtaaatttggaacaattctaatcaaatagctttatattgaaagattgataaataatttttaaatagataactcctgtagagaagttttatcgacttggcctacctgtagcataatctcagcattgccatgaagccagttggcatgaggagataaagctgttagtaacatcatgcctccatcttttatatcagcatcaaccctaacttctccaacatctagaatgttccagtttaatccctttaggctttcagctaattgggtatcccaagcctcttcatttctttctcggggaagtttcttgtcactggaatcatcaatggaagccctactatctctttcctttacccaaccacgttcccaagtaacttgactattatcactctctacattgtcgtcttctggcatgttattttggacgaaattaataggaatacttccttggatatgtacatgaccattttgaacaattggttcaaattttgcattgaatagaaaacgactagttgacgtcaatgaagctacaatttcagctcttccgagatcaatacctccaatggcaccatccaagagccttacttgcacatcacattctggtttggccagagttcctcttagatcaccttccatgtgtaatatacccctaattggtgctaaaaattgccgcaatgattgaatagcatcattagctgacgattcaataacctgaaccagtgttgggactagactaacaggaaaatttagaactgcaaagtgaagattgttcttaggccccaataaggtcccatctgcatgaattgtggcattgtccttctggatgaaaatttgctccaaatgcagaccatcatcattgctgtaagcaccaaccgcaagaacacgctgagttttgtatgtaccccactcccaatcctcaccatgaaaatcaaattctgcctgaaaacaagaaaaagaaaatagcaatcaaacataatttgcagtaagtatcaaactatcaactcttccaaaacaacaaaaggaaagagaaatgtgctaagacacatcaaatagagagcataattactgattgggtgattatagtgcggaataaagtgttcttttcgtgcattaactaacaaaatgaaagagaaaaaaagaacactagcgaaattcatcatagttcgtagatctaatatgataagtgcacaccagaacctcataacacaacaatttatgaatctccaatcctctaaaagaatcttacatccccgtttttagattgatcagtttggacatataaacatcaaaattgggtgaggccctaaagaacacatgcacttaccattgtatctccatttccacctccacttgcttcaagagaaccatgccaatgacctttaagttcagctagaccaggaagactcaaatcttctagaataacttcatttgatgatatgaaatggaaatggataacctgttgtaaattaaccaagtcaaaatgaataaaagatttggtcttgacatgtccatctggaaactagtaaagaaacaaataagagtaaataagaacaaagtttaattctattgtgatacgtacagcatggtttattgttttggtaggaataattttattaaatatttagtgttttgtcctgttctaataagcataaaacgacttatcaacttcccagaaacaaggcaaaaatcagaaagttccattgtttgtggttcaactactctcacacaaatatgatactaaacctcatcctttacatttgatatcacttgccagtgatatatctccacttttctagccatcggattaaccattttttagtcactctcatgcaacatacctagtcaattgtcctttttattgttattattaaaaaaaaaaaggttctagtcttgttttgaccaaaaaaagaacaggttctctggagcacctgtgaagaattaagagccagttgaatagaatcattcaactataatccacatgcaaacagaaaatgcagcgttccattgacaaattacctcaagcaattctttcacac

SEQ ID NO: 225087 - DNA, 3255 bp, Cannabis indica
gtttttaggttaattaatttatatatgcttctatactgtttttttttttttgaatgattataatcttggatctcactttatatgataccatgaatttcatgctgatcgatatgactatatctatatatatagtggaagaaaaacagcatcattaatttatagatttccttaacatggagctttaattactttcttcacaaggtcgtataacatcgattattatattacactcatgttcttgaatagtaatttttctatttattatatggattatatacagctgatgagcataaaatgataattcttttatattatatcattattattcattagtttgtacaaattagtttccgccaccgcgtccaaattatgatttgaattagatttagaaaattatgattctgattctgtgttttcttggatatataatcataaataattttcaaagtataccaaaatttaatgtgtttactttatagcttctatttagtaatccattactgtgatcagaataatatagcaacataaaaataacaacatagtttatatatatatatacacgtagtttttattaatttatttattttccttatcatttcctaggagatttgaatttatatatgcttcttcttaatgatgtacggatattgaagtagtttattatgcaaattaatgtgctatatgttttttattttgaatgcatacattttttttcttctaaattgttacatgtatgaaagtagttttcttttctgacaattttcatttcattatataaataattagaagttaattataattaatgttttcatatgcttaataaagatatgtgatcaattatgtcatgcgtttataatgtatatatatgcttactcaattgatcatcttgagctggaaatctgttataaagattaatcctttttaggaaaaaaaaagtgaaaaatattactttcatgtgtgatttaattttgagtttattatatagttacctacctattgtaaatcaatcattatatatgttgaaaataaaaaccaaaagatatttttggcttatttgctggttataacatataagcgtgttgttatagaatctaggtttgatcgaataataattaccaactgttgttttgtttctagtccatcaaacataaatcatatatgattcaggtggccgtttcttgaagcttctctgacaagactggctatattcctgttacatggaatgtagaaattaaaaaaaaaaaaacagattccctaaagtaaattattattattattattgctgtctaatttcaaaattatttgttgttagcatatataatcgtgcgtattataaatgttaatatatgaatcaatacacatatgtatatatgtacatttaattctcatacaaacatcaatattatattaatacattattttaatgtatatgtacattaattataataggcgattttaattagagtgaagttattccctctttaaaaaaaattggcgaagttagttagttattaattggctagctttaggtatatattattttcttttaatttatactggagttgaattaatattatatttatatacataccaactggtaataataattaatgatgtttttattaatgcagggtgtaagtagattattattgggtgaaatttgaaagagctagagatcgagagtagcatgaatacattttcacatgtaccaccgggtttcagattccatcccacagatgaggaacttgtggattattacctcagaaaaaagattgcttctaaaagaatagatctcgatgttatcaaagatgttgatctttacaagattgagccatgggatcttcaaggtaattaattaatattaataatttcatcatctatatatatgctatatacgtacttaattatattaattaatgtgcattgcgtgtatatagaattgtgcaaattaggaagtgaagagcaaaatgaatggtacttttttagccacaaagataagaaatacccaacgggaacaaggacaaatagagctacgaaggcagggttctggaaagcaacaggaagagacaaggccatatatgcgaggcacagcctgattgggatgagaaagactttggtgttttataaaggccgagctcctaatggtcagaagtctgactggatcatgcatgagtatcgacttgagaccaacgaaaatggaacttctcaggcatctcttctctctctttaattattatatattacatatatatatatatatatatttatagccttttcttttgagtattatttgcagtactaatcgttaatggccattaaatatatatcatgataattacaagctagattaatctgtcatacaatttatagtttcgttacagttaccatatagggagaaacactaatggctcaattacaatataatggagggtactaatcgttacttttagatattttaaacaatcacaagagatgaatgtcacagaggtgatgatgaacaccaaagttagttagtttgtattattattttggataaatcatgttgcaacttgtaataagtgtatgattttattataattaaactaaattaattacaatatgtattgatcgtaccactactactacgtaccccatgcaggaagaaggatgggttgtgtgtagggttttcaagaagagaatggccaccgtgagaaaagccggcgactacgattctccaccgtgttggtacgatgatcaagtctccttcatgccgacggagctcgaatcgccaatgagatcagtctctcatcacaatcatcatcataatcatcaagcatacacctcttcattccaccaaaatcactaccctaataacaattgcaaacaagagttggagcttcatcagttcaacatgcctagggcaaccgtagtaggagatccatttttccaactccctcagctagagagccccaagctccccagtactagcactactactcatgccgaagatcatcaatcctgtttgatgatgatgagtaatggatctgtcttttaagcaacgaattacaagccgttgatcaactcatgatgatgactaataatgcttctaataataacaataataatgggagtagtactacggattggagggttcttgataagcttgttgcttctcaactcggccatcatgatgaagatcaacaactaacaactgctgctgctgcaggtgcgggtgcaccggtcttccatgtgcctcatcaactggtgatcaacaat

SEQ ID NO: 225088 - DNA, 2519 bp, Cannabis indica
ttttttttctttttctttcatttaaggaaaaaataaagattttcattaactaaattggacagtttattacatcatgatatcattcatagaccataatcaatacaaataagctaatcgtaccgtttacaattgtgatcaaaaaataacaaagaaaactaaaaaagacaatgcagagttagtaatgacaaaatagagtatggaaacacatgaattacaaggttcgatcacaagcagaaacttgaatctactccttaggtggaactgccttgaggctttgcctttattgattgaaaatgaagctcagagattgtacatgacaaggacagaaaacatgaactaaaatagagtcttgctcctactgaaaatggctcactcgagggacttgagttacacactcataccctttacaactctacacactctcaacttaactcagctaaacaacagcaaatggtctttatatatagaccaatacaagtgtgaccgaaccaacaaagcataacaaaattaactagcaaaatcctaaccaacttaactgtccaacttgtacaagtgtataaaccccatagcaataattaggattgaacatagattgaagctataggttacgggtctatgattttttagttcacaagttttgggaaataaaacctacactcatacatgctcgtgaatgccataggtttgatcgagccacgagtaccaggtcacgagttttgaaaaataaaattacaaaatgtcaatagttctttcctatttttaaacagacgtttagctaagtataaattttcaatcaaatggttagtgaagtaaccccattggtgggaacaaatcggctgctcccattatagaatctcttcatatatagataatatgcgtatttataaataaaggagaatcataagaaggtcacgtactgataatttaaacaatttgattcataagttaaaaaatgaggttggtgaatgaagggccttcctgatgctatggttgattatttctctggtactttttcttcatttcaagtggagtggagggaagccattgattgtgttcatccatctatttctttgttgaataatgttgagttttcgaaaccgttcacagtggatgagatcaagacaactttgttctagatgcatccagaaaatctccaaagcctaatggcgtgtgtaacgactggataattagacatggaaattagtagattattaattgattaaattatttatattaatatatgcattagtagaaaactattcctattgtcagaaataagtagtagagaaataatttctcaattacaatgattttattaagttctaggcgtgacatatatgatatttataaattttgatatttttatgttttatgctcggtaatagtggaaattgacgatttggccaacagtgtcacttagatgcagtttagtatcttaaaattaacggagcaaaaattatgggcagttaaaataccagggttatgtgaggtattaggttatgcctattttacccctagtttttaaagttgcgtaatggtgaagtaaggacatttttgtaatttccacttaaactttatctagtttaactctagtttattagtatgttgtttatggatttaatcatactaatagcgttgtaccaatattctcttataaaaagatttgaagctcggagagtccttcatggttgccgtgtgtgtaatggtgccgctataatatctcatatgttgtttgcggatgattgctatatctattgtaaggctattgaaagggaggcgcgtagtgtccttcttcttcttcaactatttgaacaagcctctggtcagtgtgtcaattactcaaagtctactatcttttttagcctcaataccacttcggcctctaggcaacaaatgtgtcatcttcttcgaatgaatgaagctcctgaaaatagtttgtatcttggccttccttgtgttatgggtcgcaataagaatgctattctgggtttcttgaaggacaagatgcagaaaagaattcagagttgggaaggtcggttgctctcaaaagcgggaaaagaggtgttgatcaaacagtggcgcaagctcttcctacctatgctatgtctgttttcttgctaccggtggaaacttgtaataagctagagggtatgatgagcaaatattggtggagttcgggatctaatcaaaaccgtggggtaagttgggtgagttggaggaagttgtgccgccataagcatcatggggggcttggctttcgacatctaagggatttcaacttagccatgttgggaaaacaagcttggaggttaattacaaatgatctttctcttgttagtcgggtttataaggccagatattatcctcagggttcttttctgagtgcttctcttggaccgaatcctagcttcatatggaagagtatttttgaaacgcaagctttgattaaagagggagcccgtcgggtggttggtccaggtacgcacattagtgttcaatttgatccgtggctcgctgat

SEQ ID NO: 225089 - DNA, 2534 bp, Cannabis indica
aaaaaaaaaaaaaaacaactaaccacgtgaggaaactcttgaactatagagtcgagaactacattgtacttctcgaaagatctttcgacgaggatataagactgaacctcatctagacactgtaacaggaaaaaactaattaatcagattgtacataaaaagaaaaatgatcataataataactcatttacattattaaaaacttatattttagaagagtcaaacacaaacccagaaacacacttattttagagtaaaatgcgggaggaagaagttgaaggaaggaaagggatgagggataattggaaggatataggcagggtggttgtgtccaaggatttagtagggaaagatgtgattaaaactgcaatgtagaacttaccaacaagggactaatttgcaaagctttatctttcaattcaggctgaattttcagctggtgtgacccaatttttagttgctgagaattcaaagcctccctggacttctcatttggaggtttgaagcaagaaacggtgtcgacaaaccaatagtgattgtccttcaacttcttcacctaaaaagaaaaagaacgaaaaagagagcagcaaccaagttgaccacagttagaacttaacaatagaatgaaaatgagaaagataacgaaatgagagagttaccagagaaggtggaagatcacaggagggagaggcttgttcaatttcagtgagaagtagagagaaaggatcccaccaaagagagggctcgacagacttagggttcgccatggatgggtcttgaaaagcttcgaaaaggtaaaaccctctctagtctctgctcacttcaacaagggtttttatttctatgggtttcgcgcttccgcgcctctcgtacgaagttttgtcaaggaaaacggtaacaaagaggttttatcaaaccgcacaaacagtaggcaccgcatcacactgcataaaaaatattgttgattttgcttttagccaacgtcactcggtcaattattaaacaattagaaatgtaataaaaatagaacaaaaaccaataaacgataaaaaaacactagattttgaagaggttcggtccctttaatacggtaatagcctactcctctttgattgtattaatttgagaacaacgaacacagtattttctctctcaaatctcttacaatgaaatctctgagtaattctcttagatctctctctaaaacgattctttcgatccctttttcagtgaagctagatcactatttataggggcttcatgtatgagtgaaggtttcccttttgcttacaatatctataatagaaaagaacattcattacataaatagaatacacaaaataggggattgagacagcctgccgtatccctctaactcaatcccatgattgtggggattgtcttcgtgcttaaactacacgatatcattctgaagtagtcaagtcctgatgaatagtttggaaagcctaacttgctctatgttcgggtagtctgccctccctactcgggtaagtagacgttatgcgtgcagatgcgctacatgaagtctgttcaggatattcatctctgccgagatgcaaggaatgctggacacgtgtcacctgcatgtgctgtcatgtcatagtgcaaaaaatgggataacatttgcctcccaagtctgcgcgggacctttgaggtcgcacgtggactttactcgccctgaatccttatttgaacatgtggcacgtgtttgaagcgtctgttggcgatccgatgtgactctgaccaagggtctcttcaatttttcagctcattaatgctgattgacctatacatcgaaccacgcttaaaaattagcatatgttttaacagttaccattcaggtaattgagtgttccacgtacatttttgggaggaattcgaggcattcaaattttaaaatgataattttacctcactaattagcttataaatagggcagttaacgcagatttttgttaactaaatttgagcttcacaataacgatttcacacagaaaaaataaaagctataaaaatgaaagtatgaacacaaggttttttacgtggttttgtagttaaaattctgcatagtccacgagtcaatcttattcaaatttctgattgttttctcaggacctcttttgtatgagtttttctcctcccttttttgatcttacttgccactatttatagtcatatagtgagtcgttaattacaaagttgactgtaatctttttacaacaatcatcccctagaatcatgggatttgattacatatcacgctaagtaaatgcagtttttatttaatattcacacagctgtgaatatcccgcttttattggaccaaaatgaacgcgtattaaagatatacggtaaccttatctcattgggatgcctcgttgggaatggagctaagttaactctgatggcgagccggagctcgtcatatatcttctcgaggttcatattgcttttattttaattctgacaactacagtttctggtgtcgagatgatctttctcgcatgcatgcc

SEQ ID NO: 225090 - DNA, 2664 bp, Cannabis indica
tatttacatagcatggcatgcgcaatagtagataaaatgttaaaaatccatccaaatatcatataccaatttaatttaataattattataaaatatcattaattactgtataatttaatttaataaatattataaaattgacaccagtaacttataagaatgctaatgtaaaaaacaagaaaagcgtttctacactatgttattttggtagtagtcatgtcacatacatatgccatatttattgatagtgataaaagtccaaatccaactactccaatgaccagaatatgacaacatacatatcataatttaatgctaataatatccaaggacctagattcatgagaaatagtaataacctgtctcctagtagccatccaagttgacctgacttgaaatacctttgtaaacaacaacaggaccttcaattcaagtgtagaaactctcaaggttagtttggattattatatagtgcagaaacttacactaaaaggcttttcattgaatggtttatgtaaagaaaacaagctatatatggctagactactgagatatgtaacaatattctcatgttttatcttgatgcagtctatttcctcttcttcttcttttatgtttaagcaaggtcaacagctgagatcttcgaatagttctgatgaagtagtttcagctaatggtgtattcaaactaggcttctaccaccctggctcttacttgtcaatatggtatagaaacatagaaaagaatccagaagtaatttggctaggaaacaggtatccaatcccagacccttctgctgttttcaccttggattttgatggaaagttgaagatcataagcaaaaaaggccaactcattgtgctgaaccccatgcagaatgttaattttggtaataatgtcactgccagtgccactttaatggactctggtaattttgtgttgaatgaagtattagctaatggaatagtaggaaaggttttgtggcaaagctttgattacccaattaacacattgttacctggaatgaaacttggtaagaactttgaaactggacaaagttggacactttcttcttggttaagttggttagtactcacaccaggagcttttaggcttggtgttgatccaggtggcacaaaccaattggttctctggaaaagagaggatgtttactggactagtggggtgtggaaaaatgggagttttcagaatgctcctgagcttactaggagggctgatttattcgagttcagttttgtttcaaatgaagaagagaagtacttttcttacaaagcaagaaatagctctattgtttcaaggttggaagtgaacttttggggacaaattgtgcagtatgtacttgccaaagatggtacttcttgggaaaacactactttggttagtctatgcaaacatggtaagaattttccaaatctagttgagtgtgtagaacataagccatccacatgcagtagtaacagttctgaaatttttgtgcccataagaagctatgctaattcgactaaatcgagttacatggattataacacaaacatatcactcatagattgtcaagctacttgctggaaaaattgctcttgtattggttgtgtaactcttcatcagaatgggactggatgcttttacatgagcaacatatctgacgttttacttgatgaacgctctgggtttggtttttaccttgaatctcggtttacaacaggtaaatattttgttgtaaaaaacaaaatataagagagttgattattttcctaatctagtttttagtcatttgaagataaaaatgatgatcttggtggttgtctaggagggacaactattgtaggaggaacaaagagagattcaaaaggaggcaagaaaaaaataaggtggatactatggtgcatcatagcagccacagttggtctcacaatattattttttggctatttgatttacaggaggagaagaaaacttaggctgttgcaacagacaggttagttcaaaagagttgttacaatcaaaattagaattacatatacaagtaaaagtagaaatttatattgtgtctataagcagaaaattcagaatctagtcaaggagagacgtttcttcagctaaggtgtcatgttttgagttgtgcagataagcttagaagaggcagaaaaggacaggattatgagttgtttagtttcgctgatataattgctgcaactgataatttctcacttgccaacaagctaggagaaggaggttttggaccagtttacaaggtaaaattctcaagatcatatataataaatcaggtatcaacccaagtgagcttatccaatgaataaattgtaagtgcagggtaaattagcagatgggcaagagattgctgtgaagagacttgcaaggcattcaggacaaggattagaagaattcatgaatgagataacactaatagctgagcttcaacataccaatctagttagccttttgggttgttgcactcatgcagaggagaagatgcttgtatatgaatacatgccaaataaaagcttggatttcttcctctttggttagtttgtaactagttaaaattttatgcataaatctcttatattattattctttttccttatcaatatatggatggaatattacattcaactgcagatc

SEQ ID NO: 225091 - DNA, 3793 bp, Cannabis indica
cactatggatagggaagggatgggtaatgcgtatatggatttatatggcctccagaaagcttaccttgatgcactgcttcctcaaaaatcccagtttggtgttccgtacatgggtaagtccagcagcttgaatcagggttactatggaaatcccggatatggtcttggcatgtcctatcctggaagcccattggctggtactcttatgccaaactcccctgttggatctggtagtcctgtcaggcatagtgagcggaatttgcgcttttcctctgggatgaggaacatggcaggtggtctcatgggaggttggcacgtggaagctggtgctaacttggatgaaaattttccatcctctttactggatgaatttaaaagcaacaaaactaaatgttttgaactttcagagattgcaggccatgttgtggagttcaggtaggctctattctcttttatctcaaccctgtgcacttcattgatttgacctggctttcagtaatttaaatatcttgtctctttaaaacagtgcggatcagtatgggagtcgattcattcaacagaaacttgagactgccacaacagacgaaaagaacatggtttttgaagaaattatgccacaagccttatctctaatgacagatgtgtttggtaattatgtgattcagaaggtaattactagatttatttgcattttatatgtccaaattgcagtgtaatattcagttattaatgttttgacttccctttatgtggctaacattaactgttgacttagttttttgagcacggaactgcatcacaaattagagaattggccgatcagctcaccgggcatgttctgactctaagccttcaaatgtatggctgtagagtgatccagaaggtatgtttgatgagatgggatatattaaaaggatcattcatattttgctagctgagatttctgacatgatttgtagtggggtcctatttttccatatcaactcccacctggtgatattgagttttttttcctgtctaaattcatctattagaagagcaatgatgttcctcgtatatgtacattccagaaagtggaaatatcatttgtttaggatatatgtaattccagtctttgtaactaagaaaatatgcgataatgttatgcttggagaaatgggttacaccttaatttacatggaaatttggcatcttatcttagtacatgtagctatataaagaattgtatggtttttaagttgaattgttcctgcccgtttctggtggatggtggttgttgaggtaaaagctgtttataaaatatctaatgttgcattaaaattgtgttttgctatatatgttcaggctatagaagttgttgatctggatcagcagacaaaaatggtgtcagaactggatggtcagatcatgcgttgtgtacgtgatcaaaatgggaaccatgtcattcagaagtgtattgaatgtgtacctgaagatgctatacagtttattgtttcaactttttacgatcaagttgtgacactgtcaactcatccatatggttgtcgagttattcaggttaagaacattctctttaattaatttcaaccacacacgaaagtgtatatttatttgtagattctgtatgaatgcatagcagatactttatatggttttttgcatgttaaagttgcaaattaataatgattattgttttgatctaacagagagtcttggaacactgcaatgacgccaaaacacagcggttaatgatggatgagattttacggtctgtttgcatgttggcgcaagaccaatatgggaattatgttgtacaggtttgtttgttttttttttcatcgttttattggatgtcttagctctgaaatgtattgcagctgaccctgtttggatatgtgttctttttcttttgggctaaccgcacatttcgtagtattaaatatctgctcactagttttgcaaaaatgactagttaacggaacgtggctttatgacttttctcattaataatggctttgttcactagctttttgattgatacatttccatttacagcatgtcttagagcatggaaagccacatgaacgtacatccataattaaaaaattaactggacaaattgttcaaatgagccagcagaagtttgcttcaaatgtcatagagaagtgtttaacatttggaacacctgttgagcgccaggctcttgtggatgaaatgctgggttccactgatgaaaacgagccccttcaggtttgacaatttttatgtgcacagtgcacaccatctttaatccaaagaatgtgttaattcttatctgggcaaattttgcttttccaaaaataacatgaaaagaaataatgtaaaatgtacaaggcttgcttgctttctattagtagcactggttccgtggaatattacatttctcatttttgagtgattgaggatgaaattgaatgattttattctattatgcacctcctctctcatcttacccttttttgtaacatttatattgttttacaaggcctttgttttgccatggtttcgaggatttaattgtgattgttttgaatatatatttaatttcactgtggccaatcttgttgttgtcttttaacccattcttattttggattttgtttcttgtgactttgttttaggtgatgatgaaggatcagtttgcaaactatgttgtacagaaagtgttggaaacttgtgatgatcaacaactcgaactaatccttaatcgtataaaagttcatctgaatgctctcaaaaagtatacttacgggaagcatatagttgcacgtgtagagaaacttgttgctgctggaggtactttcaccaccctcttgttctttatcatactctttgtttgcatatttcattcacttcaaaaaaataataataagttattattccctaataagttattattccctttgtccaagttttggttcaaattctttctctccatctttagtctgcagattccttagattttaggcatttgattgatcatggtactttctacataactgacatggtgatctctaaatcttttgcagagaggaggattagcattctggctccacatgctgctgcagcagctgcagctgccgctgccgccgccgccgcggctgctgctcagacaatggcataggaaatgaagttgttgtacagctaactgaggatagtacgagtgccctctctcttttttcttctttttcttaatgtctagtaaaagctccgactattatattctatggaatggacggtagctaattgaaaaataaatattgttggttgtacctaaacctgtacatttttttagtttgaggatatatagctagagtcaggctagttgatgatgaggctcagattgtgaacacacacacctgatgccctttgcagaggagataaatttagtgtacaagtttcaagggtgtaaaaagggaggaggtagtaaattatgtgatcgtgactgtacaaaatgttctcaggtctagaatatgcttgttttatgggagagtcctgaatttttcttatgtatgggattcaatttttttccccttaatttaagaaactttttccctttcatttattatctgtggtatatgcatgagctgtgagtaacatgcaataatgatctcctcttgtttactttttcgttattaggattaatatatgtgaatattctagtcatttacgaacccataacttgaaaaagagaagaaaaaaaaacaatttgtaatgtcactaaaaggtataatgatgcttttgcgttctaact

SEQ ID NO: 225092 - DNA, 3797 bp, Cannabis indica
gaccagaccgtaaccgaattttcggttccacgtcatcaccgaatttggcggtcggtttcggtttcggtttttttgacacggcggtcggtttcggtccattttgttatttaacaaaatagagggtccaattgataatttttgtaaaacacatggtctaaaataatatttactttttttgtatttttaattgatgcttattattagaataaaaaaaaataccacaaaaaaatgtcataacatagtattatttacatattctctttcttattttttttattattattttatcatattaagcaaatttgtttatttaatatatattaaataattatataatattattttaataatttctagagatgtttactattagattattttaaaacttaaaaataatgtagaccaaagataaaataaaataatataattttaagtgatgtaaaaaattttgtacactcttagagtttgtttggtacgccgtattataccgtattatattgtatagtattatattaaattatattttatgtaatatgtaaaactatatgtggtattaacttttatggacatttaaatatataatattttagtataaattaaaatttaacataatattatataaaatataatatataattcaattcaatataatacagtgcaattcgagccctaaaaaaataccactattggagatgctcttacacatgacaaggataccaattaccatagtcacccttaagcatttatcttaaaatccacactatcattttggcattttctattaaaaactcaaaagtaacttatcttttttagctatttaaattaatttttatactccattgagtctttcttgtccatcactttctccacttcaaaaacgctcatttcttttcccttgtttctcatggaatcacattggttgaagttgaaacatgttgtgacttgtttgttagctctgtcagtgaccttggtctctgccaaaacaagtggtcactgtaattttccggccatatttaactttggcgattccaactccgacaccggtggcttgtctgccgtgtttggtcaggcacgttcacctcatggagagtcattttttcacaagcctgctggtcgttactgcgatggacgtcttgtcattgatttttataggtacattaataatcttcttcattaacttttccaaactttctcaggaaaaaaattagaccaaaagggtacatgaaagttttaatttgttagtagtaattatggtcaccaccgacactaataaaaattacatgagttaatgaagtaaataagtgtctatgaaatttcattgaatttgaagaccaaaaagaccattttgataatttaacttgttgtttttgttgtttttgataatgatttttcagctcagagtcttggattgccatatctaagtgcatatctagactcagttggtagcaatttcactcatggggcaaactttgccacagcaggctcaaccattagaccccaaaacacaactcttcggcaaggtggttttagtccaatctctttggatgttcagttcaatgagttctatgattttcatagtagatctcaaactactcggagccaaggtcagcaatactaataatatcatttatctggctggctcatatataatatacatagattttagagttttaacagttagaatttgcaggtggggttttcaaaaagctattacctaaggcagagtttttctctcaagctttgtacacatttgatattggtcagaacgacttaacatctggttacttctcaaacatgaccacatcccaagttaaggcatatgttcctgatgtattagatcaattcaaaaatgttgtcaaggtaatgtgaccaacttttttgttttgttcaataatgttttttttgtttttgaacttatattatttaatgataatgataatggtttttggtagtatgtatatggtcaaggaggaagatacttttggatacacaacactggtccctttggttgtctaccatacgtcttagacaggttgccagtggcagctaatgagattgataaagctggttgtgccactcctttcaatgaagtggctaagtttttcaaccgtggcttaaaacaagttgtggtccaattaagaaaggagttacctttggctgcaatcacttatgttgatgtttacaaagccaagtactccatcattagccaacccaaaaagcacggtacattacttacatacatatattgagaatttttgacgaagtatttggaattcttaacaaaatgttagattgtgaaggttctagaaaggtcattttttgtcaaaaattatcatctatcaattactcatgatagattgttggattagaatcacaagtttttgttatactattatgtggagtgattagtcaaaatacacttattatgcaaattgtacataaaaaagaaagaaagaaagaaagaaagactatttcaccaaacaaaagaaacacctttattatgtgaaagggattgatgcataaagactaataatgcaggatttgaagagcctttgagagcatgttgtggtcatggtgggaagtataatttcaacaagaacattggatgtgggggcaagaaaatggtccatgggaaagagattttggtgggaaaggcttgtaaagatccttcagtttgggtgaattgggatggagtacattacactcaagctggtaacaaagggatttttgatcagattgtaggaggagcatattctcatccaccaattcccttgaacatggcttgtcatagaatcaaaaaataaacacttgttcatgtgtactacttaattgttgctttgcttctttcttttgattcaatgcaatttcatatgaaatctgcctatgaaattggatgcatatcaataccacattgtccctcattgaaaaacagagatttgaagaccaacatgttaagtcaatcttataaaatcaattgaattctacaatagctttcaatttttattatactttcaaagctatattacagtgtaatttataaatacaagactatgaaatttcttcattcatatatcctctctagtttgtctaatggaatataattttattaaataaataaaaagaaaattacattttaaattttttaataaaacacaagttagacacgagtatagtgctatattcctttaacttctattaatattatgtgaagttttttactaattatttttaaatttttacgggtgatattatattattattgttattattattttaagaatttttaacacttgtgttagtgtattcatgctcacgtgtcatatatttgggcttgttgtgtaagtgttgtgtcgtgcttaaacttatttcttttatattgtgccatgctatcgtgttgtgtcgtacctaaatttatattttttcgtatcggatcgtgttgatttcgtattgtgttaaaaaattcaatctgtatttatagctcttagccgatattacctctaattgtaatagttaatttaataaaagaatatacttgtttggtatgataccttgtattttgaaaatgtgcatagtatcttaaattcaaatttaatcaatttgacaaattcatttttaattatatataattaaatttaaggtacttttttaatcagttttttatttttaaaatcgaaaaagtaaaaatattttcaaaaatatattctataaaataatttttgcttttcaattttttaattgagaatcaaaattttgaaaataaaaaaaaaaatcactttcaatattttttaaataatttt

SEQ ID NO: 225093 - DNA, 4642 bp, Cannabis indica
tttcttatttttttttttatttacagttttaattttttttaaataatttacagcggtaaaagtataatttaaatagattcttgtaagtgtttacaactacgaaaatagagttgaaacaacttcttgcaagtgttttaaaatttaaaacactatcacaaatgtatcaaattaaattgggtaaatactattttgtactctatgttttgtaaaagttatcaattagactctttattttgttaaatgacaaaatagactctgtttttttcaaaatggtacaaataagactctgaactgattttttgtcaaaataaaatttaataataatccgatctaaaggtgttatgacaaaactgtttatattttcagtatgagtttgtgttaagaattgccttcaagctggttatattaaaaaaaaagttatcaaaaattaagcttaggattctattttcaccattttggaaaatacagaatctattttgttatttaacaaaaatagatggttcaattaataacttttgtaataagggtccaaaatagtatttacccaattaaatttttcataaaggttttgaaatgcacatcaataaacatcgaaaaattatattaaaaaacacaaaaaaatcatgtacacatagccgtaacaatttaataacaattttgttcgagttcataaggagcgttttggtggcaaccagaatatcaaattcaacaaatgtctaataaatcaaaattttattagcttcccactctttaattttatttgataataaataataatcttaaacctttttaacatttagcttcacattcacttaacataacacccactatattctactcctcccaaacccaactcatataacaattacccctagagattttgggtaatggtaaatgtacattaacatggccaatgaacttatatcaaacctaatgatatttgagaactcgtactagccccacaatacaaaaataatagtgatgattggaaaaatcatatttattgaattgaaaaatagtagagtaaaggtagataaaatcaaaatgggcagtattatttcctcagaataatgcagatatcacaaaactcttcttgataaatacaacccaaatataaatggatataacaacataggcctaaaccagttataataaaatgtacacacaaacagaaggaaacaaaagatagctcactgctcattgaaagaagagttgaagttaaacagctacacctaaataaatttataggacaaggaaagcttcaaaaatatatataaaaaggtaaaactaagtaaattaagatcagctcaatactacagggggaggtcaataatatggtacaaacatacccagttgggtaaatttatctggaaagggtcacaagattcaactaaccaatgtagtctaccatcaaaatccactgatgtaacctctgtagaaagttgtcctactacttgaatgaatgtaccaccacatgcacatgggagttccaaatatacaaattgtttgggtcctggatgcactaacactaagcttcgtcttcgtcatcgtcacccttgtctccatctttctcttctccatcgtcgtcattaccagcttcagcattgtcttcttctccatcatccccctcatcatcttcctcatcagtcatgctatttatcacatcggtaattatgtccttcacctctgcttttctatgcattaaatccacaccaaagtgggtacctaacaaacattacatgtgtaaagtgagctaaagatacagtaaatcatatactttgttgaaacaaataaagatgactcttaccgagttgccttagaatatctgatagagttgcctgcatcagtttagaatacaaaaaaaacaaattgaaaattaatagtggccgtgaaaatataaccaagccatataatgtcagtaattccacaaaattacttacagtattgaaatcaacttctttcagaatatcaacaattactgcatgcacatctgctttagagggctctcctttggccttcttgctacttttaacttttcctagttcagacataaatgtaaatgcattaggagaaatgtacaattttaacttatgcacaatcctataaacataaccagattagcaatatgtgaatataatgcttagcagcaatacttattactcaacatcaaaatcaaacactacaaacaaaaccaataaatcaaaagaacaagcaatgaggctacatcccaacattgtgaacatctaatcaaccaagacacataagaattaagactaattgcagaggtattttaaagtatggtaataatgatatgcaaagtaccttgatccttagctgaaacctttccagaggatttgctggatgatttcttgcttgcacttttcaccttatcacccttcgaactttccttttcaaccttctgtttcttagatgcagacccctttgacttggttagagaaccagaggtctcatcagcatcactcacacttttcttcgaggaagatctagatttctttgtagagtctgctgatttcttagcagattttacaggtgggctctttttaacaggtgtagctttgtccccacttttatcttttgagccctccttcaccttttttgaagattttttgggacttgacaactgctccttcggtttatcttcctcatcaccagatttttcctcatgattgcttgcctcgtgcattgcatcatctccatcatcttcttcatgagaatcatgctgtgcatctgaagattcagccttatcatcaatctcttcttcttcaactttaggcgaactcttaccttttttcccactagatgcttgtttttgtttctaaaaaaaccatgtaaaaaattcaagaaaatggaaagtgacaccaagtaaaacatagtagcatagtacctaagtagatgcacaaaaaaccaaagaccaaaatagcttcttctaaagaagaactaggtgagttgaagacaaaaatcaataaaattaaacattgtaagagtaagaaactgctagtgctaggtttcttaagaaatggctaaatttcgaagtaaaattttcagggcaaattccaatcgaaaaagacaaacataaaaatatatgagtggtataagtgaagttacaatcattcagtcaaggagttaaacctttcatgaaaaaacccaaaaatatcataacaaactggtagaaattactgccaagtcagcaagttggctaattaagggggagggatttgagtggagtaaggtgtatgctatgtgatacaccagcagggaattagaatagagggagagaaatatttgcaagtgtgaagaaattggtaagggttataacccaaagtgggagaaattgatgattttagctatttgataagaaattcctatcaagtggtttcctatcagaaaccaatttcaaatttcagaagtagaacttttccaaaaaaaaaataacatagttcaaaagtagaacaaaatgggcacagcagtagatcaaagttaagtatatgatagttcaaaagtagaacaaaatgggcacagcagtagatcaaagttaagtatatgttcaaactatgaattaagacggaccttggctggtaattcgggagatgcttctccatctgcagcactaggactttttccaggtgtggccttcttctttcgcttttgacctttctgaaactcagataaagaatgaatattagcaaaacttaaaatgcaagtaaaacaagtcatccctattacaaaagtataaaaaagcaagacacctggtccttatcagaaagcaaaacatctgttgtagcatgtggagattccaaaaactccagcaatttggcagagacctcttcctggaagagtgagaagttgtaagataactggaatttgaataaatatgtgcagaaacatttttatgccacactaaccttttttgtcgaggccttactaattggaatatttagcagatcacagaaatccatcaatttctccttgacacatttgtcaagcttctccctaatttttgccctatgtttttcctgctgagaacataacaaaccagcaaaagaagcaaacaaaaatattagctcatattcttttatacagcagaaaaaatataagtaacattaaataaatacaaatagggagaggcaacaatgatacctcagtctcaacccaaacataaccagagaactggcttatattcctcttcaaagtgtgcacctttacatgataaacaccaattcaaacacaatgaacattaataaagtgaatttataaaggacacaagaaagaagcagaaaaaaagcacccaaaaagcaatacccaaaaaagtgatcacctttgctcttttcccgaatagtattgtgtgaagtaattgaaggttgtcatcaccttttctctttcccagcttgaaagccactaaaacattttacaatatcagaaaaaatagctagtctattgtaacaatgaatttgaatagagtaaataacactttccagacacatattgcaacaggggtcagaaacctgcctccctgaaattacagtaagaactaagaacacgttaaatggaaaagatggtttacactttacacatatgaatcccttgctaaatcatcagaccatggtctttgaaaagtgtatca

SEQ ID NO: 225094 - DNA, 2842 bp, Cannabis indica
ttttaaattttctaatccaatctaatccgcacaagtgcggatatccgcactttgcggattagattggattagatcgtgcagattggattggatcggctattttatgaacacccctattgataaccctaagcatatggtataggtgtgtttataggactatatttttaagcttatctatattcaatccaattatatattaaacgttagattttacaattcgatctgatcaaattaatttcagtcatccaatcaatccaacatcattggatcagttctatctattgcgggtttatctaatattttagatcaagtatttattggattggatcaaatgtatccaatattttagatccattatctattggattgaattggatctatttactaaaaaaaaagtataacaattcaaaatctaattactcaattaaattaaataaaaatattaattaatttaattgaatgttagatatatattagattttttgagaaccaatttaagaaccaattatatattaaaaaataatatacaatttgatgtatcgatttattcaattcccctaggtacaagtgtcaagtctgtattgtgtacatttccatatttttccatattattatatgtttagatggttcaaaagtcatgggtcatgagtctaacttattcttttcctgtcctaacaaacaagtgaacaactattctttccacttttccgagcaaaaaaaactatttttttccctttagtaacattcctcattctcttatatctttgaactttttcagagttacccacagaaatatgtgagaactggctcatggacttcttctgacaacataaggatacaaatgcgatgaagtgaatataaattatattatatatttaacaacatcaaaaaatatttttattgaataaaataaaatgggacataaatgattagggagggtaaattggagattagttaggtggaaaaaattaagttgctgattttgacttctataatacatggaaatcttttgagcttgactcttaaaattaattataagagtaattaacattttggatttaattttttcttttttaggcaatgaatatgataatgagtgtaagtctgatggtgctggtgggattttagtccaccattaaaggaatggccaaagctttgattatagaggttgaagaaagtagataatgtgactactttgtttggtaataaaatttgaaagatatatttatatacatatagatcaaagaaaaaagatgtatatataaatctatattacttgtttttaagatttgttcacaaatataactttaactttagttcaagacctaccaccacatgttgaagcactaaatacaatttgttgttagttcatgaattgatgaacatgataataattgcttctctatctctctctcttgtatatacagtattttgaagatcacaaaattaagtttttttcaaatgtaagatgaacattcaaagcctctcaaaaccacttattccatagtctttttttttttcttttttttttcttttttgtcttgctccatagaattggtcaaagagaaattcattgataacagagatattcaaacattatgtagacataattatattcattaatatatggaacgtacatatttatttttcttaaatgtttaattattttcatcatgaatcctctctggctttcttccaacaatatgcaagtaacaaaagtagagtctttgtttgaatccttattacaatttaaaaacaacatttagaatatctaattaaatatttaattaaacttaaggacataattctcatttctttaatggatttttttagtactttcaaagacataaattaataatgaacaggaaaacagggatccttttttaactatggaaacaggaaatacaataaaccaacagaacatgcttgccaatatgtaatcctttctcttttaccatgtgtattatatatataattatatattatcttctttaatatcttaaaatataaataattaactaaaatcactgtaaaggcacatgtagtactttctaagacctctaataaaacactgagatgcttttcagtcaaaacttgttggtttactgcaataatactaaccagttggacatatcattgtttttttttcttctttgggggatgatgtctcatgtataatagaacacttttcttatgtttttttttcttctctcttttagaatagaaaataaaataaaataaactaaaaaagttaaaaagggacaaaaagattaccataaagttattggaataatccaagcacttcattatatgttgatacttcaataacaagcaaaaaaagaagccaagagcattgttaaaagggttaattgtacaagtaaaagagagttttagagctgagacagttgtatcaagctgaagattaggtcctcagtcaacatcaatcattaagtaaaattggagattaattaaggtaccacttagcacttactgtatcctaattaataagtttttaacatttatatttttatttttaaaagtagctggacaagattacacttttagcttcatctttttgtcattagagaggatgcctagtctctaatacaggatctctaaattaaaatatcattgaccttttcatggtttattaatattccttctagaacaagttttatttatttaacagtcttaatcctctacataaccttgtatttgtcatcatatttgtttatatctacttcactttcactaccacctgtcttttatttttatttctctctatatatatatatatatgtttatactactactgttactgtatacattatatatatatata

SEQ ID NO: 225095 - DNA, 3222 bp, Cannabis indica
tttttttttaaatttttgatttttatgtatatttttcttttcttttttagagagaaagaatcttacgaatgaactttgcgacgtggaggtggtcaattggcttgatgatggacacaatgcaagaaaggaaactgtaaaaggcagcagtgcttcacgtgcttgtcacgtgatagagatatagatccggcgcgtttcgctgtgaaacttctctacttctctcttctcttgcattttcactctcttacacggcccacagtagattcaaccgacccaaacttatacgccttcgccggagtccccgccggacctagatctctttgccggccagttttcggacttatcctcctctgagaaaacggtacgttcacatccagatcgctagtttcctctctttctctctcactataaagcttggggcttatgtttgtatttaatatgcttatttgggattgctctcacatatagtcgatgagtgatttggattcaaagatccatgggagctttctaggaatttggtgaattagagtcttgattgttcggtttatcaatgtttgaagtgacaatgtttgtgatttgagattgaaatttagtgatgtatgagttattgaagtcttttagggcgtaagacggattcatttgaagtagttttatcgattttcaatttcgttatcttttcagtacaggcgataggccaatcaaaagaaatgattttttttttgatggcttaggtttgagtctctttgattggtttttatatattccaggctttctgaatttttttggtttccctctttgaagaaaatcgatgcaagttatgggttggattgcttttgtttttctttcttggctcgtagggaatgtacatttttattttttaaaaaggaaagtattgaattgaattggctcaatggaattagaggataaataatctggtggtatttttaccatggtcggctgtatatatgaaactaggtataattgtagaatttagaacctgctcgcaaatgatgatttctgttttgcttttaaaagtgaagtggatgatggatttctatcgaacacattttgaatactctcaacctttacgtttcaaccaaaaaaatatgttgccaaacttgccaaagcaaatcctgtgagttttatttttttcatatcaaaatatagatgttgactagaaaaaatgaagatgcctgactacttttctcttgttcataccgtctgttggtgttagtatcttgattcttagatgtgttgcaattgattttgaaagaaaataatgttagcttctcctgattcaaatatgcttctttcttttatgcgtgcatttgtttaatttcagagatgtataacaatgttcccacccagcctggtgtgtcaagaccaccggaaatctctcagcctaatccctttgggaattcattttatggggctggttcagggcttatccgaggtggtttaggtgcatatggagagaaaattttagggtcaagttctgagtacgtgcaaagcaatgtaagtattgaattgaaattgttatttgagttctagtgtggtttatggttaaagtattgaagaagaaaaaatgtgaatacttgcaagctgaatgctgatacgagttgatgactgaatatacctgcaatttttccttctccctttttttaatatctgaaacatataattgttaaaattttaactcaaatgtatatttcatgtaccaaagaaagaataaaagaccgaatacttttgttgtcaattatttttttggaaaagagaaaagaggccacttgtcttagattggtctctcccctttataaatatgaaaaccctcacttatggcagaggaaaaccgtggttacaataaaataattttcgtttactactaacctgaagtaaaccacaaagcgaaacacagaaacaaagaaaaattaaatccatggatagaacccagcccgagtttcttacgcaagagacttccactcaattatgaagtgtgctttagttttatgtataaatttagcttcaaaattcttttccaatttctatatcagaggcattcagtttgtttttggtgtcaaaattaaatataaaatagttttctaaatggtaatttatttttagttggtaatcagaaagtctattgttatctgatttcaggatttgaatgtggattggggttcatttttgtaatttgcatttagggactttcattccgtggcattttttttttcattacttaattaacagaagttatatatgtgttaatagtaaaataatttcatttcatttaggaaggaattctgtaggaaagaatgatgacaacgcataggagtctagtgcttaagttggtactctgatttgcagccatatgtgcataattacttggttagatgtgtgtaatacacacacatatagatacttatgatatcgttgttatcttcctaatcatttaaagggaaataaaaaaaaattataaaagatcatgattgttcaagctatcacagtagagtgttttcttatggtaccttagacatcatgctcatttataacttgttgaagttgtaattataacagattagcaggtatttctctgatcctcaatactacttccaagtgaatgaccaatatgtgaggaacaaattgaaggttgttctattcccattcctgcacagggtaagtactaatttctctcttctttttgtacattctgcctttatcatgatagtcattcctttgtttttttttctttgcattctttctgcctttttcttttaacttattgtttttctctagggtcattggacaagaataaccgagccagttggaggcagactttcctataaaccaccaatttatgacataaatgcaccagatttgtacattcctttcatggcgtttggtacctatgtggttcttgctggcttctcattgggtttgcatggaaagtaagtactatgaagaactgattggttgtcgaatgaatttagtatggttgtttcttaacccttgctggtacaaccacatatgtgtgcataaatgatcaaacttatagtttgctctctaatcacctctgttagtgccttttttttcttctttttaatacgcggatgccaagacaacaattacaatagtagattttttgaagtccaataaagaaggcgatggaggggatagaattttattaagcttaataaagcagcttcttaccagggaaattatttcatg

SEQ ID NO: 225096 - DNA, 1786 bp, Cannabis indica
ctaagtaatttaataaattttaatcacaattgcatatctatgagtttagataatttaaaaattatatttaaaaaattattactttgttataatatggtgcaatttaaactccttttatacaatttaaaattgtaaattgcaccaccaccatataatttggcaaaaatagaaatcataaaagatttaaactgtacgatgtgagcgatttgatcacccgtaattgtgattgcataccttaaaataaataataaattattatagattcaaattaatgtatttctttctagagaaataaaagtaaaaactttgattgaattgaccgactaagaaatcacaatgtaacagagtagttgaccgtcctagtcatgatatgaatgaaccacagcctacaataatgagaagcagttcccaaccaattgtcttatgtattatagcattttccacttcatattaattagtatcgtgaaaatacaatatcttcgtcaatatgaccaacatcgatataaatatatttttatatctaattagctcttaatataaacctaaatttcatatatgactagttgtttataagtataatttaatgtacataaatataagcagttgactaaaccttatattcgcatatatgtatatcctgattttgttgcatttcaaggcaacttccatcaaaagatatagtacaccatttttttctccctatggatcatatttaatgatgtttatgatcaaagtcagaaacactcatttctccatccttgtttaagtttcttaaagcgatttttcactataaattaacgaaaaatttatatacacgtaattatataattgaaagagaaaaacaaaggtttgacagagtctcttctagccgcctaattattccacatgggatttttcttctttatttcacaattgttggatttttatacatatatgaaactgcatatacataatacattatatatatattgatatacgaatagaagtttttcacatcataatctaattaaaggagtttcattgattgcaatctgagattttctttgcaactagaagtagatttttaaaggggtcatgggaactaactcatcaaaaaattcaagtgatcagagaaaattttctgatgatttttacaggtcgtgggataattatggctatcctcagtcacctttgcctcaacaaagcccctacttaactcctcaacatcactatgcaccttcttcatcatcatcttatggccatagatcaccaaaaagaaacttggatagaaatactcaaggatttctgatgattaccattccttagatgaggttggttacttactatacatatatgtatatatgcaatttcatctcataaattaacaagtcaaactaaacataatactaatatttacatttttaacattgacgtcactatttttgacttgctttttttttttttggagaggagtcttaacctgtaagaattatatattgtttatctgtaagtatatatgcatgtcttttcatggattacatgtcttttagtcctcttaaaaaagatgaactgttgtgatttgactcaaagtcaacttcagcatatatataaaagtaagattcttaaagcaaaaatcacatgggaaaaacatcttatataaaaattagtttagcatatatatatatatatataaaaaagtaagattctaagtagaatataaggcaaaaatgtagtgcaagtaagttggtttttttggtctgcaaaagtaagagtttgaacttatataatccacaggttacctctgctc

SEQ ID NO: 225097 - DNA, 9653 bp, Cannabis indica
actcaatcttcaacactttctcaaaaaaaaaaaaaaaaaaaattaaaacataccttggccttggacatagtgggttcggttgggtgtgggtctccgtcgacgtctccgtcggcgtcttggtgattgtggttttgggtggaaagcaggtaatgggattgataggttggttttggatttgatttgagagagaaaggaggaagagagagatggttgagaataatgagaggggtattttagggtttagggaaaagtaatcctattttttcaatagttataaatattagtttagagaattaatttgggtataaaacatggatagaaattcaaatttccctataaatatttcgtccaaaaaaaaatatattaagtataatacaataattatataaattgatttagtttgaaccgttaaaagatttttaaaactataaccgaatcagagaatttaaaaccgtctaaattgatcaaatcattcacaccagattcatttagtccaatctcaaatagtttgatttaaattgattggaatttaaaacgtattgcaaaatgttaaaaagtttttataaagaatctcaattatttacagatattttttatttatttttatttttttgaaaattgatacaacaaccaagaaaaaacacaagtaattcctatagcagccaaaacacgttgaaatatataaaactacaaagttacaacatctgttacaaattacagtattaagttcataaaactacttactcttacaaaccattctatatatttttatataccaatttgagctgagcttcactcaaataaaacttcagcacaatgaccccacaaaaaactggtggggaacatgaccgaaccgctatacaaagctatacgtattaatctataacaccaatccgtaccttttcagtacaatgccaatgccgattcctgaaaccaaaaaaaaatggaagggcatcgccatttccgggattgcaatatatgattactggcttgtcgattcttcttcaaccttggaatcattcttaaccagttctttttctttagctttaaagctttatgactagattgtcgcgaaaggagtagttggttccacgagaagcaagcgagacatgacataagccaagagttcttcgcgatgagagaatgtgaagtccaaatgagcgtactcgaattcgttgtacgaaacatctacacctgattccttcatcaacttgtaatgctttcttaccattgatggacgaatcaccttatcttttcgtcctgcgactaaatcaaccgggatgtcgataaaactgtagtactcgccaacatccaatggctcaggagatccgtatatatccatattggtagctacactgccatagtcgaacattctgaatcttcccgaacgcttcatctgtgcaagatgaagcgccacatgaaatgatacccctggcatgtcattcatgttgtaatgtggtaatcctaatactccaacccaatttgagctgtctccgccgacaacataactcatcaatgtttgcaccagtcctccaacggctggatagttatggaagtcacgagccaatttgttcaaaagcatacggaaaaacctggttggtatgtagaatccaggaacaaaaggttccaggagaggagccagaagaagaaatagatactccactactgtgaatactagagtagaatcgctgtggaaaccagcaggggacagcaaaatgagtctcgagagtctatgaggcttctctcgaatcctctgagttatgagatacattagcatggctgcacctcctaaactatgagaaactgcacaaagcttgtaaggctgttcatcacttgtttcttccccagaacctggttgactaaggtttaattcagccgtttttacttcgtgaatcttccctatcattgcaggaatatcctcagtggcatgctcattaatggagtaccgccagtatctgcataaaaatcattttgtcatttccgacaataccattttgaagatgcgaaaatctatgcaaaacataattgcacatgaaagaaaataaccctatgtacttactgtcttaatgaaatacttttgtcaatgtgctccctagaaaccaaaccacggaagttcccaaggaatacatcgtatcctgaaaaaaagtaaatacttagtacaattatagtaagtattttattacataaaagacaaatactgttttttttttatcgaagaagagaccgagatcacttgtcttagactgatttcctcccaaatttattaggaaacctcacttatggtggaggaacaccatggttaactatagctgctgaataatacaaataaaaataagaagtttacaagataacagaccttgatcaaaggctgcaaaagctggtgaaccaacaaccccattagacacccagctgaaatcaacatatgtaacacattagaaaggaactataacaagcgatactcatcagactattcttaagactcaggcttccatactattctaggagaatttagtactcattaaggtgctggcaaacaaacagttcatcaactctatgaccataataatcccttcatagttactgtttgaaagaaaattccactattatcaacatcatagtccatgagaataaaccaactgcagaaaagaatagaggtttccggactatattgggagaaagatcaaaccacacattttctgtacatgtgatgttcaattaacagttttgatatgtactccaaataggattttgacactttttttttattattgttgggtagaatttcaatcccttcttgcatcaagcacattagaaacaagaatcagtactcacagacagacacgggaagcactgtgaactcgtgcaattaagggcatcatcagtactgggtttaataagtttctcagcataaataggagttttagtattagaatcaagatatgtggaatggcaaattaggtgccagtgtgcaagaagatttctcttcaaccaaaacagcttaaatgaaaacctggaccacatggccaattcacactagaacataatgtgcacctgtgggaactagtatggacttaccccatcgaagaatccaagattccatgttgtagataaacagctttcttcgaatcacgtctgcatgacattgcacaagtaacattgtaaacagaattctatatatcaaatgatacctagaatgagacagaaattatacctaggaattctttccaggagaaggacataaccatcatttgtgatgacatgaattgcttcatatgggtacctgaaaaaggtaagagaagaaaataagatgaatatttttacataaacccaggacaatggcttgaaataaaaattagcaacagaatcattacccaagttcggttattacatcctgacatgtcctagcatctgtgttcagtgcctggaaagaggcagttctttctgtagtacttggatcattttctccaagtgtagatgtttgaacagaagctcttgcatcactttcatgagcttctttatcccggctgttgtgtgagaaacaaaagcgagacactactctgaatgcctcagatggtgagagaagaaaatgcgctaccttgtgaacaatatcaaatatagcttctatgaaaatctcaatagctagttgaagatcctgtataacatcacattaaatcaaacaaataaaaagaatgatcacaatgaacaatgttttatcacaaaaaatataaatggaacagaatcttcaaacgatacctcaacaactccacgtctcttgtcagttgttcggtgaaccatatgatccttgagggtttgtatactcttgcgagaacgtagactaggaacttgatcacttcccgaagtagtggaggattttgagtcaccacaagacagacgatagaaaaggcatggaatcccaagcaggaacttaatgggaaacaaaagccacataaatatatatgtgatccatccggttcgacgcctatcataccttgaaaatgagctagatctagaggctcgtgaactctgagataatggagatgcgggacatatgtcgtcataatcttcttctcctgatgaggcatctatgcttgaagtatcggattccactgaaagctcatgaatgaaatgattgaaagaagacaccccactaaaacatcaagtacaaaaaaacaaggaatcaataacaatctgtacagaataaacatctattttccaaattaattgtaaattctactctaaggaacgtattatcagtatgctaattcaaaatatctttcagaatagaaaaagcaaatattacgtgaaactattaaatcaggtaatccaaatacagtgacatagctggagcttgcttatgaaaccaaactcatttccacctttacaatagtggactttaattcgtcctgcccattcttcacttgcatacaagtattgtcccctgctttcacccagcaagtgctaactagtaaataaaggaaaaggttcacatcaaagaacctataatatactaatcgaaacagaaaacattggtcagtacttcaagtctccaaagacaaacgtgaaaattataatcaccccttccacacaaatgaggctcaagggactcgtaaggtggaagtttcaatcctcaattccctgaattttacatgactagttcactttctaatacatcaaaatgtttcccagctctccaaaaaaaatcttcaaaataggtctgtatacaaactaaagcaagtaaatcccataataatcctcttatacatacgtaatgttttcgctaataagagaaagaatatcctcactctaaaaaagagtagaagaagtagctagccgggaaatttcctttatcctagttactcataacaagaaaatcaaatacaagcccttcagttatgaatcaatcctttttactgatagaacaagaatgggatgtgtttcagcaatcaatagtgcccttaagatcattttataaccaacaatattccatttatgcattaagtataaccagcattcccaatagatacgcttaagaagtatcaatttaacaaaggcaggaatgaccgaggcttacttttccatccagcgtggaagccggggtccacgaaaagtgggtctaagctcccagccgtgaatgccttcaaggattgtaccattgccaggtaaaaatgccaacagaagtgctgacactccattaataaaccttgcaatgttattcaaagattcataagtgattgtcttagctgacctgcactaaagacaaaaacaaaggaagaagaaaatgtcatcgattggccaatgtatgtcaaaactatatcaaaaaactgaaaagaaccataccatcattcggattactaactaagaaaatatgcacatcaattttggcagctaaaagagattaattgtaaacaaatgctgccagtcaagaactttctaatgtcagcattagtatgaagatacaagggaaatgaaatgaatactcaaaccctaataacagaaaatatataaattaaaaaactagaagaaggaaacccatttgatagtgcttgtatgtagatcctaaactggaaacattaatgatttagaatgcaatatttttcatgttgcagttaagttcaacatacatcttcttcttccagttaaggacacaaaaaattccattatagactttaatctacaatcttagagatcgtgtttgaactgacaataaaattgaaatttacattgattaaacactcaaagttctctatctctctaatccctgataagcagaactgaactcccaattaaaaaaaataaataaccttctaataaaattcaacaaagaacttcaaactaaatgatcaattccgacgacacaaacatacaagattaaaactttataaacatctttacaattcaaacccaacactttacaattccattaatgtctcgttcctcaaccttgtagcataatccgacatttccacacataaaaaaacaaaatcaaaaagaaagaagaggaggaagagggctcactctttggtgacagcaagaacattgtcaacgaaacgatgcatcatttgaggtactctgttttgttagattttgattgattttctgatgaatcttttagaccaaaattctgcagatatagtaacgagatatgaggatgaaatcaaccgaccaaaactagattttgtatgatgatgatgatatttaaatgggtacaaatatagaaaataacaaaatccagaaaagaaatgcgataaatacgagattccaaatcaaatttaatccaatccaaacatgaaagaaatagaagttacaaaaatgaaatcacctgaattgaaatcgtaatttttgataggtttttggggcaaaaatgaggaagaagaaaggagaagtttagtataacctagttttttattatttcggatggcgtgtcaatttagatattattgcgtgtcaattttctggacttaataagcacatttgtttcgaaattacaataataccctttcatctgttatgttttttttttttttgagaaaaaatatgttattattaaaaatgagaatggttaacaacaacactaaagattggggatggaatttctcccaactaaaacatatcttcattcaatcgaagaacaaatttagctaagtcatgggttgctttattagcatctcttttgacatgagatacctttactctaggaaaaaagaacaaaagataattaatattctctatcatgtcatgaaaatgagttacaaacttagtagaagataaactattaacagcattgactaataaaagagaattcgactcaaagaagtgtatttgtagttgacgctttaaggcccattgcaagctataaaacatggcagtagcctccatttcttttggggaatagcagccttgaatagcttttgaaagacctgctacaattacccataattgcaccaacagagtcacgggtagcatctatattcatcttgtacgagccaatttcaggtggttgccatttcggatggaccagcaatgaagattgtggagctggctgggtgctgcaagttttggcagcagaattctggtgtggagcagcagcctgaatggccttttgatattgggtgagatatgtagcagggaaactacatataacatctgttgttttaggcttagaaccatgcaactccttatttctttcagaccaaatacacactccacataatgtatacaatcttctccaattcaatgtcattatgtgcagcagcaatatgggaaaaaatgtcataacctttgagattacagatgttaggcataaacacatttaaatgagatttctgccatactgctttagcacgagcacagcgaaagattacatgtccaacggactcccaagcacatacacagagagaatatgttgttgaagtcgaaatcttgcggtgcgccaagtttacagtagtgggaagggcatcgttaatgaagcgcaaaatttttgactttttttaggtatctttaaagaccagaaccgattccaccattgacggttagaggttgaggaagaatcaacattcatagattccaaactctccgctaaatggtaaccagatttcacagtgtataaacctgtgtcagagtgatgccaaatgagcatatcctccctaggaataggagcaagaggaatagaaagaatatgttcaatgtccacatttccaaagtgatctttcaaaatccttatgtcccattttctatcagtcgatatgtaatgagccacagtaaagagaagatccccaccatagtgataaggggtgaaagtagtgttacccgacaaccatgggtctgtagcacatctaacattctagccatttctaattttctatctcaaaccttttaacaaaagctctttaccatcacaagtactttgccaagtgagtgaaggtaatattccttttttgctgaaaggaaatcaccattcttataatatcgggattgattagtttttttttcttcaaacatcttgaatagctacattggtaaaaagaaaaaggatgattatacccattttttgttttgaagccaaaacattagcttgaacattagagtccaaaaaaatacaattaggtgatgtttggttcatcgtaacggtaatcgtaataataatgaataggtttattatattgtttgtttttccattttaacttttgtaatctattacaatgtaatgattattatattgagtattgtaatgataattacataccaaacttaatgtaattcccattacaattagactctattacaaaaaaaaaaaaattaataataaaaaagtcaaaagtctatttttttaaatattatatatttataaaataaaagtaataaaattattttagtcaatacaaattttattatattacattctcatatcaaactaaatacaataattgggattataatgttcattctaactataaactaaactttataatcaatttttatttctattcttattccattacattattattgccattaccattccattacaccgaaccaaatagcacataatattttaaccacgagcaaaacatcccatatgatcccaaacaactccaccataaccatatcttccttcttcttaagaaatagcagcatgaatattcactttaaaactatttaactttggttttgtctaaagttcaaccctgcccgacagttgccaaaattctacagatggataaggactcctaccctgagctttactccaatgtttaaacgtgattcgagccatattgacgacttgctctaccgtgttctttctccccttctgaagaagttgattacgcataaaccacaatgtctaacaaagcattatcgctcgaccagaatcactctcattttaggcaagcacaaagatgcataaaccagtcccgaaacaacctctcatcctgcggaatatagcccaaactagcaacatgccaacactcttgagcaaaagcacaagtaaacaagcaatgcataatagactgggcaatgaaatgacatactagacagagtaaagaaacatttagttttcaactacactctagttgaaagacatacattcgaacaaaattttaggtaaatagtggcataagtactaaaaattttgagtctataaacgacataaactcaataatttttttagcaatataaatatcaatgttagtaaaagtgcaagtttcgtccaatttcgtcagccgttagtgtctttaaacaacacatattatgcttaaattttaaatcattggatctggacaaaaacatgtattgtgagctacttgtaattcttattttaataaattcaaaatgaagtatctatagatgaatgaaaattaatacaatttattaatattgtgtacttatgtcgctaaaaaaattattgaatttatgtaaatctctttgtaattgattctttcttttaaatgaacctcttagcaatgagtcttgttttataatttatataactcagtgctgcccaatgagtcttcattgggaaaaatctatgattaatgtcctctgtcccattaagcaactttactaaagattagggctcattatatacgatataatatagaggtacaactcaaaacttgaaaaaccctaaattggccgatcactcactctctctctct

SEQ ID NO: 225098 - DNA, 4436 bp, Cannabis indica
  modified_base (42)..(42): a, c, t, g, unknown or other
ttttatcgtcaaaatttgagcttaggaaagttaaatgtaagngaaacgacagttaagaggatttagtcgacttaaaactcattttcataaatacttaaaaatgacaaaagatttatgaaaacacaaatctataatttttttacaaattacaaagggttatattttcgttgttttcacattgctgctacagaaaattaacttgaaatcaatgttattttttggaaaaaaaatacaagtgaaaacctgtaaattaatagaatccataaaaatgtaaaaaaaaaaaaaaaaaatacaatttttaagattttgtgtaaattttggatgtttttacctggtgcaatgtagccaattgaccctgctaacatatttgcagtagactctcccatattctcaaaggctgctgctgctgctgcaacatttcctcctcctgccgtcatgacaagcctggaaataccgaaatcagaaaccaaagccgtcatgtcatcatttaaaagaacattgctcggttttaaatcgcagtgtataactcgaacaggagagtgatggtgtaagtatgccatcccttctgctatatcactacaaatattcactctttgtaaaagattcagatcagaacaacttgtccccggtggataaagccgactttccaagcttccattcgccatgtaaggaagaacaagagccttaaaatcaggcaaactcaagctgttatgatccttattagatttctatgtctaattctcttcaagacttgacattctctagtgaaactctttgttgaatttcttgattgaacatgtaaaactttgattgctattgttgtctcatctgaaagaattcctttatagacatgtccatagctacctgatccaactagtctttgctcatcaaaccctgcagtggctttaaataattctctgtatgtaattcttggaaattttgggattggttcagaggaatttaatcttggttttcttccaacaacttgttgtcttctttggattctaatgacacaacaaattatggtgaagaatgctgatatgaatatgagtattgagaaaagtataacaagggaatttcgcgagtgaaagaattgtttcttgcgaggacaagcgggtaccttagagattcttacacagagatgaggatttccttggtaggaaagtgaagtgattgagttgaagattccattagagggaatgattccctctaaatcattgaatgaaaggtttagatatgttagtgaatggatttcggatagagttggtggaatcattcctgataagtgattcattgaaacatcaaacacttcaagattctttaactcacctaaggagttaggaagtttgcctgtgatggaattgtgtgaaaagttgattagtctaacagcaatgcagcttgatatgagaggaaagatggttccaccgaggcgatttgaagacaaatcaatctcttgaacatcttttagcttgcttagttctaatggcaatgacccttcaagttgattatgagaaaaattgataaagattctaatttcattccaacttgagatatcagatgggattgttcctgataatctgttgtatgacaaatcaatcttgtgtagctctgagcagcgtcctaatgagtgaggaattttccccgaaaggcgattgtggtttaggaaaagaaaatttagtcttgtcaaattagctatagttgatgggatttctccattgaattcgttatgagaaagatcaagaagtcctagagcaggaaatctgtcaaatatgtttggaattggagttgagaatttgttgtgtgacaagaaaagttgctctaagttttggaacattccaatctcaacagaaatagtttcattcaaaagatttgatgtcaagttcaaaatgttaagcattttaaggtttgaaatgttgggaggaattgttccaaacaatctattttcttgaagttgtaaagatgaaaaatttggtccaagttcaccaactgaatcaggcaatcttccaccgagtttcataccagctaactccaactcaaccaagctagaacacttcacaagagcatcaaagaaaggtgtgagattggtgtttgaatcatgactttccattgagttatatgacagatgaaggtacattaaaccaggcaaattcccaacaatttcataaggtaactcaccagagaagttgttaaactcaatatctaaattcccaattgaagtattgatcaaagaatgaggaagttcaccattgaaatgattgttataaagactaagactccacaagttcttacaattcccaatagtgatagggaaattcccactaagtttgttatcagaaacatcaaatgattccaaagtggtagaacaattagagaagaaagaagatgagagtgaaccgttaaaacagttacctaagaaaacaacaccaatcaacttaggtagatggacaatgtagtctggtattgaaccttgcaataggttcccatctaaccgaagataatgaaggtttctaagagaagaaaactcttgtggaaatgatccataaaggtggttgtttatgaggacaagaatgcgaagaccggtgaggttagaaaggtggggcgagaggagtcccgcgagctggctttcgttgaggatgagctgagccacgcggtggtggtgacggtcacaaaagaccccgttgaaatgacaaacatggacggtgtggttccaattgaaaagggttttgtaagggtcatggaagattgttttcttgaaggtgagaagagatgttttatcagtggctaatgagtggcctaaagttgttggaatgaggtgttggagtaggaatagtatgaacatggttgtggtgatgaagattatgttgagattttcattatgtttgggtgttgtgtgatgattttgtgtcatctttgcttcttcataagattgaattttggctaagtataagagagaaagatatgatatggtaagactattatggaaatactatgataggttactataaatgttattgtaaagttatttttatagctatataggcactagctcctactcaaattcatggccttgttgacatatatttatttgcataattgaattgttatgtatgattgctatatatatagttacaaaagttggatggttaatctctctaaaaaaaagataaagaaaaagaaattaggtattaccatagtttatgaaagtctaaaattgtgtacagaaaaagaatagaatataagggtatggatatcctttttaactttattacaatacttttaggaccatactatgtccattaggaattataaattatagtaatttgcaaaccatatatatgatatcattgttaccctttttatatctaactttattctattaaataaaatttttatatccacttgatcataaactaaatggaaaatcatgacaagaaaataaaatcaatcattatgttgtctcttaagtacttaatctactttaaggtgactactactactagctccattccaatgtaagtcaagtaatttttactaacacaacctaaattaaccatatatattttaaacctgtattttattttagtttttcttgtgttgttcatgatgattctttgttgttgttgggtgttctatcgatttgtcgtgatggcatccttcaaccagacttaaccgaagtacttgagtttaaagaagctcttagtcagattaagagtaatgtatgaaacattgttatagtagagacgaattgtgtctgtagtaaggtaactatgcaatgtagatgagtgtcagcctttgctgcgtgagttgagaacttatttcttaatttttttaagcaactgctaataaggtgattaattatctttttgaagcttcttattaagagttaataagacaagggaaatttgattttctatgcattttttatacctaaatttgtttctcaaactaatagttatagctattgaaaaaatgggtatacttttccctaccctaaaatactcctccgatatttttcaacccctctctcttttcctcctttctctctcaaatcaaacccaaaacccacgcacctccatgccgagccacctcctccaccgcacctccatgccgagccacctcctccaccgcacaaaacccacgccgatccacctcctccaccgcaccgctggacgccatgaccaccacgaaaacccacgcgcaggtccgattcaggcgtgaatggttggggaagacgaagacccgatgggtccgatggggctgggctgggttcgatgggggctaggctgggtccgatgggggctgtgctgggtccaatggggctgggtccgatggggctgggctgggtccgatgggggggctgtgtccgatggggcggctgggtccgatgcggggggctggatccgatgggggctaggttcatagtcaagtgttgagtc

SEQ ID NO: 225099 - DNA, 3002 bp, Cannabis indica
agaaaaataaaaagaaaaataaaaaaaaaaaaatataaaacagaactacatctaagtctaactatagtctatagccatttaaagcttacgtttgtatcgggtctatccccttctattgcagtggtgtctgcatcgtggtgagcttttgtagtactcatttcagaaaatagcaataaattgaagacaccaaaagtataatatttctaagttgcctctctactaatccaaataattaataaaaaattattcttctctctttttgttttgttttttttttttttaatcttttctcttctttagaaaggacttttcaggatttgttatatctgatgaggctctcttgcctctcttatatacacaccgtgctcctattcacgtttaataataataatagtaataataatgaatttggaatgcaaaaggaatattgaagttggatttgctttattttggaattaataaaggaaggtttttattcctttctgactttacttaaaagaagaacatttgtatacatggatccttttctacaatattcctaccaagaaaaagttattattttttttataatgttctaatgcataattttttttatgaggtaaagaatcaatcctttcgtggaatgataaggatagaaaggaaagatcatatccaagttctattggacggccacccttattacttgaatatagggaaaagaatatatagctagagtacttacgaactggtacatcgtgatatatatataaaaaaaatacaggaccagtcacgcatgcataacttcatccgtgtcatatagtcatcaattaaaaaactagaagattataatgttgactaccccaaacacaattcaaccgatgcaaatgagaacaggtgaaattatctattggttctcaacagactcaaacacttcctagttttgcatccaaagaatatatatacatcggttttccaattaacataataggctgatttaattaggcttcttttgtaacaaattaatgcagaacaaaggctgtatgttgtagtagttttgtagaagattatgtaacactctctctcatggcaattaataactattgtacgtacatatctatgattaattctagacaaattatgatcttccccatatattatggagtacttcttaattttgagtacataatattgactttaatgataactaaaataaaagagaaatgctaataaaaggcatgatgctgtcagaaggaatgaaaaatgtattactattcctcaaagaaaggagtacgcagtacaaccatatttataataaagaggagactcattgagggacacatgtcaccatacaataaaagcaagaaaataatacaaggaaatagagagagatatttttgatggtttaacattcccctcaaactcacggggttgggaagcaccgtgagtttggtgcagaggtcttgaaaacgagagccagtgaggattttgtgagacaatcagcaacttgatcttcggagggagtgaagcgaagttgtagaagaccgttcttggctcgttcacgaacaaagtgatagtcaatttcaatgtgcttggtacgagcatgtagaacaggattggaggcgagatgtaatgtactgatgttatcgcagtgcagtgtaggcgggactgcaagagggaagccaagttcacgaagtagagattgaagtcaggaaacttcggaggctccattggcaagggctcgatattctgattcagtactcgactgagatacaacattttgtttagccgatgaccaagagatgaggtttaagccgaagtatatacaataagcactagtgctgcggcggtcatcgggacatgatgcccaatcagcatcagtaaaacaatgaagttcactggtagtgtcgggttggagaagaatgcaaaggtgagccgtgccattgagataccgaagaactcgttttgcatcttggtaatggatggtagtaggggcatgaagaaactgtcatagcttgttgaccgtgaatgaaatatctggccgagttagcgtacaatactgcaatgccccaacaagacttcgataagaagtagcatcggtgagaggctcaccatcatagagagacaaacaagtaagggccatgggagtgttgaccggcttggtatcaagtaacccagttttagtgaggagatcccggatatattttgtttgagacaagtggaaaccggctgcaaatctatgaacttgaacaccgagaaagaagtggaggggtccgagatctttgacaagaagttcagcaatagtagaggaggatgagccagccacaataatattatccacataaattaagagcacaatcactatagaattagatctgtatatgaagatagaggtatcggcttgagaggcaacaaagccccattctagaatggcagtactaagcttaacaaaccaggcccgtggagattgttttaaaccgtagagtgacttagtgagcttgcaaacatgatgtggatgattgggatcaacaaagccttcgggttgagtcatgtacacagtctcggtgagatcgccatgaagaaaggcattttgaatatcaagttgcttaacaatccaatagaaagaaacgaccaaggagaggaccaatcgaattgagtttggtttaacaaccggactaaacgtttcatgataatcaagtccttgagtttgatgaaagctcttggcaactaagcaagctttatagcgttccacggacccatccgcattaagtttaatgcgatacacccacttgtaaccaatgaccttaaaaccgggaggtgggggaacaagaatcctagtaccttgtgattttaatgccaccacttctgtatccattgccgcaagccagttagggtcttttctagcctcccgaaagttagacggttcaaccggtgtacttgcaacaacactaaaaacaaacgaggcttggaaatgcccaatttagcgtgagtaatcatgggatgtacattagtatgggcaataggaa

SEQ ID NO: 225100 - DNA, 5295 bp, Cannabis indica
tttcgtataataacattgtatggtatgtttttcaaacttagatcaagtaatactagaagcaagtgaagtaattttcaatgatacataccatactgatttactgtgaaccaaagggtatgccattccatgtttatattttaatgagtgttagcagttcagaaggctcgggttctaaatgttgaagtttgggagttctttgaagtttaattagttagaaggcttcgatacactcgtatttctttgaagatgtgtctgcttgcatttagaagtgattctcttttttaatagaaaacattgtagtacatgttacctttcgtaaatggttgaaactataacttaacgaagtagcttaaggcactagatacccgtttattatgattactcagttttaattgttgagttcgataagttaagattatgatattaattaatagataattgcaagaacatataagcatctttgtgtaaagacaatttgtttttctgttttcgaagttattcgatcatcatgttctttcaatatatgatgtttatactcgtttgtaaaatggatgtttagaatccgaggaaggaggtgaatttgatgatgaagaaggaggctgcttacttcggtgatattgtgattttacccttcatggatcgctacgagcttgttgttcttaaaactattgctatttgtgagtatggggtaagtagttctcattaaacttgactcattattctttcaatactcaatagattggaaatttattgtgttgggtctgagtttttattgcttctgatcaaatagtcttgaatatgttaatgcaggttcagaatgtgacggctgcatacatcatgaagtgtgatgatgacacatttataagggtggacactgttttgaaagagatcgagggcatctctcgcaaaaaatctctttatatgggcaatcttaacctcttgcatcggcctctcagaagtggtaaatgggcggtaacttacgaggtatgcaagttggcttgcttttgtgctacctgctttggatttgttgcttaagttaaaattttcggtttacttaaaagttctattgtttgattgtgacaggaatggccagaagaagtttatcctccatatgcaaatggtcctggatacattatttcaagtgacattgctaaatttgttgtgtctcaacatggaaacagaagcctaagggttagtttctattcgctctctgtgattttcggtacctcctttactactttctctgctaatcaatgttcttctgtttgcttcatctagcttttcaagatggaagatgtgagcatgggaatgtgggtcgaacaattcaacagcacgatcgcagccgtccaatattcccataattggaagttttgtcagtatggttgtttagtagattattatactgcacattaccaatccccaaggcaaatgatttgtctttgggataagttggctagaggaagagctcattgttgtaactttagataagaaaaagaaagaagcatttagagtttgttgaaaatattatgaaacttttctttttcttcttttcgatttcgtatagtcttttcctggcttatttttgtccatatgttccatcaagttatgaatcttatcaatgaattttgtaagcagtgaatgattgcttgctgatttttgcccctattttcaaaccaagttatgaatttctgagcattgcttgtcaagtgagtcatcatagtaaggttgatttcggtttccacggtatccagttggacctgagttcatcgcgttaaaccaacccgaacctgccatgtatgcgccaacatagaccgacacactgttgaaatacttgagcacaagccactagcctaccaaatcaaactggttcagcttgataattgaccggaccggccaagctcgataattgaccggaccggttaagagcttggtctgctacagtaggtaggatttttaatggagaagttttttatgatttttttttaaatataattttatgtgaaaaattcaaaaaaattggaagaaatatggaaaaacagttaagggtaacaattttttgtttcataatttttaactttttaaatttaggttactgtttctagaatagttagcctttaaaattgaggactttatccttagatgaaagaataaattgtaatctgaaataataagaataagattgtgaggaagaaagaacaaacatcatttcaatgcaacagttggttgagttgcttgattcacaaggatgtttgttgatcttacaacataatcaatgccataattgtcttaatagataaatattctttcttaaaataaaatcatataaaattaagaattcatttgctgtcatacttaaaagtctagtctaaataaaggtgatatactatatatattcagaaataaattctacaacttacgaaaatagtgttctcaaaattgtttgaaatatattatatcaattattttggttaaattaaaattttatttattttattttatttttctatttcacttatatagatctgttatatattattgattctgtattatttatgtattatttatttaagtgttgatttgattatgaaaataataagaaagtgaagcttttgacatatatatttttttttttcaagtgatgagctctgattatttttagggaaaatttgcagcaaaatctctttatgtttaatttttatacacttaactcttttatatttttgtttggtggtaaaactcccttaaatttacttttctttgaaaatttaggttttagttagatattaccgtgaaataccaactggattactactgtatagacttcgagattttatcagttgatatttaacgttaatatttaactagcgtgtcaaatttgtaaagaaaaattaacttaaggaggttttgtcaacaaaaaaaagataaaagagttaagtgtataaaaattaaaacatatgggagtttcgctgcaaaatgctctttttagggcagatgacaaactagtttggatggataatttttctttttcactaacaaaaaagttacgtttagtgacaaccttttagtcacaacataaattttttgtgactaaatgtgagttttagttacaacaaaaagttacttttgaataaaacatattatttagatgcaagttgtcaccaatttagttttagacttgttgtgaataaaaatatatttagtcacaataatttgtgatttttaactgatacctttagctatgaactttttagtcacatatatataggaataacaatttataattagtcacaactttttgcttttagtcacaagttttgttgtgactaaagtaaaattttttgtagtgttttctataatatattaaacgttgattatttttaatgaatgttcattgctcaaagaaaaaaaagttattgataaaaattgatttcaatttaattttgtgaacatgttgaacataaatgatataagaatataataactcgattgtactatattgtattaaagggaaatttgcggcaaaaatccttatgtagtttactttgttgcacttaaatatttatataaattttttggtggcgaaaatctttatatatttcattttgttgcacttaaagcaacttcagtgggaatgctttagagaatgtttgataacatggatacgttgtttgcatgtatacttaccattagagtgaaaaaaagaatgtcaaatattaatgcctaaatcataatacaatattattttaataattttagagatgcttattattagaatgttttaatataaaaagtaacaaagataatgtgaaagagtgataacataaaatattatatttttaggtgatgtggtagcttttgactattttaaaaaatattactattggagatgctcttaaatcccaatgtaaattttttaaggataaaagtttctatgtaatcattattagtccttttgttgttacatcaaatgtataaggattaaattttttattatcaaatatatgaactatataaagatttttgcagttaaataatctatatattaattgcaacaagataaattatataagaatttttatcgcaaaaaatttacacaagtatttaagtgtaacaaaataagctacgtaggaaatttggccgcaaatatccttatattaaattatattttatattatatttttgtataatgtaaaattttaatgtattaaaatattatatgtatatttttaaaaatatatatatattatatgtatatgaccaaatataattctttatgaaaatgtaatagataatttaatttaatataataaaatacaatacaatataatttatataccaaacaaaggatcctattttgtgactaagcaagaaaaaatgaagttaggaaagtcatgaaggtcaacattttgttctttgaggtaatcataagcaaactatatatgattaaatttcgagctacattattatacaattatatgatcaaacaattacactttcatttttggttatttaatacatttcctaaaaagcaatgtgacagccataaagtcaatgatttatcttatcatgaatttaaagtactttctcaaagtacttattaagtacatatataaaaaaaaaaaagtactcattaagtataatatataatgtttttagcaagaggagtacttgttgtcctattatgtttcaagatttattgggtcaaattaacaaatagttcacatttttttttacatcttaattactaaaagattggtttctctgcatattgtttaatttaaaattgattaacacaattgatttaatattttattatttgtggacattggctcaaggggagtttctttaattaaaatattttaatattttattattatttttttagaagaaaatatttttcgagtgaatcacttggtccttcctataagttaattatatttaaataattttaattaagaataatagctatagcctacaggtaacttcatgtacaaaaataaactagtaaactagtatgccatttttgttttacaaaaatgtaacacgtttataaatttgtaaacttgtttacagttttatatttgtaattttgactctgcattttttgtccaaattgtaagttttttgttttgcaagttttcatatttttgtagccttttttttatatgtatatttttatagattttctaataaatctggaagctggtatatatttatgggataattacataaaattattttttttttgtaatttttttacatttttaagttcaaagattttcttttttacatttt

SEQ ID NO: 225101 - DNA, 3796 bp, Cannabis indica
gtaagcttggtgtaatggttaagatagattaccaatacattagtgggtaaaggttaaatcccactaactacactttattttttctttttaaatttatttttgctccctacttttactaaaaaaaaaatacacctccactcactttaaattatgggtacgccattaaccatataatattgtatctcagattaattataattatcttcgtgccaaaaacaaggaacaagatggtgccactactctgctcccattcttagggagggcaccatagaaactatacataatttcataaaatcatgtatttaaggagactacagagatacacgttttgtattttccatatttgaatggtgaataaatattttaatatgataatatacattaatgattatagtagacattttattaattcttaagaaaaatattaaagagtacaggtgttaagcactacaaaaattaacatattagtagtgcacattagattgcggaaagagagagaaagaaagagagtgaaaactctatttattattcattgaattagaaaaaatagagtacaagatatatgtaacttagagatacaagaaactaattagttacaggtaacaagtaactaattaactaacaacttctcccaactaatttctctaactgattctaactaattcaggtcagctcatttttaatactccccctcaagatggatggtatataactatatatttaccaatccaatcttgtctttaagagctctgaactacttaggaagaggagtttttgtcatcatatcagcaagctggtctttaggggaaacatgagaagttttgatcaatccttcttatatttttgtctgatcaaatgacagtcaatctttatgtgtttaattatttcataaaacaccagattggctgcaatgtattgagcgtctttgttatcacaaaacatcaaagatggacctttgtgttcaacccttagttccttgagcaatggcagcaaccaaataacttcacatgcagtatttgccatcgccctatacactacctcagcaaatgaccttgaaactatatgctgcattttacttttccaagagaagattgaatctccatgaaaaacaaaaaactatgtagtcgatctcctagtgtccacacaagctgtccagtctgaatccgtctaagctttgagtaatatctctgatgttggaggaaaaaatagtccctgtcctggacttgatttaacatattgcagaatcctttgtacgacttgaagatttctagacttaggaacagtcaagaattggcttaatttgttcacagggtatgctatgtcaggtctagtaattgttaattattgtagcttcccaattatcttcctgtataatgttggatcagcaaaatcatctttttttttttgtgcttcttgtgatagtttcaagtttgtttccattggtgtgctaactggtttagatctcaagtaatcaagttcttcaaggagttgaaatgcataaggtcattgtgacacaaagatatcctttttggatctagcgacttcaagtcaaagaaaatactttaagtttcccaaatctttcagtttaaacctattgttctaactaatttttattgcttccaactcctcaatgttgtcaccagaaagaataacatcatccacataaacaagtagaacgatgtaacttgctgaggaagaatttcctcaataaagaatggtttatagttgaatgagaaaagccttcttcgattatagcagtggagaatttttcaaaccactgtctaaaggcttgtcttagtccatataaaagattattcaatatttcgtacaacatttgatggcaatttagtctcgcccttaggactatacccaggaggtagagtcataaaagcatcttcatgaagatccccatgaagaaagacattattgacatcaagttaatgtaaatgccacccatgcacagcagcaagagcaagcacaagttttactgtaaccaacttagttataggtgcaaaattttaataaaaatcaactccttcctgctggttatatcctttcgcaacaagtcttgccttaaatatttctactgatccatcagtattgaaatcgatcttatacatccatctacaaccaatgacatgttgatccggtggaaggctaacaatgatccaagcctcattttcttccaagaaaattatctctgtagaaatagcattatcccatttagtgataccttgagcttgctcaaaacaagttgtctctgtttgactttagatggccaaaacaaaggcacgaaattgaggtgacaattttgagtaatcaagaacctagtgtaatgaatgtgtagtgacaggcatgttatcctaagaagaagcacaaatattattagtggatatgaaataatgatagtcatttaagtaagatggtttagcagtgtgttgaattactctcccactgtgagaattagaagtatctttaatagtgtttgtgtcaaaatgaggtgaggaatgaggatgattaatagcaagatgagaaaagaatttgttataatggtaaggcaaagtgtcagaattgacaaaggtttcctcaaataatagtgtcttccaatcttttcacctgtcccaatcacttatttcctcaaattttcttaaatgacacagtgtttagtttaaaaattgaaagaattaacaccagaatcagttagtgcactaatagacaataagttgcaataaaaatctggtacataaagcacattaagaagatacaaattgggtaaaacatgtattgttcctaagcaagtaactttgccattagctccatttagaaatttgacaagtagtgatagaagaatcaaaatatctatcttgaaataaagaaatgccaaatgtcatgaaaaacatggtgagtggcacttgtgtcaattatcaaagtagatttataaatttttagaatcttaccagaaaacttagaaaccataggaggttcagtagaagaagatggaatctatggaaccctttgagacaacaatgtcatcaatccttgacactgtatagttgaaagacttgaaaccaggtgctaggctaattttagtctaagttttgggtcgcgtttttgggtaactttcaacttttgtttctagttttactgctattttacgcttgattattttgttttaggtccccagatgtttaatggaagtattcacaagaatagatgacaacatataaaaaagttgagaaaaaatgtacaaagttcttttctgccaaagcccgtcacgacggggaaaggctttgccacgacgggacttggtaaaaagttttccaagttgagaatgctccagccgtcgtgatggggaataagcttcgccgcgacgaagccttcctgaccaaaaaaaattggcagttttgtaatttcacgaatttgaaagagaaaacttggctcatttaaaagggaactcatgattttttatcaatatttagaattggagccctagaaacaaaggacacttcaagaacggcttgtggcgactcggatcgattgcttcaaccagttcttttctcttctcttaatcattctaggttattttctgtttcaattttaattatttgtgtttaattacatgtttaagattgataatcttttgcatgctttatgatcccaattcaaaatctaaaaaggaagaattgggaatgttgaaattggataaactaggttttgatgtgaaatgaaagtatttgcatagcgtttgtgacatttagattattgcttaatgttgattacatgttaatctaattca

SEQ ID NO: 225102 - DNA, 4318 bp, Cannabis indica
ctcaaccagatccgactaactggttagttatactgtcaccacttccattttttattttagcaccacgtgaaagtaaaaaaacccttttgcctttctcttcttacaacaatatttgattagagctctgacagccagctttaacagatattaacgcgtatatatacctcaccagaaagagagagggagagataaatatataggtacatgcacgttcctagctaattagtgtcttatccaaatattgacatatttgagagaactaaagcagcattaataattaatactacttgtttactaataaaaaatgataattaattaataagaaatgctaaaagatataccatttatcttatagctattgattatatatatggaatatcgttattggtccaattaagtatcgggcctcatataatttaatataatagcttttaaagagtatcgctaaccaatcgcaacgcgacatgtcaagaagatgctaggcaccactgatgcctaaaaataatgctcaataacacctctaggtggtattgctcttaattaattaattactcaccgcgtataaaatggtgaatacttctccaccagagtggaaaatccaggcctgggcgtctctctcaacaatggcagcaataattacgaactgaataagaccgaagaagcaggtccatgaggtaactgagagccgtgctgggtacttcttcagaactggggcttgcagaacaagccatccggaccaagaaaggcaatggcctataaggtaaacgcagccgagggtccagttcttgccgctcgcatctccaagagatggaagagactctagtaagggtgctgccgcgctctgtaacggtggagttgggctgtagatagtgggacccttgtataaagtgatgactgaagctccagccacgcagaacatggttcctataacctttgatataccgtcttttctgtttagtctcacttgttcaatccttcaaatacatattaaggaaggattagcataatatcaggtatatatttatttatttatttatgatattatattctacacacccggagtaaggctgccataagaaaagttatagccgggactgagttttgaattgcagaagcaaaggttggtgatgtgttgtccagacccagtaagtagaatccctggtttgctgttattctgtattataatatacgatgatatacgatcaaaaatgcaagtatatatacttttattatttaactctcgttattaaagagtatatcctccaaaagttgttatttttctcttttcatagagtacgtacgtgtatcatatatatatacgtacccaacaagtgcgagaaggaaaaactgtatagtgaaatttaggctcatggcaggcctctccttcctggtttgtaaaacatataactaattaattaaatcaccaaaaagttattaacatgaatgtataatatagtggctttgtttgattaattacttctctaagaaataggcaaagggaaggagcaaaagcagagctatgatgttcctgtaaactgggaagacgagcttactaatgcccatattaagggcagctcttgaaacaacatgaaacccagcatatccaaattgcagggccaacatggctccatgcagctggagcctttccggcaccgaacaccacattgatgatctccttccggaggctgaacctgctaaatcagccatttgggacgaggctgcaggctgcaatatgatcaaccaataataatctttatatattaactatatatgtatatgtaaaagtaagcctagcttattagctatcttctatctatatgatattgcactaaagaaaccgagagagagaagagaaagaaggaaagtgatgaaaaactctaagggagtagggacttataaatacagagaggaaatgacttaatgggctataccaatcgagtgtgctaaggtatggcctactaagggccctaaaaagacgttatgtcaactgttgctaagcttcaaatgtttttggttgtctcccacattctactatctctctctcctttgctgacaagacagcccccattccactctatacttaaagttatatactccccgggtagaaaatttgaaaggaaaaaagaaaagagaaagagtgaattgaattaattggttatgttgtataactgtctgtcagtccaactaagagagtattagtgcctaattaacctgattggagaaagttttgatatgatatatgaacctgatttggaacagagagagatgaaatggctcacacacaatagatgagttatgagattttatataacaggatccaataggaaagttagttatgttattctaaattctgcacaggtgatgtgccatttagcatgataacatgtatagaacattgaggagtccagacgggtaacttttcctcaatggtccgaccaaagaattttatacttaaaactgccaagttagcacatttagcagggatctttcgagcagaatctatacgtgattgtccgcacagatcttcattatctaaaaatacgaaattttccgagcaaggtagtttgtcataagaagatcttcagagatatttttcataaatattttagcactaagtctcgatcaaattcctaattttgtgggattgacttgcaccgacaaaaaataataggaaaccttcatagttttcctatttagttttatttgttatgggaaacttaattattgaatttttaccctataaataatggagtcatttcattgtccaggagaccaaaatctgaggttcggttcggttcttgagagctcttacgctgtcaaataattgcaagatttttcattaagaattattaagaaactcacttggctagctccttgtgatctttataattcttcgaagtagtataagaaaaaggagagtaggttattaccataatcaagggaccgaacctctataaaccatgtgatttccttaattatgttatttatcatctattatttcatcactttaattgacacaacgtcgttggctaaaagtgaggtcaatattttactattaccataatgaaggagtcgaacctctataaattcttcattcttatttgcttaattatattatttattatctattatttgatcactttaaatgactgagcgtcattggctaaaaataatgtcaacattttggtatttttattgagagcaaaagaacacaattttgtaattctgattctccacaagttatcatattaatggttctgagtattaggaggacccacaccactctttcaattgatccaatggccagagatcctaatgtgcaaactcttgataatcgaagagatccagtagtgataaatcttggtccgagcactcatttgcctccacaagctccaccgaaaggaggacggggaataacaacccctctgataggattcactccgagcacataagaaactgggaccacctgtacgcacaatagagaaaataggctggataccggagatccaccaatcggagagcctcgagtggagattggtaatatttctttaacatggtaatattttttaccacaatcgatacaaggacaccaaattttttcaggatcgctacaattctttagggcaaactctaaaaagtttttgaatcctttttgaaattgtggggtttctctcttctcttccacccatgatttatcattttaaaaataaaaataagattcctaacaaacaagatagaaaaaaaaaaaaaacttaaaagttgctagaaaaatcctaagcacgcttagtaattaaatattaaaaaatatgttcatttaagaatcctaaaaaatttggcaaagtttcccctatttttacaaaatttggcaaaggttcccctatttttacaaatttattcaatttaataactatctaacaatgcaacaaacaatgcaattaaatcgggtaacaagaaaaaataatcataaaagcatttaacaatataataattgtcactcatccgaccacagtacatttatatcgtagaacctacttcattacggatgaatttctaacatattcaatctcctctaatagctttataattagtaaaaatttgttggtcaataatgtatctctaactagcagttaatgatcatcgatattttgattcgttttctaatagttatccacaacctacaatattaaattcaatttaaaaatatttaaattaaaattaagtgagaatagtaacaagtaactaataaatatataactagtgactacatacttatataattacacattatttagcactacaattaatttatacttactat

SEQ ID NO: 225103 - DNA, 3467 bp, Cannabis indica
aataaaataaaaaatttaatatgtaatttttataaaacacaaaatacaaaatgctatttacctttaaaaaaaaaatatacatatatatatatatttacgtcattagttaatgttgttagcgtaaattctgttgactagttttaaataaaaaattttagtactgactactgacttacttccccgttaagcggcaaaccctagctcttaatttgcggcaaacgcatatagttacagaaaactctgatcaatcaaaccaatggagttctctcaagatgattttgatcgtctccttctcttcgagcacactcgcaaagctgccgaagctacttacgccaaagatcctctcgatgctgatgttcgtctctctctctctctctctctctctctctctctcatatatatatatatatgtatatgtttagaattggggcgtcttatgattttcctttgtaatttcctaaatatatttttgggcagaatttaacaaaatggggaggagcattgctggagttatcgcagtttcaaagcgtttcagactcgaagaccatgattaacggtacagccctgttgttgttttatgttatatatcaaaagtactacactaccatttgataggtggtaatggtattcaagcagggactattgaattttaatctcaatcatattatagatgcaatttcgaagtttgaggaggctttgctcattgaccctttgaagcatgaggctctgtggtcactaggaaatgctaatacctcttatgctttcatgacgcctaatctcgatgaggcaaagccttatttcgatagtgcatacgattttttccaaaaggcattggaggaggtatactgtcatgctccagaatttcaaaaattgttttagttgtaagttgttcaataatggtggaacttgttttatttgtaggatcctggtaatgagctatacagcaagtctttggaaatcaatgctaaggtatatttcaatgttaagaaccactatttatgtttactactgtttcctgggagacattattaagttaagagtatgtactagaatgatggataatgtagtttaattggatacaactcgcacatatattatgtaccagaatttgtatgtcatttttttagcttttgtctgctgttattgcttcttttactgctatatatcatgttgttacaagcagatgacttgaaacaatgcatagttattttcgtatcttgtgaagtaacatggagttttgtcatgtgatatggattatggagactggtagtacttagtattagcctaatcatcactgaactaatcttgttattaattaaagaagaccaatatatactgtatgatattgacttgacattacttatcatcagtgttggtaaaaacgcagctcctgtgttattgaagaaattaatttactgctaatgactaggcgatcataaattgtagtaaggtttctgttggcaaatcaatcttgttaactatatagcttgacaaaacaatggtttttgatatgttgacagtagttaaacaaataatcttttactttgaacatgatttgtgttctttctttctgcataatggagttatgaatttagaaatattgtgctagatttgtgtgatagatgataattagatctctctacgtacaatgttataatcaagtttggctcatcaacattgttgattatcctaggcaacagagttgcacacagagatccacaagcatgggctaggtcaacagactgcagctgcaggatctgatacatcctttaatgcaaaggtatttttcacagaattatctgcacgtaatattcatcttatgaatgatttgacaaacctgtttctttgtgtgatatgattcttgcaagttgatcttagatttgttaggtaatcataaaattctcaaacttgctactagatttgtacgcatctatcttaatactgctattaaaagctgcaacttgcatattaacactttcggcactgtcatatctgtgatacatgcagtttcgcattgtgtttgactttttgttcatttctgtcttgttttggacctttagcattagcctgcatacatgctgctggccagaccgtgctctttgttataaatggcctgccctgctttgtgatttgagtctgtatgtcaatttaatggctgttggttcggatctcattagattgattacattttctaaaatatgcatataaaatgcttatatcgaatgttcccacacttgctgttcttgagcttactttggctagaagatggcagaagtatctcttgacagaaaagaggtcgtagttgtgggataagcacataagcataatcttattgttaacctatagctgtttgataaaccaaccctaaaatggttaaacctgttgagtggtataacagaatgtcactgttgttttcttgtgctctattttccaaacattaatagcaagaaaagaacaaagtgtttttccatataaaatatcactgtaaaaagcatataataaatgattaggacttctttacgatactgtttttctttccatatgctcagagttccaagccgaagaagagcagcgatttcaactatgatatttgtggatggatcatccttgcagttgcagttgtcgcatgggtcggaatggcaaaatccaacatgcctccaccaccccctagataagtttttatatccagctatggttaccttaccagtggatttctggaaggttcaatttttgattagaagacctgctttgttgctatttgatataattcgttatgtctgctatgtattgattatgattagtatgttttctctatgttattcacctagaaaattttacataaattatctgctgctctattgcaaattattggtagccttttgacggtgtatctaatttaagttaattattcgtaggtatttatttctttttcgcactaaatcaaaagttaatttcattattttccaataaaataagataatctttgttaatttgatattctgtttggaaatgaaatgaaaccaaattgatctatttgacactattgtttactgagaaatgttaaaaagtactagtggtgtccaatactaccacgtggtatcattagtgcaattaaatatcgggtttcacaattatttttcgcaagtttctacactgattaattcccttgtttggattggcgtggatttcaattcttattgcaaattgtttttcgaatgataatttagagtgatacttgggtttcattatgtgtaaaaaagttctttaaatttaagggcatggctggaatacaatgaaagtgggtgacttattgtgagatgggtgcagataaggactcattttgggatattcaaactatttaaagtgaaccaataaaaatggtgctgtttggtaatatttttttaatcggttttttgttttaaaattaaaaagtgaaaatatttttaaaaacatattctataaaactg

SEQ ID NO: 225104 - DNA, 5511 bp, Cannabis indica
tatacgtgatattatcttatataggtcatcgttgaaacagagtaagtatgttggacttgggccttaagcgatagggttttactcaacccttggaggaaatcacacttcctaggaaacgaccttcgtggactatggtactcgtaccttctccaacatcaaaatcaaccatctcgtcgatggcaatgaacccacgaaagttatcttaaaaccccttcgccattgaagcaatttatttggtccgtaatagtgacgacttctccatcttggtgatggttccttctgtcggcaacaacaccatcctaaaagccttgcagctctcccctaaccttgttgttgacttgctgatctatcttcatcttttatcaatgggagtttcccaagaccattcgagttccaacttgcacacactcctcgtcattataaatgtcaacaacctgtttttgagatggaacaaaagctatgaacagaggttcaaagttcaaatcgtcaaatagttatgtaataagagagtagggttgctgcttatactctacatcaattagcacacccaccgaaagctcaacctaaaccaacccataagagagattcaacagtttttcggcaccaccgcggatactacgaatgagggtagtaaccttacttgcccaagaagtgcatgattgattcacttattcatatgttctaacctttgcgtaactcttcaaaacacggatgccggatgccacaaattcaatctcgactccattcgccgaacgtaaacagggaatgagttctctaataccaattaaacaaaccacttcacttgagtaccgatttcagcaagcaaacagtaggaaaagcaatagaacagtagggaaaatcaagttatttcaacctacttttgagatggaacggaagccgtgaacagcgatgcaaagctcatatagtcaaatggttatgggataggggagtagggtttctgcttgtactcaagccttgcatcaatcaacacacccaacaaatgctcaacctggaccaaccaatcagagagattcagcagtgtttcatcaccaccacaaatactacgaatgaggcgtagcgtagtatcctcacttgcccaagaagtatttggtccattcactacttcacttgttttagcatttgagtaactcttccagccaaagatgtcacagattctacctcgactccattcgtcaaacgtaaattggcaacaagtgctctgataccaattgaaacgaaccacttctcttgagtaccaaatttagcaagcaaacagtaggaaatcataggagaataactgtagggaaaaccaagtcatttcaaccatgactttcattgtatttctaaaagaaggaattttcatagaaggaattacatgaggaaagggaatgatccttccaggtcagtgatgttgagaatgatgtctattcttgcataatcccaacttttttgcccacccatgtaaactatcctatccccactcaaaagactctcctaaaatacaatgaatcataccctcttttatttgtacactcttccacacccttctaatcctagggtctaacatgcccataaagaaatttatgaagaccattaaataaaaaaagatggggtacacagtgcagcagaataatgtgaggaaatcccctaggacaaccaagaaacaccaaaatttctacgagtttcaggatgtttatcagccaccaaaagaattacaatctttaaggggaaatgaacactcaacactcaaagaaggcaccaatcccattagtgcacgaccctatcattatcctcattttcaaaaggcagatactgaaaaaatattagctaagatgatagagggtaagctttcaaagaagtggcagaaccccaaaggaaaggttagagtttgttcactccgatgtttgtggaccaacaactacttcatccattgctgggaaatactacttcgtaacttctatcgatgatcacttttatggctttactttctcaaacataagtcgaaagtgtttgaggcttttaagaaatggaaaccagtgattgaaaatgagataggtttaaagactaaaaagttcagaaccaacaatggtggcgaatatgaagacaacacattaaaaaaaattttgctatgtacacgaaaacagaatgaagagaattgtgtcaagcacaccttaacataatggtagagttgagcgtatgaatcaaacattaaccaaaattatgtgtatacagtgtctggcctaataaagaagtttcaggcaaaatcggtaaaacacaacaacttacttgatcaatcgaggcccattagagtacaaaacattagaagaggtgtggaacgggaaagagttaaaactatcacatctaagcaaaatttggttgtgtagcctatgtggatattcatattagtgattaaggaaggaataagcttgactggcaattcatgaatgagaagatcaagagtagaatcatgtgtaacttatgtttttaacaaagccaagtgcagttgataaattgatcaaagacatattaacatgatggggaaaatgatatctaacgataggtcgtttgaaagatataccatcagcggtagataaaaacccaccattaatgttagatcaaacatacatcaccatagcaaaactcataattgcgagtgtactaaagcatgttgattataactgtaatatttatgatatcacaaaacaatactaacaaacatggagatctaagagcactcccgacaacttctcatctccatcagtacaaatacatcaccaaaaccccccacattaaatattttatctcaatttttacattacatcatacatcaacttctttaaaatacatcaacttctttaaaataaatataaatcaacaaaacctcacttttatcaagttttttatatattttattcattgcaaatatataatattaatatacatttagagtaataaatagtattctatataatgtagagcacgaatagaaaatttaaagcagctttaggataaaagaagcaatttagagcatttaacgtagtgtgtttctaattagtttcttcaaaaatttaaagaattttctattttaaagcatttaatgtgagtgccctagtaatcaaaacattttgaaacaaacctcttatccaagtggcggctaaagacaatcacatctgccccaagtctcattgtgctagtcttgaagccatttccatctgaaaaccttaaatgttaattagcttcaataagatacaaaagcaaaactaaaaactaaataaagctagaatttgtacatcgtccaatcgatgattttgatttctctgaaaatccaaaactcaagcaacctcgcattgctatagggtccattccaccaccatcatctagttagcaatacaaaataccatgatttagaaacatgggtacgaaacacatattaccagatctacctataattatgttcgagtgatactaccaaaacaaaatttatgcttgaaaaaatgtacacaataccttgtattaacaaggctggatttccatcccttggatttgagatttcatcaactactacaaaagtggctccattttggatctatccaattttgaaaatagagcatgttcattagagaaacacttcaaaaaatcaattgaccaacccatcataattatgtttgtattactttataattgacttgatcaaacattaattaaaatagttcaacaatgataaagcttatatgtataagttttggaaaacggaatcaggtactgaggcattttcccttggccccgaaggcataagcctcgaggagcatttacctcaacaataaaaagaaaaactacataaaatatcataaaatcataactaaccacacataatttcataacaaagtcataaaattactagttaagccttcaaatcataaactaatttcataaaaggctcaagttcaaacggaaaatcctaattaatagaggaattgttagtctattcctagttccaacactaattaggagttgccttgactttaaataatagtaaaggtgataatgtgtaagggagatgaagagtgggagtggataccacaagtccgtcacgattttgtgatagaggctgaagggatgtaatatgccccaatggtttaaggtttttagggtttcgtttatctttcctattctttttatgaaaaatccgttagaaaaaagcccaaaccaaagcccattcaagtcatttaaaagcctaaaaaatagctcttaaaaaagttctaaagaaaagcccaagaaagacccacaaactacaaccctaacacacaaaacaaagcccaaggctataaggcgtgtgcctcatatacctcgcctcaaaggtgtgcgcctcatcagtgtgaggcatatgcctcaaaggcaacagctgaggcatagccccatatacgtttatgcattgcctcgccttgattgagttacaaaacagtatgatgtacaaatttattatatgattggtgcccagaaaaaaaaatgtgtagtacctacagtaacaagttaattaatagtccataagattatgagaactcctatcttataaaccgaatatccccacaatacttttctaaaatcaagacaacttagccttggacattttcattcacccaaatctataatgccttgtcatagttgggactctaattgccttcccctactggcaaatcgcttttcatttggggtacaccatagtgtgagcacttggtgcgacgcaatgtagcatcctactgttgaaattgatacagttaagaacatgccaaaagttccctttaaggatcttgttttttttttttcaaactagactttcctcgggttgagatgatttggacttcctaattatgttagtttcattttcacaactcctaatacacttgaaaatattttaaagtatactatacaataagggaatagtttactttggtaccctatgttttgaattaatagggcttaaactctattatcatcagtaatatacacgcctcttacatctaaattgtcaagaagacccaccatgactatctcctcggctaaactagctactaaaatatatttaaccaaattcaaatctatatttataatacatctacaatacatgaattgtaaaacaacatcacatgagtatgattaataatagaaggttaaaattggcattaactcaaaatagagtgccaaaataatatattctcccctccccttctataatttaagaactttatcttcaattaaaggaaaaaagatgatttgcatataatatatatatgaagaaaagacaaaggtcacaaggaaaaatgatgatccacatttatagtttccattaacctcaaaaaataatatacatatgtatacataaaatatataaaaataataaaaataaaaggcaagctcaaggcaaatcgatgtttacctcatcaattgcattgtcaagcaattctgctatggctgaaaacacaaatcaattaaacacaaatcaattaatgtgaa

SEQ ID NO: 225105 - DNA, 5889 bp, Cannabis indica
gctgaaaatatattcagcagccttgataaccctccaattaagaacataaaaaccccatcagtgtaggaagagcacccaagattgagattagatgtttaatttccatgacttgtttaaccagcccctgcaagggatagccccagatatcaccaattaaccaaattgcaaacagaagattatcactaggtggcccttttccatacgaaatacctggtaaattgccaatcccgatgggtaaacgagagaaacaggaactactcacccaattgtcatagttgtgcttcacatgtaataccttagcaaatatttcttttgttggtgctcttgcccaaaaccagtaggaaagaaatagggattagacaaaaaaatcccaggaatgaaaattaaaatctcattcttccatctttgtctatcacttagtacccaaatggtgttatgtaagctttgccatggagggtatttttgaacaataaattttcttcccctgtggaaaatccaacaaatataaagagcattcatttttttaacatacaccatatcagaatgtgaaggttgtctttcggccacccttatttttattttttttgtgttcggagctatggtgtagtacatccattgcatctccttcttgtaataccaagaaaacttcaggccaacaccagagatgggtacaagtcggagttccttcttcccaggtgtcgactgccctggagaaattccatacactggatttatagttatcgaaccctcccccaacagtattgtcgtcgtctccaactccgatgaacccaacgctatcgccggtattgtgacattcttcatgaccgaccatccatggtcatagtcgtcgatttggtgctgataacgattgcctttctgcctttctctaaaccaaaacaacatgaccgaatggatcttaccaggatcccatgaagttaacccgatatggaaattaattaattcaacttgtgggtttatatgggccgggctttgggcattagtgagagagttgggccttatgttgttgaattttgtagagacaaaattgagccctaattcccaattataggtcttgattcctctacagcgaacaatatcgcagtcatacaaacatggtggtttgaactccttcttctccgacaaagtctccatcggcttcttcgccggcgtgatgcatgtcttctccgacactggcaaccggtccctagcgtggtgtaaggccggtaacatactcaacccaaaattgagatcagaaatcgttgttgttccgtcattaacggcatcgacaaatcgctggttgtgttttccacgatcaaagagtttgtaagccaccattgacagcagtggagtgcttcttgtccacgacgcattaccaaaccgagcttgatggcttttgggtgggaagatctggctcgagttctcactgtaccacattggtatcgtccccagccatggtagttcgatcttcgcctgtggtgatgcaatctttgtcgctagaataaattgatggctggatataatctctacttctttttcagggagcaactttgattttaagccatgattaggatccttgatttccaccattttcgttggagactcgacaagattaacatattgttccttgtttttgcaactcttccttctgggtgctagtttgattacgggacctcagctgtccttcaacgaagaatgctttggcaatgacttcagggagtgtccttagtttatattcacgaaccttcttcttcacctctgcaggaagattcccaataaacatgtcacaaagaaaggtttcgggaatatccgacaaccttgttgcaattggaatgaaccgaacccagaactctagcaatgaattctcatatcggagagccatcaattcgtcgaacggatcgttatcaatttttgagcagcaattgaataacgtgatgcggaattccaaccaatttttgattggatcttgctcctccactgcttgaaaccatctccaagcaacaccctccaaacacgcttgagccacgacaaccttcttactttctggggtttgataagcttggaaatattcttctatgcgaagaacccagctatacgggtcatctccattaaagagcggtagtcttggcgccatgacggaggtcacaagatcatgctctgataccatttgataggaatttcctatcattttgggtataatcagtagcaagataaaagaaaatagagccaaacagtagaaacaataggaaatagcaagtatattgatattagagtgacaaagagaacaagtttgctgggtattcgagagacccagctctctcccaagagctataagctcacttaactaaatcattcaccccccaaaacccttctattactctcctatatatacaacatcaatcactccaattacaattacccaattaccctctttatttataccctaaggcctaacatattgatcttaaggggcatattatatgtttggacaatcaaggttgggatgatgagaagcttggggctctaatcccttagaacactataaaaaagagatattgttcatattgaagtcaaattgaaccacctctatacattattgtagaatgcagtggcttatcaccactgatgcactaaagagtagccagacactatttctattcactaacatttaaagaacaaagagaactgtgcaagggttggaaagtatttaataggtagtaacttagcatagaaagatatggccgattttatgattgttatatccgaactttatggaagtaagttggacaagattgaggaaaaataaactgaagcgaggagctagacctatagtattttatagttaaaacataataaaaaaaagtgaatgagaaggaatttaatctttatccaatactaaatcagggaatataaaataaaatcagcacccaaactgtcctcacatcataacagtttttaactttataagttccatggttagaatattaagaattaaactaaactatggaggggggacctctagaaatccccctcatcaaagaacttattttgaatcttaagagtgctaacatatactcactcacccaaattcttaagccagcctcaagtgacatcatcaccaaagttatttcaccctagtgttgaacgactaagaatatagtagtcagtggtttaattgtttcacacaagagttattgatttcatgtatagtattcatcctactctacttcttatcaaagtttatgcttccattttcattcttttattaaaaaaaaaaaaagaatgagaatggagaagaatcaagcaaataaggtatcatgattttcctaacaaggctcgcatctagctttaaagccatctactacaccctatcgagtatcgaatatttagaaactttaattagatttgaatctcacatgtttttcatttcaattgctaaaagcaagatgaggaatagaataagcaaaatttctatttatacaccttgttgtacattattattaaaaaaataggcgactcaccagttcgtgcaatatttaagaaacataaattttttgcaattgttatgtagatactagagaggttcaatcctttcatcttgtacaagtcatggtccaaactatttaagctaaccctcttgagttatgcaagagagaggtgtttacagtatggacaatgcggtttgaggcctatcttgtagaccacattgcaaatgtggttttaatcatttctaaaaccatgggatttgaattcatgacttcaaactgcatctccgcactacgctacttttgctatatttttttctttctgaattcatgtagaattaaaatataaggaaagatattataactaaattaaaatttaaacttgaaaatacacttacaatgttattgtttggtaggcagagaagagatgggtggatggagaggggtggagacagaagtgaaggggaagtagaatacattgtttggtagagggtgggagcaatgctagacatggattgattcatggataggggaaattagattctggaggagtaagatatctcaaccctctcatagtagcatgaatacaaattctcccttcccatagaatttgttggtgaagcctttaagaatgtgtttgttagtagcttgaaagaagactagaaaagaactgtagttgtttgaactggtgggattgttaaaagtaatggaggtggaaaatgagattgaagagaagaattaagttgcaacgaggaacaaaggaagcagctacgcagtctttgaatgtgacaactaattagaatgtctaccaattagaaaatatataccaatttgaatgtgaagttgctgccattacaagaggtgaccaacacatagcaagcaagtttagtacaatacaagaaagatggatgtaaaagatttacaatcaagtatcaagcacaatggataaagactttgcttcaggtgtgaaaagaaattttcagcaagtcatagatgcatgactaaaaactaagaatattgtttgatcatcatattaggagaagccatggcggactttgaaaatatcttattcgtgaataagctaagtaaaaggcaacactaggagcttctgcctcaatcaaaaagaacatatacactatcagcttctacctcaatcaaaaatatcatataaactatcagcgtacacaagctgctccaacatgttttcaaagcatccacaacagtctcacacaaattcaaagaagcctaaattaaccctttaaattattgtgaatcaaaatgtaaatagaaaatgtaatatatctcaatttaaaaactctgccaaccattatgaaaattgagaagcatgttgatcaatcacttagtttcatcacaattatatcaccaaaaacatgttgggagacaaatcaaaaatccagacttttgtagcacataaagaataatataaactaaatcattagagcacaaaccttctgaatggtatctccttcaatatatgtatcacacgtatttctttcgatagatgtcccatggttatttccttcagcacatacaatttcattgttccctccaacattcttgttgcaaccaggcgcagctgctacatcatccccattatttattccaggcaccaccgcagattcatcgtcttcccactcctcctcaataaaaggtgcatatcgctgcccacttggtggtcctatattactcttgtgaaatattctacacagcacaaaggcatcctttcccgcccaaaaagagaaatatgtacaataatagttagataaaaaacagacaccataacattgcaatcgaacataaaaggactatgatgtttggctgctgaagaaaatctaggcagagacaactatcaacttctaggtactccagttcattaacgccaacaataaacctcacatgtagactttcctatgaccatcaagcaacatcaaaaaccgtaattgttaagcaaaaatggatacatttccaattatcttctctcaaatgaaactagattgcatgaaaacataaaaacacatacaaaaagcattaaacaagttctggtcaaggccttacctgagttgcaccacctctacctctttccaattcttcctctacaagtctgtattcatgcataacccaattagtccttttaccatctggtgctcgcccactatgaaaaaccaaagttttcttcaatccaacggtcttggagtcacgcttgaccggcctatcatttccagttgccttccagtacccttgattcgttgccctgttcatcctagccccgttaccatacttcttgtccaatgcactgaaaaaatagtactcttggtccctgctcttcaaacttgacttatctatagagtccaaccaaacaaataagatagtaacaaatgactaagca

SEQ ID NO: 225106 - DNA, 2966 bp, Cannabis indica
agggcataaaacccaacactcaaagtaacctccacttgacatctagggataagattattcttccaaaagattatgggggtttaggcttcaggaaggagctaaatggaacaaagccttgttagaaaaattgtttgggctattagtaagaagccagataccctttaggtgaaatgggtgaataagatgtacttaaagggggaggacttttggatttatctgcttaagattgatactagcaggtattggaggaaattgtgcagcatcagactttccttttctcaagaagatatagaggctgctggaatacatgggaaatttaatactggcaagtggtatatgtctcttattagcaatgagaaggtgaaacatactcatttttttttagaactggatcagtgtgccaaagcactgtttcattctttggcaattagttaatacaaagcttctcacgagagataatttgaagtgatttcacatcttgtggataactctctctgcccagtttgtcatttggaaaaggataaccagtagcacttattccttaaaagcatatttctaaccaagtttcttggcagctacacaactggcttggtaaagtttggccccaaagttttaaggattatcaaggttggatagaatatatggaaaaaggagctaaagctatgattttggctgttgcttttgcagccacagtttatcatattttgtacaggaattcttgtatttttaaaggattctcttatactgtaatacctaatgtagataaaattaaaaaagatatgacgtgtagaggtcatagtctattacacaaaaaattggaagatcatgaaaagaggtttttgtagagagtgtgttcggtgtaagggtggttctggccttgtttctggctttttttgtattttgtttgtgattaataaagattttttcttgattaaaaaaaataagatttggcattcaacactgcaaaccagaagatgccctgttgctaaaggagacaaatttaatcttaagtaataccctaaaggaagcattgaagttcaagaaatttaaaagattccttacgatttagttgttgcgagtctaatgtacatgctcaattttgtacacatttggatatagcgtacattgtttaagtggtaggtagatacttcagcaatccaagaattgatcgcaagaaatcaaacaaaagattatgagatattcaaagagaacaagaaatgctcacatgtaagaggtcaggtcactttgagataattgggtattctgactctgactttgcggaatgccaagatagtaagagatctactccaggctacatatatctgttagatggtgggttatatcgtgggagtgcacaacaaacagtcatagcttcatccaccatggcagtataatttgttgcatgttatgaggcatccaaccatgttatatggctgaggaactttatcactgggttacacattgtgaatggaatagaaagaccatttaagttgtattgtgacaataaatcagttgttttgtattccaacaataataagagctcaacaaagtcaaaatatattgacatcaagttccttgttgtgaaagaaaaagtgcaaagtgaacatatttgtatagagaacttaggtacaaactctatgattgcagacccccctttcaaagggttttcctcccaaggtctttcataagcacactgctcgtatgggtgttttagagtatgacgatatctagattcaataaaaatttatctttgttatcctttgtgtttatatttctttcatgaaaacttgtgtattttgaatattattctgataaaagatataaagttatttagtttatttcactttacatttaagctcaagtttttatatccataaagtaaaataggaccaaacaaaattaacatggatagatcattatgcgtgtaatttttataccacattatcatgattgatctatgtcatttgactatcttaatatatatgatcattgatggatttagttatgattcatacaataaaaaattactttaatctatgttgatatagttaatgaacgagattgcacatacctacaattatgataacaaggttatgaacttaataaggtttacactttacacatttatatggatacatgtatatctggcccaatgggaaattattgggaatttaatcatttggggccgcataattgtatatataaaatgtatgttgagtcattatataaataagtcaaaattatgtggtctttttttaaataaaatgtatgacttaagggcatgattgtcatggttttaatatgtagatataccaaaggataatttctaatttgatgaggggtcatattagaaatagtcgatacaaattagtagctattttgacagttggtaatatagtaggtaatgatccccaatttgtatacatatcttttaacttttaaattctcatcatcaagagactaaggttccaaagaattttactaataatttggaagatcgtacttttgcacaatcaattcaaagaactctggtacaattatgctaatccttaactattcattattttattctcataaattaattaaagctaattcatataacaatattccaacaacaagatcctggaaacaagagtcaaaactatttgtcctaaaaataatctatgtttttattttgagggataagttagctataataattaatacattctgtgttcttttaaatattaaactaaaatttaaacgacttgtttgagagctttaattaaaatgagaaatagaagtaaaaaagagagagtttttacaaaaatactgaatttttggtaaaaatttacaattatacagtcacacagatttttttacaaaaatactatctttttataaaataaccgtaaaataacaaaacaaaataattaaaataacagtggaataactaaaaaatagccgtggaacaacagtaaaaactt

SEQ ID NO: 225107 - DNA, 8392 bp, Cannabis indica
tttttttcttttttctttttgtcttcaatttgttagctaattatcttttctagtgcacttttagctagttgtcccaacaaatcattttgataagtttcatatcatatttgctagctatttgtatacacaatcataaatatataaataattgaaatatcggtgctattgctaataatttgtggcttcgttactgacatcattgatcttgagcattccgccccttcataatatttgtattcttttaattgatccacattatagatgactatttcaaacaaatatagctagctaagaatttccttgaatatatatatattactatatacgtgtgtgaacaatgactaccggaaaggtattatattatatatatacatcattttaaattatttcagatgtcagcgtatatatatatatataatttataatatatagtgcaaaatgtcgtgccgataattaagtagaaacagcttattacattaatatttaattactaaaccttcatgattgaccttctgaacgtataatttctctcagcaagtgttttttttttcatcagcttaatctatttctatgcttggctttcactcctacgtgcacgtaggcacgcgccgtgatcttatattgagttgacaaattgaagatattattattaaatgaacaacattttcataccatgatttatattgtttttcaccatagtaattttgtttttgttttactcagctatggcaattggagacgcttttgctacaaaaggacacatacttaaactacagccaagcgttaagctacacgagccaagccttgagccagaatctccaaggtctcagaaagaggagccgaatacggagactgagcaccaaaatggtttattttttgcaagaaaattggaagagaatttgggttctgatgctttgggttggcataatggctggattgttcacatggaaattcttacagtacaaggagaaaaaggcctttaacgtaatgggttactgtctcctcacggctaaaggagccgccgagacattgaagttcaacatggcacttatactattgcctgtctgtagaaatttaatcacttggcttaggaatacaaagatgggttactttgtgccttttgacgacaacatcaacttccataaggtacgcattatgctttatttatacgtttttgtatttgtttttttttttttttgagtttggggtcctatcttaaaaaatatctatacattataggtcaacgttatatggtcttgatcatctattttaaactaaaactgcaacaatttacgcgtttttgttacacttcattgattaggcagcaaaagttgaagacaataaatacctttcactgccctttctttaataaaatgaaaacagagagtattgatgtagacgtgacgaaatgacaatattcttaatgcatgttttggcaaaaacattaaaatttggagttaaataccatcctagctagctactaatgacattttaacatatgcctggaaccagcatttggaatggaactgaaattagatttcttaaattgggtattttatttattttctatttttctaagtaagctataggaaataggaaatggacaatttccgtttgacgtgctaacttaccactattttccagccatagaagataatgaaaataaaaataaaataaaataaaatacgtggtgcccgccgcgaatatatattatagtggaatggtttttcttgtcctttagtgatcttgaattgccttttagctaaagaaagtggggaaaaaagatacagaagcatcttcttacgaaagccaaatcacattactacgtaaaccagcgaaaatgaacaagagagattctctctaaaaagtaaataaagacaaactttaccataagaaaaaagaaaacaaataaccaagtcacaaccaaagtatgtccaagcgtatatgcgttccaactatgtagattccctgagcttcacacacgtaacatcttataatctgatgtagacttttgggactttggatatacttaatcaattttcttgactgattagtactatgtcctaattgatcagttttgttttgttttaatgatttttttgtagacaattgcttcagccattgtagttggtgtaattctccatgtagggaaccatcttgcatgtgattttccaaggctgataagttcatcagaagaggcctataaaaacaatttgagtcttgactttggaagtgataagcccacttacttagatcttattaaaggaattgagggtgtgactggaattcttatggtgacatgtatgaccatagcattcatacttgctacccgatggttcaggagaagccttgttaaacttcccaagccatttgataggctgactggctataacgccttctggtattcacatcacctgtttgtcattgtctatgtcttgctcataatccacggagtgtttctctatcttgtacacaaatggtacaagaaaacggtacatatataactttgacaccattatttcaatctatatctaagtagtgtaacagtgttggttcaatatattttaattttcatgtgtttttaattgcagacgtggatgtacttatgtgttccggtgttactatatgctggtgagaggaccctcagatttttcaggtccggattctatagcgtccgtcttttgaaggtaaaagaattatactacattttattgttatggaatctggatacttgttgtccttaaaattgaagctgcattacttttgttctaacttttttttattgtaaaattttaggttgctatttatcctggaaatgttctaacattgcaaatgtccaagccaccccaattcaaatacaaaagtggacagtacatgtttgtgcagtgcccagccatttctccatttgagtggtatatatgtctccactagctttccttttcagtaattttccctgaattggccttgttaaacatcattaattgctctgttatgtcttgactgaattgatcagaaagttagaggtgtaaatcctctctgattttcttttttctctatagttgttacattcaaataaattgtacaatttataatgccatactgttgctagtttatttggtcctactcctgctaaatactgtgctatgatttatgaacgtcaggcatccattttcaattacctctgctcctggtgatgactacctcagtgttcacatacgtcagctgggtgactggacacaagagctgaagagggtattttctgcagcatgtgaggctcctgtagctggaaagagtggacttctaagggctgatgaaacgacaaagaaaaggtggaaattcacgaatcttttctgcctttcattttgactcttgagcactataatgctgacttaaatgttgttctgcatttcagtttgcccaagctattaattgatggtccctatggtgctccagcacaagattatagaaaatatgatgtcttgttgctagttggtcttggaattggtgcaacccctttcatcagtatcttaaaagatttgctcatcaatatcgtaaaaatggaagaacaagcagtaagtagcttgtgctattattaatattattcatatctaactatgcttcataaacttatgattaagtttccattttcttctctcttgttaggatttagcctctgatctcagcagaacatcagacctaagtgtgggtagtgcagattccaccactcccaacagggtttctcgaaaaaaggcactgaagaccacgaatgcctacttctattgggtaactagggagcaaggctcatttgattggttcaaaggggtaatgaatgaagttgctgagcttgatcaaagggtataatttttgtaattttccctatgcattaagagataattatatttagttattggtaactaaagtactatgtgctctgaatttttcttttagggtgtaattgaaatgcataactacttgacaagtgtgtatgaagaaggtgatgctcgatcggctctaattactatggttcaagctctgaaccacgccaagaatggggtcgacattgtgtcaggcacaagggtaggatctttgatctgtcattttcaaaatatattataagcatttatccttaaaaattatcactgtttcaatccatgcgcagaaagaattttggccttattgttttacaaatatcacatgttctctttcgcacgcggttttgtgtgcaaaaaaaaaatcttaaaagagacttcttttcaaaccagtgtggcccacttatctgataccttaacacagaaagaaaatttgtaacaatttaagtacacattaagtgtctgctgcttaggtacttagtatattcataactaagatttcccattttcaggtgagaacacattttgcaaggcctaattggaagaaagttttctcaaaaatgtgttccaagcactgtggtgctagaattggtgagtcaattttattaagccattattaaatcacagaagattttatctcttttttatactaatattgattgttttaatttcaggtgtgttctattgtggtgctccagttctagccaaagaacttggcaaactttgttacgatttcaatcaaaaaggtacaaccaagtttgaatttcataaagagcatttctagccaagtcttctctcacattttataggcctattatgagactaagcaattttgtaaactttagatatatgaaatatttgtacagccttagatagggaaaaagaaaaaattacatatattaatcataaaaaataagttaaaccgagtcaagcagcagaaaaagtatccaggattatatatatatagtgaggtggcttggcattgtacatatggcgaaagatggagatgacacgtgtcaagtaaaagtaaattgatactgttgtggtactcaaagagtgcgatacagctacaatatttatattcatacaagtttgacataattgatgaagacaagtattgaatggtagacattcattggtgggttaggaagaagatagttgttctgttacaaggtgggatatctttatatatatctatagcttttctcagaaattataattaatttatctattttatttcttattttggtgcccaatttttcttcttttttttctttctttctttcttcaagtggggcccagggaatccttctagaatgtaatgacgcagactaccactttcaattattttttatagatataattgtttagaataaataattgttcttttctgtagatgaagatggtactttttagctatgttttttctttgggggaccttttttggacagagtgatatataatatagtgaaccactgaaccttacattgtcccttaattttctccttaatacaatatataatatgttttttcttttcattcattactcatgtcctatctttttttgtcaagattataactttatattaaaaataagtaaaatctcaattgggacatagagaaaagattcactaggcaaatcaatcgttagtacaaaacttgttttctcccaaaaaggaaaacacttgaaaccattttgattttgctctttgaatctcactgttgaaattccttcaactctggttgaaaagcttccctttaattcgccaagataaaaatcccttttttatatatatcttcaaatgctaaattaccatttttgaacaccttcaatcaagaatcaaacctctgcaaagaaagaataacagagcaaaactgcaaagagaaataatagatggtctactaattatgtctgtttttaatagaaggcaattatttttttaatgattttggatcattattaattagatgatcttgtaaatttctaaatttaaatgatcattatagattaaatatccatgtttttcgaatggataaataattttgtacttaaacatttttttttgttgtctttgagatacttagtatattaattattaggctgttaaatattttttattattattattgctttcaaataaaaaaataatgaatatacttgtccatttcccttttattgcatgattctttctattattaatttcacaaacccaacaataatagtcaaccaaaaaaaaaacagtcaagatttttgtgaatgtggactattgaactcaaaatggtcatcatttatttttattttctatgtggtctgtatggtctatgtggttatcatttatttttattttctatgtgatctatgtggtctatgtatttatgtggtctatgtatttatgtggtctatgtatctattaacatagatcacatagaaaataaaaatacaaatacatatataaaaaattatgtgcattgcaagtatacatgcttgattttttttttttaatttataaataatttcattcaactcaaaacaatactatataaattgtttcaattccaaaaaggaccgaatatatagacttacaaaatgctaaagaaaccatttcctatttttctttataattactaacttttgtaattctattcttacattgaatctcacctctgtatacacacttcaactctttgtattttttgattccaaaaactatcatttctattttccatatttggtataccaaaccagcaaccattgcactcaaaacttgttttcaaacatgaatattcttggtcgagatatccaacacagcaaggcaaggagcggtttgtcacttactattcaatctattcattttttaaattgagtaaagaatcggcgactgaaagtacactcaaaaaatagatggccaatcaattccaaagctgaaccacataacgaacatgttgaatcttgacagacttgaaatgaaactaacctgtctctagtttgaagatgatttggactgctaaccaaattataaaactatgctttggtacattgtagcgattccacaattctcatgccatgctactttgctttgtttcgaacataaaacctcatatcccatttagatgctataaacccctattgttagtaattgaaagttcggcattcctttatatttctctttgattcaaactatatcttgccaatactaacttccattataataggaggtttatagctctaccagttaacctttttgatgtagatactatggatccactgagctcacaagttattttattttgaagtaattgtccaaacatacttgcccagagcagtaatattcctgtgtctgaaccctaaactttcctcaaattcgggcctacatagcctatcccaagcaacataattaggactatttatttcagcttctcctctccatatttgacaaaatcattgtttgtgtccaataaaaatggatagtaagaagaaccaagttaatcaaggttacccttccagcaaatgataagtttcttgttctctacacacagatcttttgaaccattttctccattagaatttcatatttcgaagctaaaattcttcgagcacagattggtatgcctaagtatttgaacggtaaaacacttctactgaaccctgaagcttccataattctctatacttcttcttccttcattttactataatataatgcagatttcgagtcattagggaataaactcgaaatagctgaaaataactagaagccttatagcataaatagatagatttgaagtcaccatgacaggacaatagtacatcattcgcaaaaaaagatatgatttaaattcaattcagagcaatgatttaatttgaaaaaattagggttttaactctactggaagattatataatggacatttttgtctctcgagctatgacatatgtattattgtgtctcctaaactttttagtattttacaaataatctctaaactattatcagtattgtaaattagtcattctgtcaagttttatcacatgtagtaaataaaataatgatataactacttagctaattgtcgcatcagcgctccatttatagttttacaataaaaaaaataaaaattatacattttttaaaaaaatcattaaactaaaattaattaataattaaaaaaattacgtaaaattaattacacaggtggagttgaaatgatattgacgtgacaactggctaagtgaccatattatcattttatttactacgtgtgataaaacttgacaaaaagattaatttacaacttagtgaatgaaaaattcaagaaatataataatatataaatcataaaaatttatatatatagaaagattctcaaaatattcaagtaaactaaaagtttgcctacatagtcaagacatattttgaggtcatgtaaaatagcataatgatttaatattattattatagcaaagaattaagaaagtgtagtctcaaataaatgatatacgacagtcatctaaataaaacgac

SEQ ID NO: 225108 - DNA, 4385 bp, Cannabis indica
taatgaatatagtttgaccttgcataaagcttatatagtttcttgttggtcaaggaaattcttagccaataaagtcaagatttaggttaaatggttactttctgctatgtgttttaggtcaaaaactcccactttggtttgtgcaactaaaattaagataggcattttttaatttactcctggttgtatattaatttgtaaaaactttttagttggaaagcaaatttgctctctattggggagaagaggtcatgtttaatgttgtttataccaattcatccacacttactgattgaacatgtttagctcctttatgctcttgtgtatgaaattcataagctttgcacttgattttggtgtggaggtgatgatgctaaaaagaaaatatattggtgcatgtcagcataaaaatgttggaggttttggttttggtgacttaattcatgttcaatcaaaagctcttgacttgggtcttgaccaagcaagtgtacgtggcatttacattcacacctgacttcacttgtgggaaagctaataaaagggttctactagccttttaagtctttcatgcaaatcaacaagtattttgatgagtttttcttatatttggagaagcatattattcattgacatgttgatagtggttctaatatacatattcatttatagggattgatggatcccttggggttctggtcatgcttatctcccttgaaatgtaatgtttggtagtcttcgatttcaatggtaaatgtaggaaactcattaaccaatcttttatcaaggaagaagctcaagcaatactcattatttcgctgtcgatttctagtagaagggatagtggcatcaagagagcttagagcactctcatcaaatgaggtaaacttaagctcattctttaaaatatcaaaaaattatagtaaaagtatttttcatcaaatgagctaaatttgagctataaattatggtaaagtattttaaagaatagagtaaagaaattgatatgagtgctctcacacgttatactactgtgaaaatgtcatatctagttaaattgagtcatcttatagtagaactaagtctaagctaagcgaactaggcctaaggcctaacaaaatacatttttttttattagtagtttttttttttaaaagagaaatgctcaaggcatccctggtgtttaacacttttttttggtattgatgtgattaagtatcgagttccatataacttaagaaaatagattttagggaatatcactaaccaatcatagggcaccacctataaaaggtactgggcactattgatgtccaatatcaatgctcttttttaaaggctatttggaatttttgtcccttgaactatgatgtattattgtgtcccctgaattttttagcctgttataaatcatccttgaactattcacagtgttataaattaatcattctgtcaaattttttcacaagcagcaaacaaaataatgatgtggatgtttagattattgtcatgtcaatgccacatatgaaatcaatttgaaaaaaaataatttaaaaaggtttaaaaataatgctcagtgttccaatttctctttgtggcacaagagactagcacatccttctgctagagttgtacaacatgtaacatctctatgtaatattgccaattctaataaagctatcaatgatttttgtgatgcttgttgcaagggcaaaattcacaaatttcctttctctagctctcaaacagtgtacacgaaaccacttgaactcatcctcattgatctttggggtccttccccgaaactctcatcatctggttataggtattacgttcacttcattgatgcgtatagcagatacacttgggtgtttttacttaaaataaagtctgaagcactacctacttttattaatttcaagactcaagtggagaaagaatttgaatgctctaataaagccctacagtctgattgcggtggtgagtaccaagcccttgaacctcacctgttgactcatggcattgcccacaaagtctcttgtccaacaacacactaacaaaagggtgttgctaagagaaaacacagacacttaatcgagtttgctcttactctccttgctcaggcctctatgcctttgtccttttgagatgaggttgttagagcctctgcctatgtattaatagactctcatcccctgtcatacatcactctacaccctttaaggttctctttcataaagaccctaactacagccaacttaaagtgtttgggtgtgcttgctaccctaacataaggccctacaacaaacataagttgtaatttaggtctgttcagtttgtgtttctaggttacaaccttaaacataaagggtataagtgcctttcacaaacaggtagaatctacatctctggagatgtcatttttaatgaacaccaatttccatactctaccatgttttcccctaccaccacttccactgctactacttctactacatctgccactgtccccatcagtttatccacacatactctccccatatcaccttcttcatctctttccccctccaccaccaatctccaatcccctgcctctagctctagttccataccaggcttaacttctggtgcttcagacacaatttttgtcacaccaacacctgttgaacaacctgcactagcccctcctgctcctacaaataaacatcccatggtaattagggcaaaggcgagggtgttaaagccaaaagtcctagtagcatccaaggaaccactaaccttagttgttgctctcaaggatcccaagtggcttgctactatgcaaattgaaatcaaagctcttactcaaaagaaaacttgggtgaaggttcccttacctcctggtagaaaagccatagaatgtaagtaggtctacaaagagaagcaaaattcagatgggagtgttacacaatacaaagcaaggttagtggctaaagggttcctccaacaatatggttttcacttcacagaaacttatagtccagtggtgaagactgctataattaaaattgttatcacaattgccctatcctacaactagtctataagacaactagatgtgaacaatgtatttttaaatggggatctccaagaagaggtgtttatggctcaaccttctggttttattgatccaaaagctccccatctagtctgcaaactgaccaaagcaatttatggtccgagacaaggccctagggtctgcaatcctttggtttctgttgtgctaaagctgatacatctctgttctatagacacactgatgttcactcaaaatttcttctagtctatgtagatgacattttggtgactagtagttcctaagcagctgtcacagaactcatctccagtcttaatcacatgtttgccttgaaagatttgggccctatcaattacttccttggcattcaagtgtctcacacaacagaagggttgcacttgtccctaaagaaatacattatggatttgcttgctaaaaccaagatggacaatgctaaccccttaccaacaccaatgacaagaggtgaaaaattatctgcaacaggcagtgatccctttgcagacctaacatactacagaagcattgtgggtgccctgcagtatgcaactatcctatgcagtcaataaagtttctcggttcatgcaaacacctctcgaggctcactggaaaacagtcaagaaaattctgaggtatctaaatggcacactagattatgctctgcacatgaagccttctacatcactcaccttaacaggtttttgtgatgcagattgggcttcagatccagatgacaagcgctcaacatcagggatttgtgtctatctgggttccaacattgtctcatggtcctcaaagaaacaaatgacagtttttaggccagcacagaagcagagtaccctagcttagcacaaacaacaacagaggtcatctgggttcaagctcttctttctgagattggggtcaaaataccaaagccaccaactatatggtgtgacaatcaaagcactgtcttgatggcagctaaaccccattctccatgcaagaacaacgcatatcgaattggacctctatttttttcgagaaagggtagtcaacaaacaactctttgttcaacacacactagcttgtgatcaaatagctgacatcctcacaaaggtcttctcctctacacggtttcatatgcttcgatccaaacttagtctggtgtctttatccacactaagtttgaggaggggtgttagttaggtgtgtggttagtagtttgttagctcctttataactgtatatagttatttataactataattagttatttctattattactctttcctttctcgcactgtatatat

SEQ ID NO: 225109 - DNA, 3051 bp, Cannabis indica
aaaaaaaaaaaaaaaacccttagatattgaactataatttctcatttcaatccttgtactactacataatattctggtcaaaaagaggaatgagacactgtaattttacaaagcctatatacacatacatcctcaaactgcatattaatctatatacacagaatctatgatataaatatatagaatgatcaagattagatatgtatattttgtaatacttgaccaaattccatattacatatatatatatgagatatatacaatatataaaagatgatgatcgattaataattatgatcagattcagctccaaatcaattaattataagctactaatcagtcaaaacaagatgtaatctcaaaatacaaatcttattaaaaaaaaacctaatttgaatatcccaacgaaaccatataatcaaaataatacaacacatatatgagattggagaactgatcttataattaattattaccatactcaaaactgccttgaaaaggagttattattattactcctttcaagcacattaaactcgagtgaagcattgttattactattattattattattatgtgaagaaacatgaagatgtcgttgatgatcatgatccccactactacttgctccaatataattggaattcatcatgaactcgctattctgattatgattattatgattatcttgatcaagattacctttgttgatggtattattattagtatgatgagctgaagatctctccccttcaagctctctaaacttgagcaaatacctcttgagtggctcggcgtaatcgtcgaaaccgagggcggctaacgcccaacaaatgtcgtctccgttcaccgtcttacgcttctccttgtggcacttgtcggaggcttctccagtgacaaagcttatgaactcagatacgcattcttgcatagtttctttagcttctttagagatttttgcatttgggggtaaaatctgcttcatgattcgtccaacgttggctattggaagcaaccgatcttgctctttgataaacccatgatgatcatgattatgatgatcaatttgatcctgatgatgatgatgactaatattggtagtactacttggtcccccggatgagcaattattgtagtgatgaaacccttctctctctctattattgcctaaattatcaaccatattctctctatagatcgataataattaaacaaaattaaaatctctctctctaagcctgccaaacacagacacgttgctcctctcactctctctcttgatcatcatcatgatgctttatatatatatacatagatatgtgtgtagtgtgtgtataagagcgcacgcatgtatatacatgtgtatatatatacgttcagttttgtgtatttttatatattatatattaataaagtactgttgctagggttaattaattaaatattaatatcatatgatgattcacttgaaataatataagaactataataagatcgatgagctatatggtataaattttgtttgccatattataaattaattaatatatcaccacttattaattattgtgacgtaatcaattaatattcgatgtatgttaaattaagttttttatttttatatacttaattgtcaagtgatttaactgtagtagacttttttcattttttcgtttttttttccaagaaaatcaatgtaactcgatcgtgacccgcgcttaagttggaaaacatacaacaattatgtatcactgttattttatttatcttatttttttgttgacaaagttggaaaacaattcttaattaattatacgaaatggtaattaattaaagatgcagcttaggtaagctacacgaagtgatgacgtggagatgaaattggtcggtatatataatattaaatataattatagtatgactataagtagactgattaattacttgtggaaattaaagaagaaaacatgataagaatagggtttgttgtttgttgctctctatatatgtatactatatatatatacctaattaaaggctgctaattaatttgatttaaagtgaaagactggaacttgtctatggataaatggtcccccaccttaatgatctcaataagtttgaaactataaatgcttaaaaaattcatgcaaatttgaatttgtggagtagaacatatgcacgtgtgatacaaaatagtgtacgtataaatatatacatacacacacaaccaaattgagacataaaaagaagggattaatattacggataaataaacaaaaattgaataaggttgatgtttacctatctttatagagttttcacatgagattatgtcactttgtatatatatgtatatattatgatgacaaatcaaacataatttacttaaattagtaatattcaaaactttaatattgtcatcctcaagaacctgcgccacctggcctgttatatacatatgtagagatatatgatgattcattagttttaagataataatgtttgaaggatgagattaacatgtggcaattttacctataaatttatttttaatggtgtaaatcttatttcaacataataaatataatacatggtacacattaatagaggggtcataatcttgatcattgtgcctattaaaccttccctacacccaactttctgaaaatgactatttgtgatttgtttagagttgttcaatagtactaaagtataccctatataactttttctttctatgggggagaatttatctcatatccaaggtttaacttgtgatttaacatttttgtttaagggaaccaaccaattaaaaattgaaacgtatgactaaaacttatcaaccctataagactttctagaaaaagattattcctctaaaaaatataagaacaagaatattgctatattttaaaacaattattaataatcactaatacatttaaaaatatgtagttaaaattagtaattctacatcattttaagtgaaattatattcttttgtgagtgtatttgacactactctaaaatattaaaaatatatataca

SEQ ID NO: 225110 - DNA, 4603 bp, Cannabis indica
tggatctatccaatccaagaaaaaaagagtaaaatttttatgtatacatatatattttacgtataacattatgaaatctaattactcatatccaaactaaatgaaaatactaattagtttaattggatgttggatgtattggatttttagacactccatccaacatccgatccgatccaattggatattcaaaaataacatccaatccgatccaatcacaattggatatccaatgtttggcggtcggttgtgattggatcggtcggttgtcattggattggatcgatttatgcacacccctatataagcgtaacttcttttttaaaattgcaaactatgtatttaaaatataagagtaataagtatattttggtacattattttattttaatattaaaattgaattgtgcaattcaaatcaattacaaatcactaggtatataatatttacattttttttaatatttactgagctcacaaaaccaaacaaagattgaacacaaatttgaaataattaaaaagtggaacattttggaaatttatgcataccctagtcaatatggttaaaagtatggttaggggacgaaggtatttataattaataagtaattttttataatttttattaaaataaaaaaaaatgaaatctaataataattttacactcaaaacatgagtattctgtcatttctgctcgttaaaagtggtgccacacttgtagtaattgtatgttaaatcaaataatggcagtgtcagggagagagaaaaagaaaagtcaaaggtacaaatggcttaaaatgcaatcaatattaaaagagaccaatgcccaaagctgtcctatatttctgaatgcgttgttcaaatgcaagggggaacatgccaaattcacggcagactataatttggaacttttcatatccttcaatttaaaaatatcttcttttattgtcaaatattgatttaatcattcaataaaagaaaaatatatatattttttagtaaaagaaaatataaagactttgcttttctacaaaaggtcatagtctcataaattgtattataaatttataatagagcagctggaaaatttatttgattttgaaaaaataaaaaattttacttaactaaatggttgaaatatttaatatatgtgattacttacctaatatatttaaaggtagttgaaagtgaatcaaaaccaaatatgtctaatttttcaagatatcgttttccctcaactaaaaattagtaataaaagctctttcattactatttatttttatttttatttttaaaaaatttattaattaaaaacccttagctctacatgttctaagtagcttcaagtagcctcccgaattaatttccaaaatcaagtgattgcaactaaaaacagataaacagtttaagatgcagatatcaatatatgaaaatgacttttttttcagaactgaactgttaaaattttttatgtgcacttctattataccctacacacacaaaaaaacaatgagataatattcactgacttatttaagaaaagactccaaagttacatgtatttctccaacaaaagtggacaaaaaaggatcatataatattctctttaggatgatgtgtacgtacgtaccattatttcagataacatgccatttgcagtagtactagtgcacgtggctaggcctatacacaaaatggaccacaattgttgacgtgcaattgatttaagatcaattaaaaactataattatattatctcaagctctaaatcatataagtggccggggtgggctatgatgtaaagctagccggacaacacaagtcatcaagacatggcgaccgtgactggctgtttttgtgtgttgaaacattcaacctttctcgaccatccagcttaataagataagactctaataataataataatgtaaagagatttaaagctacactgtcctaaaacctatcccaaaaaaacataaaaagaaaagaaatggtaagtggcaaatagtcaattagtgtattttaataatagacactttaatttaataaaatagttaattatggctgcttatgcctacagggtgcttaaaaaaatttctaaataaggatccaaaattattttttggctaattattaatttttttttgacatgtactaaatcgtgcattgttaaatttaaggacttttatctaatttcattcaattactgtttcaatgattgtttatgtactaaatcatgctccccagacttttatatctatcaaatcatgtccatcaaactttgatatatactaaatcatgccctttgaactttcatccatgttagaataaatttaaccggctaaaaaagttcaggggcacgatttagtacatttcaaagggggaaaattattaattatccttattgtttttactttaggtggctcatggtgtcaaataatatatatcatggctttttgtttagattatattaatggtaaaaattctaaacgtataataattaatatgcaaacgtatgatcaataactagaagaaaactaacttttttaaacaaagaaattatggaagtgaaaaattagaaaaacttaccaacagtggcagaattgaaggttgtgctcccatcaacaacattcctactggccgtgataatggtgttttctcgtccatctcccaaaaacataatattcttctttttcttagacacatccacattctccctatacacaccagccttaattctgatgatgtacctcgtcttactattatccggcgccgccttcaccgcctccgagatagtcttaaagttcccactaccgtcggcagcaacaacaacatccggggtaacactagacgactgcaaaagccttctgtccgcggccgaaagccactgaggccagccgtgttcgtcaacggccgtaaaatcatgatcttcacggagtttacggccattaacggtaccggtaactctcattctctcggtggcgatgtcggtgtcggtcatgttcttgatcatagcaagtacgttactacacatttgctcaatgtgtatctcgcctttgagcaaagcctctcgcacgtgctgatcagctttatcgtgcgagaatccatccaaacacgtctcctgattggtcattgctgagctaagtagtgtcttcagatcgtctgcgtgttgggctaacgacttcttgttggggtaatcttctagatcctcttgaacttcgtgaagctcgtcaagagtctcgtcaatgttctctaaacagtcgtggagagcagctttctctctcttagtcagtcctttacgggttttgtaaagcttactcactgtgaagtagctatgttcaactgcagtgattgtcaggtttactgaggcttcgattacatctttttgtgacgaaacctttttggaactacctgccgctacggcagagtagcagagctctggaaaccttgttatgctacatgagctttttagtatggcgtgagttgttgggtcggtgatgaggtcaccattgttttgagattttcgggaatttactccggcgacaatgccgactacggcggcgactaccagtagtgttgcgaaaagcgctagaaagaccttcttgccctttttgctttctgctggctttccacccaaatattctgttgcgcccggcatttttcctttttcttaagaaaaaagggaaagagatttgggttgacagagtagagagtaggagtatgaatggagaaggctaacttaggtataatatataaagaattgtaaggggtattatggaatgagaatcattgtcccctttcctctttgtttttacaacttggttttttttttttttcatatgaccttttttaaagtaaggaatacagttcacatattattaattattattataatataaattagtctgtaatccaattaacgaattgatgtgaaattttaaattgggtaactaacgtacgaaataaactacaagatttgataattttgtatgtatgcgggattaatacaagattgaacatatagaaaagagattctcggtcgagatacctccaactattaattttggaagttatcatatttaccaaaaaacaaatgagaatgggtaattggacttctgagatagtacaactctttaaatagagttactaaatagataatattttctatcaatatccacaattaattatgaaaatatttatcaatcaattaggtaataaataaatggtgactattaatatttaacattatttagttaactaccaaattttaattttgagttattaaaaaatattaattttaagtcaaaaaattaattagaatgtaacaattaattgtaattaattaccctatttaaaagatattataataagagatattaattaaataaaatattacatgtcttaacagttataagtttcaaagatcagtacgatactgtttatataggtattgttttggtaatcctttgattttaaaatttatgtttgaaaaaaataatttataagcattttttaatttaaaaacaaaaacaaagtgtattttgggtttttttttttttttaatttttactattttaaattacttttttttttttttgtttta

SEQ ID NO: 225111 - DNA, 3108 bp, Cannabis indica
aaaaatggcaaaagttagtatatcatctaaatttccatttatattacacttaactacctagctaccaaatcttaatcccattataaagttttagtaatagaataaatacggcatttagtgtaattaaatttatcaaaacaacaaaaaatagtaacatcgcaaatttaccatttttaataacagaaaatgaagatttgaagacacacaagtgcataacctatttttttttcataattttataaatatacattaaatgatgggttgtaattattacaaaaccaaaatcatttgataattataatctaccaacgatccaattccagaaagatggacgaaaacaatccaccgaaaggaaagcaaaatattccataaaacagagaaaaaaaaaagaacccaaaataataaataagggaaacaaaaggcattttcatgacccaattccacacctaaaatattataaaataggaagaaacactaaaaagtctctaacaagcaatgtaagagcttatgaccacacatcatgtgatcacaaaggcatagaaagagacctcaaatttgtaagattatgtggtttcatttcccacgaagtaacctgatatgcttcttcagggagtataaaaggcaaagatatctcacgaatcatcaattctccacaaaatgggcattcacttgctatggcatcatccaactgtgaccgaagctgtgcaatgaaaattatcatgacccaaactagaaacacaaacccaacgtgctaacaaggcaacacaaattttcaattttcttcaagatagaatcccttgaccaggaccaagaatatgtaacgaactctaacagtgatataaatgtaatactgaccttatctacaggagtcatgctggatatggattcttctgttaaactgccatttgaatctctactggtctccccaccaagtaatgtaatttgcttctgtagatccagtatgtactccgcctgcaataataacaatgcacgaacaaacatcaggtctgaacgagaaagaactgtgttttttataactggaaacaacttaaattgatgtcaacaaatacgaaagaaaatactccaacttacctgagcttcatttgtacaacgggtcacatgcgcaattaagcaatgtgaatgaaaggcgtgcccacatggaaagacatagaaaggtggcattggtcccactgatgtgtagccacgtgtttgatattccctccctgccgttaatattttacgcttacatacctgataatccagataacatggaagtcatatttcggataacatgcaatattaaataaataggtggcttggtgtctcatgaaaacagcaaattcaaggttgacttggagtttaacaaaatgaattgactgagatttgtatggtgttgtagtacaaaagacccaaaaatggagggccacgagaatagtaaataccccgcattcctcttcacattcaatcacagcgtatctttgtgcaagtgcactgatatcatttctgatgttgtctgcaccatgtgttgcatcattcatctcctctttcagcaattcaatttgcttattgtagtcctctaatgatgagcatattgcctcctgcaaaagatacataaaagaagaaaagaaaaagtagactgaagttttagcacagaacaaattaatcacaaaatcagctaaaaaagaagaggaatcaatcatcaaaaattaacagtcaggaagatatctaaggattctcacaaaaagaaaggaaataaacagaaatgtagataccagatactcataccaactaaaactttttgaggaaaaaactaatacactaacaagtaaagaacacagagtaaagtcatccacagtgataataagaaaaacaagagaacagtcaagtgaaagtgtgaatcatatttttgaagtgctggctgttatgtcgacagtttgactggaatgaaagaatgtattttaaagataaaagagtcttctaaagcctctgaaaaaagagagaggtcttattgttattgaagtgcttgttatgtttgtattttttgttttgtttggcagggcattgaacctcaattgaaacttgtagtttataccttaaagtcatcaattaaggcaaagtctggaaagaatggcaatatgtcttctatcttcaaaaggccatcagtttccttgagaaatgctatggccttccggatgttgtcccttttagctcccttttcctgttcaataacatgtttggctaccattagccaaagcttcttcctcagatcttcgtcatcctcaaccttatcagcttcagccatcgcaagctctgggtcaacctacaatgcgagatagggcgattaaagacctatacataacagattgaagattatgatcaagaaaaccatcaataattaaattcatcacctgtagggcaagagcaactgcttcttcatgcatagacatcatgctgtatatatgaacacaagcacgcatgcgcttttccttgaggcaaagacgcaaggcatactttggatcatagagaaatcaggaccattttcccgacctttccaaatttgcattgtaggaatcgcaacaatgcactatcatcttcctgatttcataagcaaaatcaacaataaattcactggtagtctactctctgagcatatgcaaggtcagaacaacattcaatcttcacaaatcacatgttaaattggaaaacaaaattttgtttaaattactgctgatcctgtttgtgtcaaaccactttttatcacactaactttattgactgatacaaaaaattgcacttgatagttttgttctgtaagagatatagaagtcgaacattttgattgatgtgcttcgatttattaaaaaatgaccagagacccataacatgacttggatgttcaaaataaggatagaatgacccataattcacttgttggaatgcaatatagttgaccatgtgcagcttaaaagcatttcttttaacaaagaaaagtaacatagaaattatagtaaatgaatgacgacctgcttggcatacagagtgagaagcaagttgtgaactccagggtcctcattatgcaaacgatgaacacagtattccaaatatttg

SEQ ID NO: 225112 - DNA, 3693 bp, Cannabis indica
cctggttagcatagcagcctgttcagaagatagcatagggcctctactcaaaaccttactagataccttcttcctatttgccattttagatccaagcagggacttgtaataggaaatgaaagcacttagaacctggtctggttcgaacacccttattccagtatcattctcaattgaataaacttgattctgcatgttcctttgtttgatactagcatgaaataatgaagtgttgctatccccatcttgaatccagctaattttagccttcaattgcataaaagactgatagttttgttgtgttgttaagaatacattcctagcagcaagttctagctcatgaagcatagcatttaggggttcttcttgtagcttcccttggacttcatctagttcatttttggcctatatcgaagtagcttggagatcagagaaaccatgttaattgatctctctcatgacaagttttaaggcctttagcttagatactatctggtacatgctggtgcctcttattaccttcctccatacttcagcaaccctcttatcatattcaggatgtgatttccacatacaaaagtacttaaaaggttttcttccacaattccatttgggaaaaagagacaagatccctggtgtgtggtcaaaagtcccctcatttagaaacaaagtttctgcattagggtagctatcaagccagctatggttggctagagctctataaattttcgaatagattctgtcctaaccatgctgcttgttagtccaggtgtagtagcatccagtggccttgacatcttctagctgacagatttgcagacactcaataaattcaaattcagcttgatatttcactctatgacccactctttcttccttagctatgatggcattaaagtctcccatgattagccaattatcctttgtttttagagcatttagatccttccacaattccaacctctccttactatcattaaatccatatacagctgtcaaaaaactgctatagcttccatcaattgttgaaattttcaaatgcataagttggttcgtacatttgataatgtcaacaataaaacggattgcattccatgctataacaatcctccctccttagtgccaagctatgttcatagaaaaacaccaaccattgaacacgttgaggcacaaggttccaatcttatgaaccttgacccttgtttcaaggagcccaacaaagccaacaccttgagttctaatgaactgtttgataagttgttgtttttgctgattgttggctcctcgaacattccagactagaaacttatccataaccaagagagggacctcccccctctctcgtgttatcgatttcttcaacctttggctcctgcactatagttccctcattcccatcagctacatctgccaatacttggaaaccattacttatcttagtctcactaacctcttttttctgttctttgatctttttccccttagaaacaaccagaataccctcatcatctgtggcgggtttctccttcctcctgtcttctttaatcacccactcttgtttggtacctactttctttttgcagtcctctgtcaagtgccccatcccacaacagttgagtacatcacaggtttccattcatacttgacaccaacctgagaattcattccaaattcgtcttcaaacttcagcatactagggaaatcctgcttcattagcacttccaccagaactctaggaaagttcagacgatccctttccctagtcacagaatcaaccattatgggataccaagctggcctacaattttgaagagttacttctgtccctagtatttgagatcaagctcttcaagctgaatccaaatggggatagatttgacatcttccttcctgaaatttgtatttggatcccatgacttaataatgactgaccttctgttaaaaaatatatacccaccattaagcacctggtctctatactccattgagttgaacctaatgatgaaaacaccataggtgagcattctgactttgtcgatcttgtccttccacaatctgttagcaaaaccttccaatatgtgtaatggatggttcgaacccaacacataacccagaatggatggtttctagaaatttacctcctcctcaatatcatctagagtaatcttgaccttactggtcccttcagattgcttcaaagattgctttagatttcgaataacagatccagatcaaagtacaggaggagtagagatcttaccttgagacaatccactgttacattgctgatttgcatgaataaattgcagtaagtcatttcaagctttatcaattcgtctaatctctcagtgaagatttgggagacagtggagattggaacacatcttgaggctcaatctgcgaatcaatattccttctccccatcattcaagttaggcattcatcctcttcctcaaatagctctagaggtgtaattctaatcactgcatcaatcgacttcgtgcgtattgcatcagattcagaatcaggacctttctttctcactttctttgctgaattttttgactttccctgagtttttgatctagtttttgccatagctctaacttcaagctgccagagcaaaaatcaaggaaaaagtctacactaacaatattttattttttctttttcagtttatttttgctacacaatttaaaaaaagaaaaaaaaattatgccctcttcactttaaatcctgaatctgatcaaagatgagtaatgaatattatttgtcgtattaatagatctgccacagcttgcacttatcttttaaaatgtcttttcttcccatattcgaccttggcataatgctaagaccatgacattactttaagaaacgcgaagaagaaaaagtgtcacgacttaatcatgaatggagacattaataccaaggtcattttcaatcgataaaactccatatttctatacgtaatatatttaattattacataatattttttttttttttgaatcaaattattacataatattaatatgcttataataagaaatatgtcatccccgaaaataaataagaaatatattattattattattattattattttttaattttacgtctttcatcagactttgattagacaactataagttaagttttagtggttttactaattttctgagcacatgtgagggttgcccccactaaacttgtcgttacatttgtacagcacatgtgattagagtaagaacatgaccaatcttggtggaccaaaaatgaataaaaatatgaattgaaaaagattccaatattatttaaaaaaaatatgtaaatatttattaattgttgaaaatatatatatgcattatttaatgatgaactatccatagatttctttaacattaattcggtgcacgtgctcattataatccgaaagatctccatttgtcaaaatttgtgatcttggtgtaaatttgaggtaacagttaagtgtcaaggttaaattaaatgccaacaaagagtcgttctgtgctgaatattttggtcgggtttgacctaaacttaatcaacttgcccggacctgacttacagaacctgcctgtgttccctacacatgatcgagttcgagtttgatttgtaaaacataaaacctaaacataaacataaaaacctaataaactaacagccccc

SEQ ID NO: 225113 - DNA, 6524 bp, Cannabis indica
atgttaaaaatttaataatgaaaatttcccctatcctgtgatgtatccaatcccccaaagaagggattaaatacccttggctaatatatggaaactacaaaacaaggatgaaacaaatcaaagtaatggggttgttttttcttttttttttttttttgtaattttgtttttttgtttttcctaaccttggatcacttagaaatttcctcctggaatcaacaatttctatgtttatatcctagacgaacacacacactttagactttcccgtcgagttcagtagaatccataccgtgtttttgttgtttgcttatgggaatagaaaggctcctgcgttctttcccaccgggtttggatgaggcattaccataccaaatcattccacatacagctataaccatgccaagaacaacttgtagatttagaccctcttttccgaagaagaagaatcccatgatcaaaacaaggattgttttcatgtgaccaagaacttggaaagacactgctgtaaatcttccaatgcagatgaactggctgaggttggttcctactgctattgtgcaagacataaatataaacatctgcaaacaaaaaaaaaaaacaaaagccaaagttgaaattatgtcaacctaatcatatataatgaatcaaaacttttaactatatgatcacatgttatgtggtgacctataaccaaaatgaaaaacactgtaaattaatgaaatacgtaccagagaagcaaagttatagttataggcatcgactcttttgcctgtcaaccaatagtcgaggaaggggcctagtaccaaaagtgatgcagcctgggctggggcggtatgtcccaagaggttgaaagaaccgagtgaatatttccgttgaaggtagtgtacgtactgcagacaagagttaacatgaacaattagataatccactcactagatcattttatatatatatatataaatatatatgcatcaaacatccacagagccactcaatacttgacttgatctcatgaagactctaatcactactctaaatcttaaaaaactcgagacaaacctaactccatattgactatgaagcaatgatctattgctgtagagtatagaactttgaagaaagtggtggtcaaaagattcaccaatttggaaagatctaaaaaggtttacgctgttggaattcatgggtatttagtttcccaaaatcaacagccacccaaaaatctcaacttttggtaggagagcattgttataagctaatcgatcatcatattaacttgaattcaagttatgtcagatccctgctaaattaaatatgccgtcctcatatagcaaaattacataggctattggggctaaatcatgcataacttcacatatagctaattttgtctacaaaagccattttatccagaagtatacttaatctctgtccttaagaatagttgaagaataactacttacatactgttgtagagaagtactccaaactgcaacaaaggcagcaacaaatcctttggtattgacactcacatcagtgacagtacaaacaccaacacccaacagaacaattaatatgcttagctttgtgtctcttgaataacggatcttgtcaagaagaacttccaataaacaggaaaccgggatcatactgagctttgcaatctgccaagttaaatttgaatggaaaatgtaacatacaaaagcataatataccaaaatagctaaaaccataatttaccaaaattctaagcatacctgatagaatcccacagaattccacatcagactaacattcattccaacaatagagaagtttgcaaagagaacaaatttcagaagctctggaaggggtaaatgagatggttggatgtatcctaaccctctaagaacaagtgtcatcagagttgtagtagcaaaatgcataccggttaacgttgtagctgcagcaaaatgtgattatgtttaatactgtaaagaaatgataggataagcagcaaagttatatctcgtgagttatgaaagattacaagaaaatatcaaactccaacaacattcgtcaacacaattttataacaaacaataccaaaaacagtcaaaaagagaataaaaaacatagcattgattccaattactattttgaggcttatactaaggttttgtatgtgttaatatagagaatgaaagacaaaatgcagaagttttgcaaagttttttacttgatgaaaaggccaggaagaacaaaatcaataaatgaatacgcatagcctaaatgtacataagagaatgtgtaactacaaaagagaaatcaaaacaaataatactaaaaaaaaaataagtattaacaaaactccaacttaccaaaactgaagccataagaagccattagagctttattgacaattattattccaacagaagtgacaatattgaacgaccatgccgctgcatctagcgttgccttcttgtccgccttgttagctggagccatatttgattatataaatatatatatatatattatgtatgttcctcactgttcaccactgtagcttttatccctcagcccccactaacaaatccattcacatccaacaatgtccaaaacttcttcagcaacaaaatattctaaacaaaaataaataaataaattagaggaataaaaacatggtggtaactgaaaactactatacaaataggtagataactaaagaaaacaaaaatttcacatctttagtccaatattaggtacaagatcaatttcaatgcttcacattttagaatattctattgttatggaataacttttggttatgtaatttttagttcaattttaggtatcagggaacataatagttttcggcattggagggatcaagaggggccaccaaattagcatcctattcacacctaatccttctcaagctcagataacgctttcaattgctcagtccacattaggtagagtaaaacttccatataccatatgtatatgtaaatatatattagaggtaaacatacaagcaatcgaaaatacagatataaatttagcaaaaattaattatatttaacatttgaatcttcatccctacctaattattattagttattactgtacaaaccgtagatccaccattgatacgatactcagttactcaaatttatttgaatcttttgcttagtttcaaatcaatcaaaagcaaaagatcacaacagaaaaaacaatttgaaaccgtaattttcatcaacacagataaaaattaaaaatccagtaagatccggatcagcaagcaaaagttaaggaattcaaaatcagatccaaatcacaattcgaatctagaaaccacaaaaacgagtacagaattcaagtcaatataagaacagatctgacaatgtgaaactaaacaaaatcagagtccgaaaatgccgaaaacagaattcattggatctggaaacatacctgaaaaagcaagcgagtggaagggtggggcacaaagtgtgagctccaatggaatggaattcaatggagtgtgatggtggatgaaatgaattatgaatcggatgaaatgagaaagttgagagatgaaaatatggaaggttggtttgtgtgatgggtttttggtgttgagttttagttgaaggtttggcaatggaggagtactgaagagagagagagagagagattccgttgggcaatgaagacctcgtgggagatgggttagtgccagccaatgggagaaagggaaacttcaaacgacgacgttttattaattcttatttatttatctatttatatttatttatttattttgattaacaaatggaatctaatggtgcatatctcttttttattcctttggttgatttttgataatttttgaagtattatagggattttattaattggcaatcctttgagaattttcatcacacaaatgatattgaagaactgaaaattttggaatagcaccacgacatacaaatttaatatcagggtgctaaaatgcaaaaaattaggcaataaggtcgtgacgctactccaaattttctagttcttcaatttcgaaaacaccaattacttgaatttttcttaaattgagatcaacgtgctactaggcaagaagaccttatttaattcatcatctttccatattttttcttgaatttattctattcttcttcacaattaaatttgaaaaatattaacaatcaaacgtaaaattacataaaatacaactaaaacatactaaaaataccttaaaaatctaattaaacataatactaataaaatcctaacaactagcaagcaatttttattataaaaataacataaaaagcaaccttctgcaattttgtgaaaaaaaaggtttaaatccataaaaatattgaagaaaatttatatttttgtaatttttattctttttgagatatttatgaaaatatcttcttctttttttttctttctaaaagggtataaatttcaaataaatatgagtagtgttagagatacatgttaagaggagtgctaattacaaccacttattttaatatatttctcgattttcaaaaatatatgttgaaatatattttttttatggtgatgtttattataattacacattattcttgtaaattttaaatagtttatatcattgaaaataagtttaatttttttcttttattgacacgtatggtaaatttaaatattaaaaatttattgtaaaaacaacctaaaacaattataaacataacgaaaataatagtaaacagtaacttagtacttatttaaaattgtaaaagcaacctaaaacaattgcaattacaacaaaaataataaaacagtaatactttctagacaccataagacaaacctagttattaacataacaaagataataattaaaattaacctagttcttatgtagcattataaaattagcctaaaataattacaaacataacaaaatgtcaaaaacaatatcaaatactaatctggtattttcaaacattataaaagtaacctaaaacaattacaaacataacaaaaacaattaaaaaaaaaatgaaaaatgcgctaaattaaaagcctcatatttatcaaacttataaagtgaaaaaaaaaaatcatacatgtaatttcctttaaaattattctcttcaactagattttgattttgattgtagtaatcagatttgagtgaatttaatacttatttttttatgtgaaacattgcaattttcttagataattgtgtaatttagcttggagtgtaaatgggttgggccaaatttgatccggttatgatccaacttgatccagatcatgtaaggatctgccccgtcccgtcccgctagatcagatactcggatcggattagagtagatccgaccctacttattcggatcggatctgatccgatccaactttttttttttaagaaatttaatattaacttataattttatatctattttaattttgtattagtattatttaatacaatactatgtttgatattgatatgtattaatagattgtgtaaagataatatattttcaataaactttaccccaacaccaactataggtcgggtccgaatcctagtttgggttcgagtcagggtccgcgaccggtacctagtttgggttcgagtcagggtcctaggtccgggtccgagtatcagtctgagtctgggttcgggtcaaagtttgggtccggatcagggtcctaagtgggtccaggtctggatctcggtttgggtccaggtctcgggtccggtcccgatgtcagtcccaatttcgaggtcgggtcgggtccaggtttggatcctagtcccgagtctcggtcccggtcctggtcctggtctgggtctgggtcagggtccgggttttggtcttaggtccgagtctgggtcccgggtcccagttcggttctagatcccggtctgggtctaagttcgagtatgggtaccagtttgggtccgagttcgagtttgggtcccggtccagggtcggggtccgggttcgggtcccgatccctggtcttggtcccagtccagggtcctgggtcctgggtctcggtccggatctgggtctgggtccaagtcccaagggatccaaatcaggggtccgagtttttaattaagtttttctttaaataaattgaaatcaggtcaaataagatccgatccagaaaaaaattaggcggggcagagcgcatctgatccaagatccaataagtatcaaaatatttcggatcagagcttcaacccgctccaactaaatgaatctttttgacatacataaatttagcatgaaatgttatattaaagagcattattattagacataaggtgtccaacaagaaaaaaaaaataagacttataattggttaaaagttttttatacaacgtattagttaaagagatattataataggagttatttcacaaatacacaaaaacaacaaaaaaattgtaaaaatacggtttcaccgaaatttaaatatttttttgattttat

SEQ ID NO: 225114 - DNA, 6607 bp, Cannabis indica
aagtttggttgttgtcaagtcgttttagtgttgttatttagttgcttttgcataactattgcattggtagcgacagagtcactgtcgcatttatgatgctacagttatgcacgcgttagccaatgactttgcccttactcacgtgtgagtctcactcgcttatattgtccataggaccatatatatatatctcactctccttttgcacatggaattcacatccttatcttatttttgtaataaaaaactttataaatagtatctttaaaatgagtagatagtataaatgtttatttttgattgaaatagtataaatatttattttaagttattttagcctaaaaaaaaaaaatgcctttattctttaatctttatagcagaaacaactgtaggtttccatcttaaaaagaaataaaaaaaaaaataaagaaaaagaaactgtaagacccaccgacccacggaaccacgcccccaaaatcccaattatttggaatatccacaaagccgtagttgatttattcattatcattattttactaaacgactctttttatttgcttttactttaaattgaaacgtgcatgcatccaatattaatattaaccaaaattatcacgtgactaaatttattagagtaatttcgaatccatgtttctaacattaagctttatccttttcgaaattaacaaataccacagtctaatttctaaaataagaaaaagaatatataaaatttggcattgcttattaaactcatttcttgctgttttttttctttaaaaaaggcaattggaaatttgggtgaacaattcagtttattttttactttttttttttagtaaaaaagtctaattaatatgaatataaatatatccatatgtggctatatattcacatcaacttctcaaatatttaaatagtagtgttgtttctcattgagaattttgaggaaaataaaatatgtgaagtaatgagaaatcgacaaaaatgaaaatagatggtgatatacatatattaatatatttttttcagctgatatacattatacatagtatagcaaagacaaaagtaattgatccattaactgtaaaatagtaatttcaggattctaaaaaaacgaccactaaattaaaaataataatatttcactcgtggacaatcctcgaccacttatgtttggccacgtggacatccctaaccagtaagtactttaaccgggtaccggtcaatcgagtcattccatggattcccagtactttgtccggcgggaatggccctgagggctttccaaacggcactgttacatttgaaacccgacccgaaagcgatctgccagacccgatcgcccctggaaacccgaccctttgcctctgtgtaggccagttcgtaccagagcgagctactggacgtgttcccaaatcggtggagtgtcatcctcgagggttccatgtgccactcactgagttgcatgttcttttgcaactcgtccagtacggccctcccgccggcgtgaatgcagaaatgctcgaaagccaacttgaaatccggtatgtacggcttcaccttggagttaaatagcttccttctgatcagggtcatgaagaaaagaaactgttctgtcaatggcagaacaagaggacccaaagtggtgatgttcgtcttcaatgcctctccggccaccgccataagctcacgagccagagaaaccccaacaaatcctttttcgtcttctctctggaaaacgcagttgtagtttctgtcatcggctcctttgtgggtccgcactgtgtgggacagaacatacttggaccgggctttgtccccggacttgttggagaggagcacggcggcgccgcccattctgaaaatacagttacagagaagcatagaacggtcgtttccaaagtaccaattgagggtaatattctctgtactgaccacaacggcgtaagtatttgggttcgctcttagtaaatccttagcgaggtcaactgaaattaagccagcactacaccccattcccccaagattgtagcttttaatgtccgtgcggagcttgtaatgattgacaatcatggcggacaaggaaggtgttgggttaaacaaactgcaattgactattagtattccgatgtctctgggtttaacccctgttttggcgaatagtgaatctaaggcgccgaacatgacagtctcagcctcgaaccgagcttcttccatgtttagatttggtgggctagacgtaattccacgggggaagtaagtctcatctccaaggccggaccttgtcgagattctcttctgataatggagcgtttcatcagtgaaagaaccgctctgctccgacctcttcaagaatgtctctactgacattttatgctcgtcgccaggtttgtaacacgcgaaatccacaaggtaaaccggtctggccctcttggtcaagtacaaggccagtaggaagagcaagaaggctgagccggccagtctggtggcggtgtccttgctttcgagcccaaacgcttggttggtccaaatttcaggaattcggtcaagtttcagaccggtgagttgaatgattacagatactacgaggggaattacaacaagagacatcagaacagtagctgcgttgcatgaatagccataaccaagtctgacgtactttagtttaacagactgtaaaaaatccggcaaccgtcgccggattctaattacggccgatgaagagtctgtaaaagccatctccgccgtcaatctctccttatccatgtctatactgttattcattgtttcttttttatatttcccaacctataatgagctgttattgtacaattttgtgtgtgtttaaatttataaagagagaaaaaaaaaataaaaaaggtacttttgcagtgtataagaagctcaactataaatactccaacaaaaagttgaaattgaaatcaaagccttacacgtttgagaatagtttgatttaggaaggtttttgagaaagagagttggaagtatacctagctaaaccataggaatggtgaaactatatataataaaataaataatgtattatataaacttgaatgaaaagctggaatatattattgagaagagttttatttatttatttatttatttattttttgtaattaatgtcaagtagttccaatgaaggatatatagctcaactaccatcggaatggttgtattgtgggctcaaatcataatcacaactagatcacacacacctatttagactcaaggatttttagcctgaaaaatgttgttatgttgtggttgataagtagccttagggtaaaccacttacaattactgacccaattagtaggctttctttcaagcaagctcaattaataatacaattcacatatttactaaatgtaaattagaaatgtttttttgtttagtggcaattaaaaagggggagaagggatgaattaaatttgagaaatgggcggtgggtgcaggtgactagccagaaaagtaacaataaatgagtagtcaaagaaggtaaccgctaacctatctaaaacacgtatgaaaaaactggtagacagtatgacttttggccacgtacgtatgtgaatgactgaatgttatggagcttagtaatatataaattttctcaacagacgcaaactataaacaatttaagtgatatgttttatacaagtttggtaccaaaaatataagatttagctgaacaagattaactaatagtactacaaactacaggtaatgttatatatatataacttgtttccaggagtcaaggaaccattccactagacaaagtctctcacgtatcacatattgatgagttggcactgtcaagaaatctcaattaattttcatattaatgcactttacatatcatattgatagatatataattaattaattttatttttttttggtattataatttcttggtgctgtctggtcactctggttctggtgtgtgaacccgttacgattaattattataggcattgaaatgagctaaatgaacagtgtatgtacagtttgactcgattttttgatataggtttattgtcattttctatattaatttattttgagcattatataattttaataaagactcataactactacttgaaactctaacaacattaatcaatttgacaattaattgtgtaccatatatcactaagagaaccgttttattttcttgttgattttacttgaaggtttctcctaattaaaagaactacttataggttaattaattagtgaattattttaattatgtaccgaatataaaacaatgaaaacaaggcaactaaccccttttgaaatttgggaaattataaaagtcaactagctggccacatggaccttaattaatttcatgcttaattgattaatttgatcagtttttatttttcttgggatatgatgcttgattttagttaaattcgtgagaagtttcatctgaatatattttaaataataatcacaataattatatcagaatatatagctgagtctgatatctgtttgcttgtaattaattaattaagagcctagcttgtaatttccctatatataataactaagttctctaatcatgaaaattgtcaaaatgaattctgaaaatgacattttttcagtagtgagaaatcgagaattatatatatatttggcgcattctcctctaataatttgttgcattttttcttcattaatttatttgttgtaatataaaagtagtactaatgcaatactgaatcagtgaggtgataaatgataatgattgtgatgttaaaatacgggggatcttttgggatcaaatatattatatatagatttatatatcagtgtcatattcaagctttaattaattaattgatccgctaataacaaataattaataaatctcttatatgcatgtgtttactcttggattttatagacttatagtaaacccaaaattagttgtttttttgtttgttgagaaaaccaaaaattaatcttataaatacgtacgtacatgtaaaagatcgctacgatatttacattataattaaaacttaatgaaaaaatattagtcagcattatgactttatgaaaacaatatgctgcatataacatcgtgaaattataatttagtacaagaaagaactttagagtacttgtgagtgtaattaatgtggtataagataatgcattaaacttaaagagtattaatattggaatcatgtaacacgatatcaaatcagcgattgtataaaattgaatatcaaagtgataaccaagttagttaaattcgtttttactgttattactgtttcattagtttgttggtgtgtgtttgttttctttctgcactttatcaattctgttatgtaacagaatttctgttttgtaattgtattgaaatactctctataaataaaggaaattgcctcagtgtagaggtaagagttcaaagcattccttgtgttctctctctctctctctctttctctctttctctgcttctcaatcttcatggtatcagagccactgacctctgtcaatggcttcctctggcgacaactcgtctccagctggtgtctccgattctggcgttaatccctctgttacagcagctccttcgtggaatccattctctcattctctcacgtcctctctcaccattaaactcgatcgcactaacttccttgcttggaagtctcaagttcttcccacggtgattggccacgaactcgatgagattcttctcactgaccaatctcctcctcgatctctccttaatggtaatccgaatcctgcttttcaacaatggcgcaagaaagatcagcttcttctttcttggctcaggtcttcgatgacagaaggcattcttggcacagtcgcaagttacaccagttctaatggtgtttggaaagccctggaacaaaagttctctagtcagtccaaggctaggttgcttcaactcaagagccaattgtccaatctgcataaaggtaaccaatcaatttcagattatgttgacaaaatcaaagttctttgtgattctcttgctgtagctggtcatcctatttctgatattgatttggttctccatctgctcaatggccttggacccgagtttgactccgtggtatcgggaattacatctcgaagtgacaatctctctcttgaagaagttcaggccttgttaatgtctcatgaaacaagactcgaacgccacactacaatgatggatctttcaacaaagatggcagcaaatctcactttcggttcaagaaatggaggatatagaccttataacaataatggcagaagtccctcctctgattccttctccagaattccctcaaaacctcctcatccatctcaatacaccagatctcacaatccaaatagaccattgtgccaagtttgtatgcgctatggccatactgctccaacctgtcattacaggtttgacaaaaattggataacccccaaatcggttgttggcgattcttctccacaagctcaccttactgaacatgttatagactatgatcctacagcctttgttgctcaaaatccctgattttggtgatgatca

SEQ ID NO: 225115 - DNA, 5788 bp, Cannabis indica
ctatttaattttttttttttttttttttttgtcttgagaatatcctgggaccaaaattatactgaatgaaaacataggagagaagctgaaatgcaaccttaaacaaagtgaagttacaacaaaagaacaaacaagcatagagtctacgagtatctttctaaaatattaaggcctacaagtagctaaaaaacataagaacaatcagattttcatttatgatatgattttttttttttttggaaaaaacgatatgatatggttcctagtaatatatatggctcaaaattaatgttttatagtaaataaataatatagaacaaagagtagcaactaaataagtttgaaacaagttttattgtctatagtgttgtctgcaagtatttggaagagggcagagaaactactttgggttttactaaccaaaatggaaagaaaaacttacgcagctgactaaactggaaaaaaatgaaattggaaaaggtttttgaacattaattgcagtaaggtattaatagtggtgtaaaattatactgtaaaaagcattgttattggatatcagtagtgtctagcatctctaaacatattactttgcgattgactagcgatactttttaaaagttattatattaaactatataaaacttgatacttagttggactaatagcaatattgacatataaaaaggtgctaagtaccactgttgccttttagtatttccctattgtaaagtctgttagagaaatactaaaaggcatcagtagtgcttaacaccctcctatgtgttaatatcgttattgatccaactaagtattgagtctcatataatttaatagaataacctttaagaaatatcgctagccaaaaaagacatcagtagtgcctaacaccctcctacgtatcaatatcgttattgatccaactaagtatcgagtctcatataatttaataaaataattttaaaaaaatattgctagtcaattgtaaaacgacacatctagaaagtggtagataccatagtacccaataacaatgctcaatttgttaagtgcatatgtagcattttaattgaggtgtcaaaatttaagaggctgggacagacaattttgctccaaaaactttggtggttaacgtagttaaaattaaggaaacgaaaaccctttagtgaactttttgtttggtgaaaaaagatattataagattttgatagggttcttggagtctttacacaatgaggtaactaagtttgaattgcattccttttcaaataaagagtttatgggcagtagacctatacaatctgtagttatttcatatcaacacactaattgaaatgtctctcaatctaacaaaggttgcatgaaagcttaacacttaaaagcaaacttcaaatgagaaattaaatttctatgaaatttcaccttaattacaagtaaatacagtgagcaacagcagcttcaacatgacaaatgtttatcatcttctatactagcataacagcaggagcagaacttggagaaaaatagagcccaggagagaagaaacaaaatggagacgtttcgatcaactagagagcaaacattatggctgaagctggaactaaactcccttctctggttggttttgatgagttgaggatgacacagatggttttcctagaacattaagaacttgaacccgctgaagctcttttgctgcagtaaggatcaatatcgaatcaaagcatatcaaaatagatatataatcaacagagttttttttgtaactgatgtatataccgctgtacaactaaggcagtttagctgctcaaattttaaaacaaagcattaagaaaaaaaaacatggccttccgtccgtagttattgccgagaaataacaaaaatttgattcggattaaaagttactgattctactaaaagagaaatccaagtgaaaggtttcgggcctctgttaatgtattcagtagtcaaaatagaatatgatgccataaaagaaacgaagattgctgaaaacagatattagatgactattatgactgccaatcaattgacagctaacgaagtcacaagggtgtcaagataacagcacccgtgtaagcattaattcacaaaaataggataaggaaaggtgaatcataaatttgcatcatatgattgtgaacttccttgttctcgctctaaattttctgaagattataaccaaaccattttctgtcacaaagtaagcttttgttttttctctctcccttctcctgatattgatggtcatccaccttaacctcacaaacattggaattttagtgaatttttaaaataggggtccctataaattatgaatataatgactacttggggttctctatattcttatcatcatagttttctgttagtaaaaagagatatgtcgagcaagttaagtagaaaaataaaacagaaaaaattatatgatattttaccttcttcaagtgatagctgaattgacctcttttccaactcaacagcatgtctgtttagctccactgaggagagtgaccaaagcactaacagaatcaattaagaaggcaatcagttgatgttattacaatataagcaatgatacactgaagcattaatgaaaaatttcagcattcaacatactcttaatatagtcaacttgctgtgattggtccaatttgttcaataacgaatgcaaccgacaatatcgatcttcccagtgcaaatttcttagagcttttaaattacttgataaaggtgtatcagaaacaaggggatcagtggattctttagatgctaactgcataccagacttttgaggaaggggaacagaaggtttcctagaggagatcatggatgatgtcattgcaataggagaatgtccaggtaaacaagatactcctgggtttttagtttgtggtaatggttggatgatttccttctgctggccaaatggccttgactgaagacgattagtgttggtgtttgtgtttgtgctatcacaagtgctgctcttgcctaattctgcctccgattttctacggacatagacaaggtgcccatttgtgaagttactgtttgaagaacggtgttgagaagggctttctgggcactcaagtgagtctctcttggtgccagaaagtttaatagtactggttaaaggacttgtatcctttaaaagaggagatttttcgatagagttgggcactctgactctactgtcgttttgcaaatctctcaacacggtcttctttacagcaactggcaattgcttatcactagtaggaaattcagtttcagtagtgcccatcccatattccctaactttggaatctactgtttgttgaaccattgaagtaattaactttctgataaaaatgaaagatcttcattagaaacaagcaatcattaacaacttagataaatagaggagaaagtaagctagactaaatagcccattctacgtaagcaccctcgacaagtaagctaagtaaattcttgcatcagtcataataataagtatttagcaaattttgcaaacagaaattgatccaaaaatatatatctagtctgtttacttatgagatcaacatgttaatgacaactctaaacacacgatataaaggccaaactgcaagatatgatcatagatcgggtacccatggcacaattccacattcaatactacatcatatataacatcaaagaaaaatttgatagaagatcaatttgcagattaaagaaaaataacctcggattgttttttcctctgttaaaagtctccggaaaacaatgaataggcaataaaattttcaaaaaaaatgcccaattaaggctgaacaaattaacataatttactttatcattccaaattcaatctcataaaactctaaacgggtctgctaattattcctcaatgcatattattttcataagagcatagacataaatgagcgtaagattttcttcataattcgattaaattttcaatgttaaaaaattcaggatacaaaatagagagcatcacctaaggcaaatcacttcaattaccaaaaattcagaaacttttcaaacatggaatctaataaaatcaaaattcaagaagacccattcacttatatattgaatttcacacaaagaatctaatgcattgtgatatgatcaataggtgcagagaacagttccaaattaaatatctatgcctatgaaagaatgacaaaaacaaattatacataaacacgcacagaaaaaaaatttattgaactaaagttgaaattgaagctgaagaggaaaagtattaccttagctaattggagccatttcagcgagagagaaattgggtgaattgggtttcataagcaacaagctttgggtctaacataataacattgttcgggacgcgattttttattttttatctattcagtcccttcgtaaattgcagtattggtccttaaagttcacaatatttcatatttgaccccaaagatccgagatatgtactcttttgacctcaagagatggcacggctaaaatctttttccccttaagaaaaactaattttattattaaatcaaacattttaggcgggtgcaacaaaaaaaataagcgggtaattaatttttctatctttcttttctttcttttttttgggaaagggtttaaatattcatcatcaacatatctaaatacacacatttaatatattatctaataacataaataaccttcattaattaaatagatattataacgtgacacgtaaacatcatataccgtaatataaaaataattgcttacgagaattgaaaatggaaactgaccacttcacacctgaaacacgccatctccttcattaattacgactacaagactttgaattagcacgtgaaacacaaaccaaaatttacttctcataaaacaataaatcacaaattgaaaatcatttttttaccaaaaaactccattaatgattaaaaaaaacctttattcacaaacaacttaaaatcgatcatgagttcagcaccaaaatcgtttctcaaactaccgacaatagctgaaaaattagagacgaatcgttactggataaaggaccaactcaatcaacactttaaaaaaaattgatccaaaacttcattaaaggctctaaagcgaaagttgatgtcttgtttttcacttcatttatatacctcttttgtgcattattgttgtttcttgcgagatttggccctccaaaataaccaagatattctcaccctcaacagggagaggttgtaaccttgagttatccgagttattgggcagactctgttcatttccttatggcctcacatattgcctcaaataacctcgtgagatgagattctcaatttcatctttcagttgatagtattcttcagtggtatgcccgatatctctattgaaacggtaatatttattaggatctcgcttgtttctcgcatgtctcattggatcaagtctgcaaaatgcaacctaattcttgttagcgagatagatattttcacgagtttcattcaattgagtatatactaagtaaatgggaacatatttctcatgcttcttttgttttttttttgtccttggatgagtctctctactcatccttcctcttggtattcgagctaataggatatggatttcctacttttgtggtcacagtgctcgctattatggtacttgtgctgggtttatctcccgagccagactttaacagcttaatttcatttcgcacctcttccttccttacaaaaatgtgtgctctttcattgaactcatt

SEQ ID NO: 225116 - DNA, 2410 bp, Cannabis indica
aaagtaaagtaaaaaataaaaaaaaaaaaaaactaaacaattcaagttgattacactagatacgattacattataaaaccaatagcacatcaatcgcaccatgtatcaaaatatactacactaatgctagccgactatatgcagaaaattaaaacataaaattatataatgtatattgtattttttttttaagtaatttttttccttccacaaattacggagactaaacattaaatatctataatttctatacctaatatcatggtaccacttttttttagttctcaaagtgaaaaagtctctttctttttgagttttagtacggactgagttgaattcatatatcgagtgagtaggtgtatttgtgtaccaatgaaccataataagcagtggtcttcggcactagtctctccatatgaacaagccagggagaaggagaataaagtaagattgtaatttatttattttatatatatgtataacaaacataaaaaaatatgcttcttctaaaagttttggatctgattttttaatttaaatgattacagattgagaatcttccaatggaaatcgtaggaaagatctttgatcagattggagaagctcgacatgtggtggttgcatctgccacttgtaaaatgtggagaaaggtttggaaggattacacttgtgccctttctttcaattcaaacatgtatcgtgatttccatactagtacatttgaggttataataacccaaactatattccaaacaagaggactgaaatcattgtctattgttatggaatatgatcatgatgatcatcaagagtacttatcttctgaattaatggttgcttgtctcatgcatactcatgattcattgagacaacttcattacagtgctaaaacaacaccaaatatgaatttcatcaacacattatgcagtgcacaaaagttagaagatttagtattaagctttgtcttcatatttggttttaacccttctcatcacaagtttcataatttgaagtcactttcactaaattatgtcactatctcacctttgaatttgagtctaattttgttgactgcatgtccaaaacttgagactttggttcttgttagtcttcatattgacaaaaaaactgagttggatttgagtaatccttcattgaagaatttctttgttgaagatatgaatatggctaagtttataatatcgaaggttgattgtttagagaatctacacataaaaaattgtgcaatagagttttttaagcttgtatgtaaaggagcattgaagactctagagattgatagtagtgatcttattaatattaatattattggcaacacaaataattttgaatcggtggatgtttacaatagcacaattatgtggtcaagcatctactccatgttgatcaaaaaatcatccaagataaagagaattaaactgtgttatgttgatttttatgaggaagatgatgaggatatagatatggagaatttaagttcatctactatggctttgtttatgagtatgaacaataataatgttatggtcctcattggaaaatccaaggaggagtttgatttggaaaattgaggatggctacattcaatgttgtgtacataattttttagttaattagttttatctgagttattttcggaatttttcttttctatataacaaagttgatatttttttagttttctttttctttaaaccgatttttaattactagtaatatttttaatcacctatatattactattattacggttagcttttttttttgctattattaaattaatacaacataatgtaaataatatatatttattggcttcaagagatctttaaaaatttgttggtagttgacatctgtcacagaatttgtttgctaattttttgtttatttttttttcgaatgaataattattttttttaatttgtttgctatttacatggcatgaattaatttatctttttgaaagtataagagttaaattagctaacattgttaaatacatttattaatgtagtcacagcaacggataagattgaatgtttagaacattttggaaaattcatataatttggactttactagttaagagtagagcagtatagatgagatttaaattcattcctgcatattattatattaattataaaataatataaaatgggtggttctactatacaatttttaactgtatcatcatttaaaaaaaaattaatctaatttttttaatagtatatatgttatagttatttaaaatattttattaaaattttaaaaaattcaaaataatttacaatataaattttaatgttcaaactgtctatttcataagcgtataaaataataataataaaaatcaagtgttaacccgaaatgatgtaatttggcaaaa

SEQ ID NO: 225117 - DNA, 1927 bp, Cannabis indica
aaaacgaatatatatatatatatatatatattgttttgtgtttttatatagatgattcatatatgttttataagattttgatgtttttatgtgtattggtatatcttctatggataataattttgttttgcaaataaaattattttatattgataaatggttgaaaaatatacaagttagaattttacggattcaaaattgggccaaaattgacccaaatttcgaatttttgggtttggaggaatggctggtcgtgcatgccccatcctcccccacacacgaggcccccatgatccttctcgttcaatgcctagcatgtacatcacccgagcgtggttgagatttctcagcctagtgcattatgcgcatggctgagtttcttgggctaatgcagccatgcatcccttctgcgcgccaccatggctgccaacaaccataatcgaaaaaaatcacattttttgtgattttagtttcctgtttttacttattaccttattttttcaaattataaatggaaattataaattatttttcaattttaaacctaaaatattaatatctaaattaaaattaattgaggatattatcgagattttaaatcttaaaaaagtaaataaacttgttaaaaatatacttgttagtaaatccaggtcctgataaaatatattccaacataaagcattaggctgaagtgaatattgggtaatcaatatttttgttgtgtgatcagaattagtgttgtggtggattagtattgggtgtgtcttagttttttgagttatactagtgtgaatttggactgctttgagaaagaattgggtgactgattattgttgaaaggataaaatgtctaaaatcaagcagtgtgctcataaatcccaatgcaagaatgcattagaagccaaaaaattcatctcgaaagcggttgcagcaaaataccgtgatttcgttcgtcaaaaagccggtctatggtatataaattcgatcacaatatttatttattttaaatcatgtttaatttttactttatatatataaacaagagaactaagtcgcgcttcgtgcggtgttcccaaatttttgtaatcttaatctaaaacataatatattcatgtgtgtattattattaattactataaaagaattgattatagatttattaatttaattatataattaaattgtattctatcattatttataatttattattttatataatttttttgggtaagggatatcaaatatcacttagaagaaaaatgaataaaaaatatgaaaaagaaaaaaaaataatagatttctaattcatatttttttggctttataaatatatagatatattatacaaatatataaatttgatttgataacctaaaataataataaaaaaaaataaattataattaaatgaagcaagttatcaatcactcatatatttttggtacaaatcaaaatgaatataagaatactttgtttatagtataaagtatactaacaatgtagcttttaatccatgtgggacttttacaaataattaaaaaaaaaacttactaagccatatatcttgtaaagaccgcttagcttaaatttgaaaattagcagataattacggtttaattatgaaattatttattaattttaaattattaatttatgatgatttatttgaattcagaatgcattttatatgtcatgtatagaaatttcataattttgcatattcagtgcccgtcaacattggaacgcggtgtttggctattagaatcacatcttagtatttttagtatagcggggcagtatagttagacattgggaatgtcgggattagctgggattttagaatttcccaaaatatccctaagtgattttaagatagtttagtgtgggcaagggcattatggactttttgccatttgtattttgt

SEQ ID NO: 225118 - DNA, 6859 bp, Cannabis indica
aagaagaagagaagaaaaacttgtgagatgactgttctctcatgcatatgtttgtttttctgcttgcaaatctcaaatatacgtttcttgttggggaatattaatgtagattttctgtgcttaaatagccaaacatgggagcagattcgtctgaaattcacgctgatgctcaaactgacgatacactttatggagggactatttgtggacctattgcagaatcaatgaatgactcaatgtttcagttagtgttttctcactggcgtaatagatttgagagcttgaaggaaacacatgaatttaagttcatgtctgcagctggttctcttatgaaaactatggtattttaattctcttgaaactatttttttaacttttcttttttcagccagctcgttcattttaaagctttgtttttttttggattactaacagtagttttgccttgtttctgtgagtgcccataacacatgtttacacatcctgggctattttatttcacatgaactgaaatgcttgttccttagcctgccagtactctagcatgcacattttgaaagtttattcttgaagtttttaccccttaaataattgttagttggaatatgaattttagataccgctctattttcttcttgaaaagacttcatcttcaccttccatagcacatgtacacacatatgctacttgattttcacaaaattacatcatcaaatcatcttgctgaatgcttgtttcttaatccgtgagtactccagcatgcacattttgaaagtatgtcctctgtatttttttcttgattattgtttgcaggaatatgaatttagttactatcatctcttttcttcttaaaagttcttcatcttccacttgtaatctgtaaccctcaatagcttatagctgatagcaaaagaaatatatggcctcattttgaaagcttaaatctgaattattggagtctgaataacaaccttgtctatgatagcattttacaacctcatagtttttgcctttcctttatgcagatttgcatgctggacttgacacttgaggtgttgccagaggattctaaagagtctcaaacagctcggattcttctttacaagttattttatgatcaaactgatcaagggttgactcagttccttctgaatttgctcaaatcgtttgacactcataaacaagccaaaaggttttttccccctctctccaactcttttagattttgtttggaattttgagtttttctgagggaaaagagtaggaaaaaaaaagaaaaatgttttctacagtttcatataatttattttgtaaactttaaacctttacctttttatttatttaatttttattttttgtaagtgttctcaatagtaaaaaattacttgctatccttccaaataggaacttgctaattaaccacttgaggctagctcaagtggccatatagaaggtaatgtattggggtgggggttcgatgggatcgaatcccagctatgtaactcaacatgtaatttaaagaagcttctaataaaaaaaagggaacttgctaatccatgggactaaattgaattctcatttttcctaataaagatatgatctcattttttcaacccagacgagatagtagtatacctgggggtttgagttatatctcaagttcatagacgtaatgtcaaccctatatttatttgctatagttttctttcatatgtttacatgtaaccaaggatatgtattgtgttccttgaatcttgatatttaagagtttcttctcatacatatttttatgagtattatttattgactttttttcagtgatctcgaagatttggtagaaatgattaataagattttacacttaatggagaatctgcaagcacgtggtacattgagggtatgcatttctttctcccttctttaggccgaaatcatactgctactgaaaataatgtgtctaagaattcctttgaagttgaaacattttcgtcattgaattactctaagagcgttccccttttctcatggtgaaggtttctaaaaaatccaggaaagggagaaagaagaaagcactgaatgataaggaaaccaaagctgaactcccagaagaacattctacatttgagaaagctgaactcccaggagaacattctacatttgagaaagctgaactccctggagaacattctacatttgagaatgaaattggtgtttctaatattgagcagccagcagaaaagggtgatgcgcacaccggtgttgaaaataaaagttctgatgataaacaagaaacaaccacccctgatcatactgatgaatgtgaaggatctgcattggagacagatactaatggtggcaacctgccacagacggagcacaagaattctgaggatccctatggcacaggtgattcttcatctgatgaacaggcacctgagacgaatgaagtcgatttccaggtttcaactttggtttcttcatttgccaacaaccatatcattcagaagctgtgttggttgcttaagttttataagagtaactccaccagtacaaatgactacataataagaatgctgcgaaaaatcagtgatgacttggagctttcgccaatgttgtatcaggtcagacttttaagaaacataaatcttcataatgtttcatggtcatccttgatatacattagttcttaaaaatcattttctttttttgacagcctcgttccttactacattttatgatttcctggctgagaagattagtcctttaatatcattttctttttctgacagttatcgctccttattacatttcatgatatcctggctgagcagaagtcatgtccgtgtcaagaatatgccgatattgttgattttttgacaagtttggttagaaaaatgcttaagaaaatgaaaaagcaaccccttctttttgtggaaattcttttttggaagactcgcaaagaatgccattatattaatgctgaatatatgctacatgaacttggccactggaggaaagaaagtaagagccgagaaaaaaatttgggtgatgtagatgctggctcatcgcagggaaagggatggacacatgtaagcatagcagatgcgcttggtgaagatgaagctgacgttctgatcagtcatgacccggaaaatgatgagtaagacagttctttgaaacttacagaaatgcacctttatgattttcactttttttttctttctttcgtgtgtcactagcttgctgaattcatattgaatataagagattgtgaaattgaatattaaatactgacaatggaaagagctataaattgaattcttcaccatcattgtactgtagtgaagaaaacattggcaaagtgaaaggaaccagtgggtctgatggacaagaaaataatcacaagtctgctctctggaatgtatcttttgttgatattgtaattaaaaaatttctgtctatcctcaaacctatttctcttgcagtggggaaaattctatggagcataaatctcaaagagttgctgagaagaaaggaaagttcttggggatgaatttgatgagaaaatcagaaatctttatgagaagtatgcatgctctgagcaaaagttttatgccttttctttgttactattttatcttaaagtgcgtaaagcatatcatgtgtataattaaggttttgttattttaaatacactttttgacaaatctggaaattgcaggttcaacaatagccaaaattgcagtggccttatagcagaagaacttgaccctgatggcaaaatttcatcatttcaagtttccaagaagcttaaacagcttggacttagatgtgcatcaagaaaaaggatacgcaaatctggcgaacgtaattcttttgaggctaataaacttgatggagaagaaagggtagtggaaactagtggcactattcataactcaaatgattcggagcaaacattgttgagtcaacctacgtaagtgtttaaaagaaaatcctagtatacgaatatgctttagatttattaatcgtttatttggaatctgtcatttataagagtatacatttctaaggtttcaaagcgtatgaaagattggttataagatttgtatgaatttcttaattgagagagcgcctgatttgtcattgtatagattcatgattttgtttatttctgttaatctgttatgatgaattttataggcgtgcaagaaagagagttcgggcttttagtgaagaggaggagagtaccattagatcattatacgagcagtaagtgtcttacttcactttgttgcttgttacaatgatatagttgatttctttccacttggactgtaagaaattaaccaacttcttggctttcctcgattcattcagattcaaagaccataagagatgcagctacatgattgcaaatgcactggatgcggatattaaattgacagctaaccaagtttctcgtaagcttaagcagcttggcttgtatattcctcggcagaggaaatctcgtgccagtgtccatttgagtgatggcgagaacaatgactcctctaatgacaaagagaatgaatccgatgatgaaacattgctatcattaatgaaaaggtaaaattgccatcttttagacttcaacagtcctctcttctacctctgtgcttttaacccaatgtcacccatttacttcacatattttgtctgattaagacgcataacatgaactctagactcttcattcatctttttttgctgtatattgctgaaactgacgcataacatgaactctagactcttcattcatctttttttgctgtattttgctgaaactatctcacatagtttccatttttgctatgagctccagttccatatcttttttgtcgctcattcctacagcaattatctgcagagttagacaaatttatactttccatttctccaatctataataagtacaaaattctccagagatacatttctcattaaatatgtgttaattatggcttcatcagtacatacaggtaaatgttgtgtaacactgggtagtttgtttgttgtttctttttttattatttcaggagcaaaacagagaagagtagagtattaactgaggacgtagcagtagcagagcctattgatgcagagaaattaatagatgatgactctgatgatgaaatcctaacatccattataaagtaaatatttctctcttatctccaaaaaataaataatcattaaaagtgcatgagtcaagctctgtccactgaatttatgttttgaagactttccttatacaaacttaaatataatattcattttgtctcatttcattaatttataattttgtaccgcgttccttatatataacatatctggtctactggatataggaaatcaagggaagccccggttaagtcgaaggaagtaaaacggactcccaccccaattaaaatgtaagtaatgttattgaactttcttgtattttggagctaactagcagacttcaaatttatcagtttctcttaaatttcaataacaaagtgattactggataaatgcagaatcaagcagagtagtttccaatctgcataatgttttccactatatctttgattctctttctttttcattgaagttctcatcattacttgtgcatcttctgattaggaatgtcgacgaagactctccgatattggagcctgcagaaccggataagggtgtatctagcaacattttcagtatggacaacacgagagaaactgaagagatcaccaatgatattaacaatccagtagatgctgtgcttgcagcagacagttcgtacgatttgccacatgaagggaatggtgttgatgatgatttagaagattcagatgatgaaattgagcatactgagttttcaagaagtgctgtaagtagaagaagggtggtgtttgatatggaggatgatgactgagatgtttgctgctgtggtttggccagtttctgattaactatagtgctttaaacggcggctcataaattttatatgtgaatattagatgatattggtctgaggctgacctcccaagttatgtttcacaactgctatcaacggtcatatgattggtttgtatgactgaactgcacggcaaacaacgttctcggaaataggcgaggaaagggttgtggttttggagagtacctggagagagcaatgtcagttcaaaatgactggttggcgcaaacggcacaattattgtcgttcatatgtcgacaattcagtttagagaaattgtaagtaggaaaagtaattgagaaaatgaaaagaatacaatctgctgcaatgcctttctgcattttaacgtttgttatttattgactgctccgcaaagtttagaaatattgatttattttccttttaatttttcggaaaaaatataacaatgaagaatagaaacttacccgttaaaaaggaagctatttaccttaatttttcagaaaagaaaattaaaaaaaaaagttgctttcatttgtttttgaagcaatagcatcatcgatgcatactatagttcaatataacaatgtgatgtttacttgtcataaagaacaaaataaattaatactttcacttaaataaagaaccgtctagtattacaagcagcttgtgaagcaaaacaaaaatcactcaatctaattccgttatctataacaaagccaacacaacaaagccaacacaaaaagccaagaatgtactataccttgttaccaaacgtcaataataataacaataaaatattatcaagcatctctaattatgctctcttcattgcgattccatattaggcgggattactcgctgaatttaagcatatcaata

SEQ ID NO: 225119 - DNA, 3862 bp, Cannabis indica
aaatatatattttatgttttcatcaataaattatattgtggcaactttaaaaagtgaattgaccaaaacacatcattaacacgtagtccatagttgccttactacttctactaataaacttaatatgagaatcaatcactattattatctttgctatccacacaatgataccactaccatcttcgctttttttttttaacgccttatatttacatacacgcatatataaattaatatgtatcgtttttttttttgtgtatgcaccaagttaaataattttaatctaattatgatttttgtccctcgaactttgacatataccaaattatgcccagaacttttaaagacgttaaaaatccaccttgaattattgacattgttagatttaaggacttttgtccaattttaataagaaaagtcaaataaataaaagttaagggggcatgatttggtacatgttaaaattcgtgggacataatttggtagataccaaagtctgaggatcataatttagtacataaacaatcactgaattagtaaaattgaatgaaattagacaaaaattcttaaatttaacaatctatagtctagggagaatttttaacggtcagaaaagttcagggcacataatttggtatatgtcaaaatttaaggggcaaaaatcgtagttagccataattttatcatgtttgtaatataaatattatgacataaaatattcatcttaacccaatgagcctaacccaaccaaccctctatattattgtactaagaagagttgagttgtacaatttgaataatttataaaaaattatattttacctttgaataattttttttatatatttctacagttttctataaaaataatagaaaaagtaacatcaaaataacatacatataacaaaaaatcaacaataaattaacaaacgtacaacataaaaagatcgtattttctgtaaataaaataaaaaaaaattgtgaaagtatttaatttatttagtttttataattattgtttttcttttgttttaagtattttattattttcttagctaatttactttctttctctaattaattgtttcatcaattttaggaattagaatttcctatcaactgaaaaaaaatggtatgtctctgattctttcttggaaattttcttaatcaattttggaattgtataggagtatatatttattttttaacaaatatggactaaataggttattaaaattaaaagaaaccagtttcatcctattttcttaatcaattttagaattgtgtaggagtatttatttacttttgaacatttatagataaaactaaaaagaaatcagattcttccgctctaaaaggagacaatgaaaatctaaagtgcagaaatcaatcttcgataactttttgcaaaacatcctacagattctagattgagaatttaaatttaaatacaagctagtatttgagaccaagttcgaagaatgtatttgtgaatgtatttattaaaaggaccttgtcaacctaaacatcatgattttctttctaggacacttaagaaattgataaatgttttgtatcgacttgatgaattttctaatttgttggaatatagcatatcaacacatgttgcattctgtttgagttgttcttttaaaaacaaatgttaggagaataggcaggaggggactcttttattggtgtaagattttgaggcatgtaagcaagaaccaactcataataaaactgtgaagaattgtgtgaccttaatatagtgaagaattgtgataccttgatagtgtcaaagcaatcaaatcaagctcattatgaatatagaacttgtttgactagaactactgaatgtgctatctttcacgacatggaccagttgcatttaggctgctgaagagttactggacaaaatatatagacaagtgacactagaatatgacaaaaacgaataaaaaaacataggcaggaggaaagaaggtataaatatcatcatataggagagatcattacagatttaattaactataacaattgagtttagtaaccaccaactcactcatgaatttatgtggaagaacttgaagaattcagtaccccatttgaaggtttcttcttaaccatatcagattgatgatcatcagcagtagtagtactcgtggtgcctactttgaatttcttatagatatcacctcggtagaattttcttgttctaataaccgaaaaaaatgacaccatgctgccacaaaaagcagctgcactgattatgaaaaacgccattctataacactcaacaccatcacaagtcaaatcttgatctttttccctttttagacctttggcctctaattgtttcaaagcttctttgtcatataatcgaccagctaccaacacgttgaggatataagccccaactgggcttgccaaaccacctaaattgtacaaagtagcatagtgtttgagcccaaaaatctctgatataattgcaaatatcaaaggccattgagcaccaaaacaaaatccaataatcacagaagcgaaatacaaagagtaagggactgccaaggctatcaaggtatggccaacacaagcaaaaagaagaaccaaagtgagcatagaggtacgtgggaacctgtacgtagtcagaaatatttcagaagcaaagccagaagcaactcttccaagatagccccaaatacttacgagtgagatgaaagttgcagtgctgtgagttggatatcccatagattttcctatctgacccaagttgtcgatcagtgtcaaagtcccaccagcaccacagattgtagcaatgaacaagattaacatgtctacactgaaaagagcttgtaaaatggtgtagtcctcacctctctccggcgggttgaaaatgtttccacaccaacttgagccttcttcttgtgaagtttcttcactaacaccttcactactagagtggacatcaactaattgaaccgaacattgattattttgaggtatgatcacatcttgcataggcagagtagttttggctttccaaatacggtactcttctcttataacaatggccagaggtaaaaaaaccaagagaagaacaataattggagatgttcccacgtactgaactctagtaaacttcagcttgttctgtataataatcaaaaccatgagaaacccagcaagcccaagagaaacataaagaagattatagacgactctgatctcattcggttgtcgaggcatcttaattatccgaatgattctaagaaaaacgaagttaacagcagcaggaagccaagctatgagtaagataagagctttagtattatcaccatacaaagcatggtagagctgtgttatgatagctccgcttaggccaacatagcctttcaacaaccccaaaacacatcctctattttcggggaaattgctgacagaagggaccaaagctcctgtatttgcaaacgtctgggagttaggctttagctccaatacaaatgtacagacacatgtgccacacttggggtttgggttttctggctgttatggcgagccaaatcatgaagtagccggagaagttcatgactactccgacggagaggaccacacttggtggcatgacctcgttgagtagccctgaaacgacaccgatgttggcacctaactcattaaagaagcctacgagattaagtgtcgtttggtcgtagcctagtaatattttgatatctgaagagaaaagtccgaacatgtaggtggcacctgcgactgacatgaccagggttgaagccaagaacataaaccatcggccgaagagtacttggtgttatattatttttaatataataatatgtagatt

SEQ ID NO: 225120 - DNA, 4412 bp, Cannabis indica
agtagagtgtctctcgacattgtttgtgcataagcatgtgtgtttgtcttttgctttttttttttgtctttgtttgctgttcataatgtgtctctttttgtcctctgtttaaacttgaatgttgttgttgagcaagtttaaaagcaacaggatgcagattcacacatgaacatgtaaaatagtggatttgattctggcaataatgtataacaatgatattcaactttgaaatgtgattttgatattgtgcttggaatttgagagtatttttagatcttttgtgcattctcctaatgcatatttggaataaacaccagaaaagcctttttgattgcaattatgcattttttttgtgtgtgctaagaatgtgatacattactgtgcttgttttttcaaggattatgcaagtttcattatgttaagccagccctagcattttggggccttaggcgaaaaattaaaattaggccttttataaagaaaatattattctaaacccacacatgctgggaccacatacccactttatttaagtgcacacattccacttattaaacttttgttaatgtatataatagtaaataaaaaatttggccttgtctttaaaaaaaagggtcttgggaaatatggggccttgtgcaatgacccaagttgcgcttcaggctatactgtgtctttatttaggcttgtaattgtggaagtttcaagcattactgtaagagtcattttgttgctataagggacatagtgaaattttacttggtatatgatctaggacaatcaaagatcaatccccgagtgaattctgaaatacaatgaaatgctttttaattataaagagtaaagagtctctagttaataatgtacctatataaaatacaatatattggctctaatggtttaacttcttaggttgttcagtttatttagtgttagcacgtgcaaagttgatgccaatttaccaaatacatgtgtttggagatgactaactgtcccttctttcattaacaggatttgcacaaatgacttaagttggatcgagagcacccttagcctggaagaaatatcagattctttgttacagactttggcaaaggtcgacaatttaaacaaacttgaaaacagtcttagtggttccagtttggaatctcttttggggagcaccaatgatgttactaggaggactggcatgatgaaatttcttcgtaacgttatgctactttgcttaactgcttttccgcgtaattacattgtagaggaagctactttagttactgaagagctatttgttacaaaaatgaactctgattgttgttcagttaccccatgccgagcactggcaaaacgtcttttgaaaaatgataggcaggtagtagctgctacgtctgattttgtaattacttatactattttctaccattaaggatacacacatattttctctctaaaataacggtatgcatcatcacgaacaagaattccaatttttgaatgggaattaataactgcaaatggtagagtgcaggatgcaattcttgtgttagaattataagttgtttgttttctgagttagattgttagaatggttcagtttacaagaggttgtgtagggcacttggtttataaccccaatttcaacttctctgattattgcaattctgtctggctttgtttcttgtcccattccctagattttagtgctacctgtgtctgcttgaagtagaaagttttctgtaaatgttgatttatgtactttgtgtgtgtaggatgtattattatgtggtgtttatgcacgaagagaagctttttatggtaacattgatcatgcaagaagagtatttgatatggcattgtcgtctattgaaggactccctttggtaagatctatattcttccttgaatgtctttcttatgatattgattttttattgcttaaatgttgtctagttatgatgtttcccaatctgatgctgatcaatactagaatatttattttgataagatcatgagggtttgttctctggtagattgacatcttgatactgtgtggtacatactaaatttagtttatattattttaactgatttgtgactgccaaatattgactgacgcatttcatagtacttggtgacaaaacaaagttcaaaacctaaatagatgtttagatggtgttagtacacacttagaaggagtttggtccaaaaaaagggcttgcgtggtattcattttattcagtgtctaatgttgtgggacttaaatttggtttcatgtataatttatgatatgggttttcttgaacctactttcaatttggttccttgtgttacagtattcaatattcatagtaaatgttgaggatgtataacaaatgattcttttgctccaatgtttgtacaagttatattaaaaattaatgtcagttgtcatttttccactatatactgttaatacgtgaatggacaccatgtgatacagttaaaagattatactatcttcaaaaatatatttaaagcaattctaattcaaaagtaaaatagttggaatttggtgcgtattcttttcctttgttgttctatgactacaaccactatccacatgtctcccttctatttatagtaaagaaatcaattaccttgaataattaaaagaagttttactttcatacgaatgcattgaaagaaaaattagttttaatgcccgtaattcgcagttcacaatactagcctaggttgcccctctggagcctcgttattgtgctgaaatatgatttatacttgttaaattttcagtttattttcttcttttgtataaatttaactgtcccataagtttcttatgcgtttcttgaatgtaaccaatctagcaggagttacagtctaataaacctcttatatacttctggtatgcggagacagagcttgcaaataatagccaggaatcatcatttcgagcaatacatatactttcctgtttaggcagtggtgaaacttatgctccatttaaaggtcaatcgtcaagtatgcaattgctaagagctcaccaaggtttcaaagaaaaaataagaacagtgaaatcggcatgggtgcgtggcgctatagatgatcaatctgtttctcttttatgttcagcagcgttttttgaagaactaacttctggttggagagtgggtatcgaagttttggatcaggctttcacaatggtgcttccaggtatgcatttttcctttgcatttgaaaatacttgttaaaatgacaatacatttcatacggtagtgtgtattacatgcaatgtttccttagttattctatattatgtaccgtgtcttctttattgttctgttctggatcctatatggtatatatgtatttcttttttctccaaaatgttctacaacctcacgatgtatgtattctatgtatgtatgtatgccttttttttttgatacatacatcatttctagtgtccttaagctcatctttataggattccaaataagtggaaggatccctacaaaaaaaataaaataataataagtgaaagggcagtggcatttgacaatgtagactagagctttttttaaacccataatagttaggattataacttatttgtcattgcttcactcctacactacagttgcatcaaaaagtcattgattttgatatatgctttgcttaactgaccaattttctgatacttcatcaagttgattaaactggatttgattgtgcatctttccatataatattgatcttactcttatacggagtagagatgtaacaagccaaaactaagcattacatagccatatgctaatagcctaatactaatattcgagagcttggttctttcctagtgagcagtagctcaatacaaaaataacaaattccccttctccctatttactctttactaacaatacctctagaccagctcatccacttactacaaaaaccaatatacccttttactaacaactcatctatatgtttcctactctttagtggattcctatcaatgcccacctctccaagtatcgctttgtcctcaacagattcattcctaagtgcccctgcagtatgtgaccttcatcatagaaccattctagtgacgatgtgtttccaatcaaattagattgaacaaacaactttagaagtatttgggctaacccatgtagtgaataagcctattgtacactcatcaccatatctatcttgtatctatgtaggcatgttgccataacaaaagagttgttcatgcttcttaattgagcttggagaatcgtttttgaagggcccacccctcttcccacgaatcacaagtctaacgtcaattatcttccacctcgcttgatatgaactctagctcacagggtattaacgacctaaatgaatggatcagacatacaaca

SEQ ID NO: 225121 - DNA, 4604 bp, Cannabis indica
tatctgttactgtcatttttatcatttaaacactttattttattttgttaccaaaaacctcaccattttcggaactaggttagagttttattagcttagattaaataagtattttcttcgatttcacgcaattcccatgggttcgacctcgttcttcacaatctccatactacaataaagattcgtgcgcttgcgagttgataaatgtaaaacgtaccattttggtatacaacactctaccacactctttctaaatttggtgattatgttgcgagctttctaataaaggagtttgaagtcttgaacctccttaaacaatttgatgttctctacttggagctccgtctttacaatagagattacgacttggataccctaatcaagctggactttaacaacatggtctacgattgtttggaagcgtgcctagctatctttgttcttggccaccacccattcagtgtactttttgagctctaccagttcagctttggtgctctcaaagtcttttaggctttggcctttgccaagtctaccatagccttgatcttcttgccatcgcctcatattcagccttaaggctttcaagctcatgtatcattctgactgttgcttttgcactgcgttcggcaaggtgagcatcatgtaaaaattaaagataaagggttagtggaaaattggcaaaatatcagggaattgaaagtcaaagttataaattaggacacttacactaacagcctagtgatgaagggcttgggatagatacacagtgtcatcattggccactatggccgacctctcaacctttagttagctcatggaagttgacacacattagagaaggtccgcagcgaaagggcaatatcactgcccaccttgacttgaaacccttccatagccattttccgatcaactatcttaaaaacaaaaggggattctgaacctttggcttccttcttaatatttttctttgcaacaatcaagctagtggtattgtagacctcttttttccccattcgtatctgtagaggatgatttgtttctctcctcagtcaaggctcggtccctctcgcctagatggaatggtgtgattggaaagaaaatggtgtttgatgaagttctccctttactaaatttcttgggtttgctcggccttgactcccttagccttacctccctcctctccttgtcttctagtttccttttatgccttctccatttcgactttctcattctctgctctctccctctctactctctgcaaagtggccaggtcattcactgcctccaccttagctctcttcttgaccctatcaacattctctggtggccttttcaaaggaaatatcggcccgtcaacatcatcctcatcatcgtctagggaaaccatctgtgatggattctctacctctgtggccaccttaagagccgaaggaatgtccaaagggacttggtttaatggtgccaccaagattgttggagaagtgaaaacttccaaggcacgagggttgacgatggcttcaactatgttggtgggaggcacgacctccttgacctatgatcgggagctagaaggcttgccctttgccttcttgtccatcttccgcaccttatcggtgtaggaattgatgttcttcgcaaaagagtttaacaaactcatttcaatagtgcatggatcctctgcaaaagaaaaggaaacaaggtaaataacttagaaataataaaaaatacatgataagttaataatcataagagactctggtccgatttcaactgctcacatcattgtatcttatattctgtagaggaaactgtataacatcctcgtgccctaaaaaactacgatacttgaagaaactcgggtagttcatcaaggtgaagggatcaaccctagtgttttattgtagtttttctacttttttttatgaattcaaaacagctcatgttttgattgattatagtcatcttctcaggtgaagtcgtcgaaattaacggtggttctctttctggttgactttttgtttcgggtgcgttgggttgttacgtggttgcgcgattgttgcctaggtagcatgaatcctaggttgaaggtgtgtctaagtggtatttgtgtaatttttttttatttaagatgtatatttgtttatttagccagctgaaagtatttttataatattgttactttttttggttaaaactgaaaaaagtccaaatattaatttacttaaacaaacatagaattcctaaagaaaaatagattcaaactttacattcaaaaattcatatatcttaaagaaaacattaaaagttataaaaaagtccaataaattgtgttaaattaaactagaaagtttaactctactataacaaacaaagatttaccttttaaaaaaatgaaacttatttatatatacaaatttattacttaaaaaaaaaaaaaaaaatacaaaaaaagaaaaattatgtgaattaaatttttgttaataaataaatttttcttaaacaaacctaaatttgtagagaataatatccaagtttgttccatcaaattgaatcttttctcaattaattttttctccttttaaaaaaattaaattatttaattaatataaaaattgtgctatttttcttttcttaattattaaaaatgtttttttttcctactttgttctttttaagaattatgagtaacaatattaattattttccttaaagggatgtgatttagtagtgtcaggcaaaaaatactgattaataatgctcacattagcattaaaactaagaaaaaaaaaacagaaaataaattgttataaatatgaaagttcaaaaagaaaaattaacaaatcatatattttaaagattacattataatagtattattagttgagatttttacaccacatactgagattttcaatttttttatttttattgtagggtagaatttttttcaaaaatactgtgtaaattttatactgtgtaatgtgttaaattttcactgttattctacggttattttttagggataagttgaaaaataccccttttattaatcaattaatcaaatttatctctaattttatatttatttgaaacatacctctttttatatgtattgtacccaaaataccttgacataagagagttacatggagagtatcttgaagtgacaggggcaaaattggtacaatgtttaaaaaaagaggtaaaaatgatagactttaaaaaagagggtaaaaataaaagatgacaatataaaaatggtatagaatataattttctctattttttaattgttctactgttgttttaattaacctgttttgttattttacggataaaaagagtatttttataaaaaatttagtgtcacagtaaaactgtaaatttacccaacatttaatacttttgtaaaaattcgaaaaagatattattaaaagagtagggcccagtccataataaagttaaaagggaatattgggccactggtttgttgtgttttgggcttgagtataataaccaatggaaagagatgaacgtgtcatctcatatccttctatgctatcacgtgggctgtcatgggctcctcctcctcatcatcatctgtcatctcatgatcaatgaatggcccctttctctctctctctcacagactgaggaaacaaatagaaacatatccacgtgaaccttcaaaatctttggcccaatgatttctcaaaatcattaactccaatgttccaaaaatatataccttctgttttttcaattgtttgattccattttgaatctcaagctacgaagttggatattgattttggagtaatgcgcatataccttacctttcaattcaatacttcattattattcttattattattaaatcagcattattattaaatcagcattggtatccgagtactatttgtgacaagtactattttataagtattattaaaaagatttgtaaaaaaatatttatttttttaaattatataacaatcgttacttaattatactaatagaaatgtatattaaaaagagtactacacactaataatattttttaacaattatcttataaaataaatatactttgcgaataaaaaaaatatagatatacttccgagactaaatagtaaatacattactgaatactaatacactttgtctttattgttatttggcactttctttacacggcaaatattagttacgaactaaagcagaaaatattttagtactatactcatataaaacatcgagatatgaagtgttactaaatcatcattttctatatctacacatatttgaagttatgaatagtatcgctcctaattaaatataggttttttttttttattattttataataagaattagtgggttgtcatttatctaaatattactttagatcctgatcagttctcgtaaatatgtaacaagatcctctaatattaaaatagtaaaaaaaaaattcctaattataatgttggacaaaaacaaaatctacagattttggtttaaatatttaaaaactttcaaactcttttctctctttaacacaaaaatggcagtaacataaaataatattctagggttagggt

SEQ ID NO: 225122 - DNA, 2269 bp, Cannabis indica
gagtgatctgcctggtacttagaaattgcagctgggccattgcgatcaaaccttactttttccttccaccaagcacggagattatctgaagcaccactaactggttttcccttctcaggaatgattccatacacaaaaccttgagctttacaaacttccatcattttcaacatgtacttcaaattccatcttgtgctcttgacattttcttcctccttgcttgctcttgggactgacgctgctttgcattgtcaactccttgctttcccttattttgctccttgagccgcctcaaaagcattcgatctctccacatccttctctcaagctcgtcaacatccatctcttcatcactataatcctcctctcccactggttctgtttcatgttctaaagcctcatctgcttcccgtggaggagctgaaacaaattcaaaattaccagagaaccccatttcttcgaaaattcccatcgaacacttagtgaatcttttaatccaccaatacagatcagctcagcaaaatcctgctctatatactttttcactcaaatcactttctaaactttgcccaaaaatacaacttaaaattttctatatgatctcttctcctgcaatttaataaattgaggaacaacttcagtcatgacttcaatgagttaggtccacaaataatgcatcagatacgttggattggtaataaagacttcaattgaatgtaaaacaaactaacaagaaaataaaaacaataaataggggaaaataattgaactattccatcataaaatactattagtaaatcaataataactccaggcatttaacttaacggttccactttcaatccattagaaaatcaaagctagtaagcccactaaagagtcttaaagttggcaataagattttcaaaataataatatacattaaaaaaaaaaaagcagagataagatgaacaaagatttatacaattaattacgataaataataaagaaaaaagtaaaaaaataagttcagacagccattaactagataattataatgaagaaaaatttctccaaatacctttacaaagccatggaaacaaaacgaagtattactagtcccagatccagcactcccaaataataataagaaaaactaagtaatgatattgattacagcctaaagtataaacctttgggtttacacaaacctaaaagtctaagtctttgggcatacacaaatctgtaataccagcaaactaagcaaaaaaattgactttaatcatcattttttttaaagaagactttacgatcattatatatatgtaaatatatttgccatcatctttgaccacccaaaaataattttttataatccagcagtaatttcggtaagagtacccaaaccatgttgaaccatgttacagatcaggggaaaaaaaaatcgaaatcatcaatagcaaaatagcttataaacacatgtcgtacattaattcacagccaaaaagatcaaggaaacgacaagattttgtatatattgaaaaaacaaacataaaaaaaaaaaaataagccaaaaacacgacccatttccgttaaaccagttcaggaactgaaaaacaaagttcattgtaagcgaaaaaccaaatcaactaaacaaacgaaaaatgaaacacagattctcaaaatgaaaatactagaaaagatttcattgaaagaaaaaaaattacagtacctgatgataatgatgtttgggattattttttggcagaaaccatgaaagaagaccctcgtgcgagctctgaaagatctctttttttttttcaccaatgtttttcttgaagaaccataaaataaaaagaagaggagagagaagagaatctcaagttttagagagagaaattcagagagacaagagtggcaagctacagaagtattttttttggtttgttgtggagttaatagtggaattgaaccatggttaagttaattataactggggttaagggtgtcaggtgtagggttggctttctggatatggaaatttaagactttttagttagtataactgtagtagtagtgtcgggagggatgatcttgtgtattgtacttttaaacatttcaaccatgaaatttatcaaatgtctttccttacataagacttacttaactgctcttgtcagccttacccaccaaaaaaaaagggtgaaaattaaattgtaaaggacaatatgtagatttgaaaaagaaaaaaaaagttataatatcttctaacatatgaatagattttttt

SEQ ID NO: 225123 - DNA, 5182 bp, Cannabis indica
tttttattttaattttaaattataattacgtggatcaataaaattgtgccacgtgtacactgtgtacacgtggacattccaacctggcacttaacatccaaaaatggatggaaatggctaactactaacggactagtggtttaggtagttttaccaccaaaattttagattagggagttagttgcaaaaacctgtccactttaggaggttttgccgcaaataaccccattttcatattatgaatgaggtgaggttggcaccggtattgtaaacaatccagttatagtgagattggcacttcaacaatccgagaaagaggttaatagtcctcgagggtgcgaaactattgtaagaggtttggaaataccttggtgaaaatttcccagttgtaagggttagtcaagcccgttaacttgtctcgatattggaactcaaagctaggtccatagctttgaagaccaagagtttgcattttctaatccttaaactccttactttacaagtttgaatatttgttataatatattgcttaccttattacttgcttttatttaataaaatggtcaattgcttaattttgtgttaaaagttttaatttaccgaaattagtttaaatttctaattcacccccctcttggaaacatatcttgggctaacactgtaaacattaggtgacttatcggggggctctcctcaaaatcttaattccttttgtgtctcccatttcttgtcgtttaacaatcaactttgataagacatcatggcaaagaagaaaaataaaaggtgataggcgatctccctaccgtagaccccttttaggaaagatcttctgttgtggaacaccattgataagaaccgagtaagagatagtttcgatacctgtcattattagatttcgcacatgactgtcaaaaccgttgccgttggcctccaaaactctctcaattaagccccactccattctatcgtaagccttgtgcatatcgagctttagagccatcaaacctccattacccttcttttttttaatagtttgtacaagctcttgggtgagaatggaggactccgcaatccatctaccgagtatgaaagtagcttggaaaggtgacactagtttgtccatgacgcccgaagtctggttgcaataatcttagaaatgattttgtatgcaaaattgcacagacttattggtctgaatttttcaacagatgtagcatcttctccttttgagatcaaacagatgaaagtgtagtttaattggctctgaattctcccctcagagaagaaagattggaacatttgaataacacttctaccagtaaagtcccagtagtttcgataaaaacatctaggcatactgtcggggccggagctttgagcggatgcatagcagtaacagtgttgataatttcctcctcccccggtatactcctgagcatctcattctccccctcagtaacgagcggtgtgaacaaatcattaaaggcttcattaatcgaaggattgcttgagctaaataagtcaataaaaaatttgttgaaaacctcccctatcttcttttcttgcgtgacccaaatgccttccttgtttttgatcgaaaggatcttgttacaataataattatattatatatatttagtgtataacatatatgttcggttggttttcggtttaatcgatcagcttgctattgacactaaaattaactgtgcaaatgcagttttaacccgaggcagttttatcaattttcaatttgttcgatgttgattttttcggtattcggacagtcggcgtactcagtttgttcggtactcaatttcttttcgatttattggatttttttggtcagccctctaacaaactacacgtacatgaaagcctactaagtacaaactagaattttccctagagaaaaacgttaaaaccgacacgcgcgaaacaaacaacataacgtcataacgacatgcttctcttcctccctcacttcataaccagatgcagatggaaacaacatcgacttcaacatcttcatctcccaatccgaagttccgttattacacatttacttctcttgccttcctctttttcttccttttgagtattttactctttactaaacggactctcgaccccgctgtttcaatctccctctacagagatttcttttcccaaaccccttcttcttcttcttccaacctctcccttccgatccaagaacccatctctccaaattctgagcccgacccattagatatcgaaattgaccctaaaattatcaatgacgagctttcagataaaaacgatccaggttcacctcctgtgaatggagtttctgaggaaactagtcctaaattaatcaagaacgatctttcagatataaaagatggatacccggtgcctgctaacctagtgtctgatgagattgatgctaaagtcagcaatggcgaggtttcaaataaaaatgaagaagtcccagtttacaagaaaagagtttctaatgattttggtgcaaaaatcatcgatggagagctttcagataaaaatggtagtgacccacctcgtagttttgaaagaacggaaaacaagtgtgatttgtattcggggacctgggtgaaagatgaggagtaccctatttacagaccagggtcctgcccatatgttgatgaggcttttgattgccaaactaatggaagaagagattctgaatatctcaaatggcggtggaagccacacgcttgtgatcttcctaggtaactttttggctcttttaagtttccattctttttcttcatcggtttgtactttgtagtggataaaatagtggctttcttgcactcgttggatattatagtacgatttgtttgtaatctgttgcattgaggtatttccttggcattaataagtaggtgccctgtttcgtggtcaatgcatgcattatgcattcaccgattttcttatgagctgagtagttgaaaaactacctacattgtatgccaacaaaagtgttggcttatgagttgcttaacaaagcaattaacacaaaggaattcaataataataataatgaggataaagtagagcagtgcaagccttcacttcactgtaatatgaggagcattaagacgaaaggaatttaatgagaaacccaaagaattcttttagtcaagtatactctaacccagataactgcaagaactagaacgaaagaaagatttgggtatgtttggttgggagaaatgaaaaaacagagtaggaatcagaataggaacgacaataggaatataatggaatacaatttagtgtgcacaaaaagaaattgatataaggatatgaaaatagaaactaaaggatgaatgcatcccatattgcaccaagtttttttattaacttatccatcgaaaattccaaagaaaagaagaagaaaaaaagaaaagacagaatgattttcatcatttcgttgcccttgcattgtgcagaacaattcaaaacatatataatgaaacttttgacattgcttgagatccagaatacatgaacttttcagcaattttgggacacaaatactaatgtacaggtaacaagttcatcactggtgcatcaaatctttcactaagtccaggttttccatgttgtatctattgagttttaaggtttactgcttcaatttgtaactgatagcggcaataatgtcttatcatcttatggtttagtttgtaaatctaggagcagccatgactgattgcctctgttgactctttcctttgtgctactgtaacattgtttgggataattttctgtatttagttatataccagataaaaattgtctaaataaactttatgactaattacttcagtggatttatatttcttttctgcatcactttttacttgtaggttcaatgcaacagacttcttggtgagaataagtggtaaaaaactaatgctggttggagattctgttaacagaaaccaatttgagtctatcctatgcctcctacgcgagggtctccaaaataagagcaggatgtatgaagttaatggccataaaataactaagggaagaggttactatgtattcaaatttgaggtatctttatttatttcttccagtatatattgttttagattaccacagtccaaattcaagacaggagaaatctatgaacgtcagtagaaggattttacgtgctgtttttttatacttcacatctttgtattgtgatttaaattgctttcatgcgactttttcctgaacatagaattggctcttcaaatttattcattattattttgtaggtgtaataattgtagcaagtgtgcttgacaacccttggccaaattcaattatatctcttagaatttatctaactacaacctaccctgccaaatacatacgttttctctttctaagatttgttgagattagaggaaagatgacaaatatatagtgccttttttgctttgttagctaaataagtttatctcggacaaaatctatttgttgcccaacattttaagaacaattttccctttatatttatgtgtatgtttatgcacgtgtgatgttggcaaccaagaagcaatgtaaaatggcaaactgcttaacagtgtgaagtaatgttataggcaggctttagtgggctggcttgttggcacgagttgtattaggcagtgattgggtatttgatttgacctactcgtcgttatgacgtgttttatagagaaggacagtaagaaaaagcattaacaatctccatattctgttgattcacataagaatacgagtgaatgacatttatagttttgttagataagtaggtttcactcgtctaactttggcagtctataatatgtaagatgagtggaatatgtaaaaattggtatccttggaaaaattaattagtttaggacgaatgtgttcactgcctcagaaacacaattaaaagttacttcattttaggataatcaatgctcttatcgtatcaacatatttattgccaattagatggacaaattcatagttaatatctgtaatcattccttttctgtgatcacaccaacttatcactgaattgtgcttctgaatatttgttcagtttaatggcttctctctcataaatcatcttcctaagcatctggaaccattaaattttaccatgcatctctaattccactggaaa

SEQ ID NO: 225124 - DNA, 2162 bp, Cannabis indica
aattaaacgggtcctactacctgtacttaatgatcaccatgttgatcatgagccgaaattatctgcaaagccttatagatctcaataaccaatcttctctccacttcgtccccagaataaacgattgtattacgagctggcttagattttgggattcgttttgctccaaaaacattattagtgttcaaagaacccacgttacctgccaagctgaccatcatgttaacatacccactctttattttactccacagcttcagaggcgatcttccaattaatcgcagtattcgcagcctctttggagctctcaacttccactttcgctgcaccggctcactaccaaaccgcgccaccgctagcttcttccgccctcttgccgcatcgtccagccgccggtattttctccgccgccaaaatcggttgatgtttctatacaagggttttggaagcaactccataattgtgctgagaatttggtaagatagaagtgcaaagaaacttttctctcttttttttcttggttgacgaaaaaattaaactaagtccgttaaatagggtgacggtagagaaaagtagtatggttgatatttgaaaagtatagaaaagctatatatttatagagcaatgtttgaatgaaagggtattattgtcataaacatttatatttgtcaacaaagtccgtaaaatgtatgaccaaatcgtttgccacatttttttaatggttgcacacttgtgtttcttactcaaggagaggttggtgccacccaacattattatattttacattgaaattgtttaatttttaacattattggttcaaagtgaataacagaaaaggtcatggcttgttcaagtagagaaaatgtatatacaccggatctaatgtagtgttaaaaaagtcaacagttattttactataagaatacgtactaaataaataaatttgtaaaactttgatttacatatcatgaattagaactagtaataagttaaaaatattaaggattttttccttttgttgagctaataattaatatatgccggtgtaataagtgtttgctgagctttttcactatatatctagaagtatttgacaatattatacgttgtgattggtagttaaaaggggacaaaccaattgacatttagaattcattaattagcggatcgtatatatatataagcttttaaaaattaggtttatttatgagaaatgctaaagggcaccactggtgactagcatcctcctacgtgtcaatatcgctattggtgcaattaagtatcggatcccatatagtttaatataataatttttatagagtatcgctagccaattgcaagtcgacacatctagaaggtgctaggcactactggtgcccaataacaatgctctttatttatatctgttttctaagtgttagcaaattgcaattaattaattagaagcattaacacgtattaggactatgacatactcatgaacgattgcatgttccaattcaaattcaaagagtcatattggaatagattattatattaatatcattactataatgtgtcaaatgttacttcgatcgaaatatatgtatattttattttgaaaatccgcttaattatagaaggaaaagatatgtagtcgtatgtggtgtacggtagtggtttcttgcactttggtcaattgctgtgctgccatagtactaattttctactttttcttccgaataacgtttggaatggataacccaccgccgatacactgtccatattacttctcttattgatttttctttttcattttgacatcaacttttcactttgctatatgattctccattaatttattcatttagatattgcggaaaaatatgaagtacacccaaaaaaaaaaaaaatggagtacacccaagaatttattaatttaattttttcttcatggttgttgtagttatagtttttttaggatcattctcaaatttgttaaattttttttgaataattacagaaatttttgaaaactaaaatattcaagaagtaaaaaaaataataaaaagcggaaaataagagagaaattttttttacgtggttaaggtattaacaaattctagtccatgagtcagcctattagccttgttcagcaattttgatgaatttaatattatgca

SEQ ID NO: 225125 - DNA, 2364 bp, Cannabis indica
aaatcactttcaaaatttttttaacagttttttttcttaatcaatcctttggattacaaccagacccggacccaaatcccctcctcacagccttggcgctgaacccggcttctgacccgaacccgaatccaaccccggatcttgacccgacttaaataaaatacaaaaaacaaaaataaaaatgaactttacagaacacacttttgttttctgtttttaaaattgaaaaacaaaagtggttacagaacgcatttttgttttttaaaaataaattttttaaaaacaaaaattttacttttattttgtgattaaaaaattaaaaaacaaaagtgttaccaaacggcaccctacttaattcgttttctttatttacggaatttaacagtttataaataaataaaacaggcataacatttgtatttaaggagaagattatatggtgatgattcgaattaatttgagagttaatattgtcaaattgttaatagtcaacgcgtaattagttggttggtggtctcacaccactatccctatatataccatattttattattattggtgtcattttctccaaacttctttcaaaccatgtgttaaaaaatattctaataactctaccaaattatcatatatgcacgatgcttattatactatattgatatgtttcgtctcttagtttctctgatcaaaaaaagattattcacttttaaagtaactaatagggcagatctcaagtcctattaccgaatattgaaattttaaaaatgatagtaacactttccttcatccaataagttggtgggtgttatgaaatttcgccttgattaattatgaaggtttcttttaaaatatatatatatatatatatagttgataatatatactggtcccaactcacaattttattgtatagctagccatttgagcctactatacttttgaccataggttagccttttcttttcctactgttgaagtttactttaattttttgctttaaacaatttagttaagaatatggttttatgattaatataattagcatatcacactgttatgatttagtggtcattattctaactctctcctaggatatgacctgcttgatcatcaggaatagtttcaaacacaaaaagtatatattattatatgtacatatacgcatgtattgaaaatatatacttcttcagatcatcaaagagccaacaagttaatatttatttattttttatatatcactatatttagctggaggtttggcacatatatatatttaaacgttaaattggacactacgtacatttaattagtatactatccatgcatgagttcataaaaagtacgtcgtaataatcagctcttggaaaaaatttaatttgttttctacagagatagtaaaaagatatatatttaagaaaataaataatttctttcatgtaaaaatataattagctataaaacatttaattattgaacagtacacactagagacatagagaacacactaaaaagtcatataaaaacgattttttttttaagattttaaattgtgtaatgtatatgctagagattttcaaaagataaacctcgagttgttctctccttctctggccaccatattctcaagaaccaaatgattagagctcaacaaagcattatcaatgtgttttgcaaattaaattaaattcaaaggaagttgtgactccctataaagttgcatttaattctttcaacttttttcctcaaaacgacaactaattttatctccaagtgaggaacgtatactaatgttttatttacttatattattttttaaaaaatatattataaatttgtttcaaaacccaagtactctgttagaaaaagttattatctttttgacatttgtgttttgatcacatgactccaaatatgtaaacgtcaatcatggagaccttattatatcaaccatcaaaataaatttattattattattagatatgaacaatcaaatttgatctcatttaattaatttaaaaataacttcaaaataatagttttggatcagaagagggactagctaggtatatagctagccttgggagaaataatattcctaaaaatgatgacaatatagaagaaaacaaattttatttaaatttgtaactcccaatacccatacccaatgtcctcgtggcatttatttgtgcaagatataaagtagtaaaaagaaaaagtttcaatagaaagaatattaataccacacacactacatgttattggctttagactcatcacttattatttgctttgaaaatgaagtttatggaaatatttttatacgcaatataattttcgaaaaaatctttcaaatatatatttata

SEQ ID NO: 225126 - DNA, 6530 bp, Cannabis indica
ttgatgatgtaaagtgtaaaccacataaccacagtacataatatgatcttattttagaaagaaagaaaaaaaacgtttacacaaccacatatacatctcaagatttttttttccgggtgtgtggtccatggttttgtttaacaattaacatacccttaggatacacagtacactttttcagatggaagaaacctttccacttttaccttaaaaatgccatacaaaacaaactaacatttttcttgtactgcactaaaagaaaagttggctcattgtattgaagcatatattacatcgaaaaacgacattccatatccctaaacgacatttcatatccccgctctgaaacactacaaacataacatcactctttaaagccagatgcttctcctcgaaatacattatgggacaacaaatcatcaaaatatatatagtaaaaaaagaataccattaaaataattaattaaagaacaagtaaaactactactactacaaaaattcagagcctgttttgatttcagggctcttaaggtggctaagccatcatggctttaatggcttttagaattcaaaccaaacaaatccttgaacgcttgctgagcatcaggaggaatattcatgggcaaaggagccatgaaattcacaagcttttcttgaacatcatatctggcaaaagaagttacaagttagtaagcaggtgaattgtgataaattcttctattctaatttccagtaaatgcactaagattcctagctaatcatatagctgcttcaagtgatgaaacaaacaaagtattattaattaccttatcttgcgtccctttgaagcacgtctatcaacaattttccttttcttggtttgcaaccttttcagagcataaaaggccgtctctgtggacagttataatgtgacaaatttaacctcatgaaatatttagtatcttaattctacacagtgaaataatatggcaatgcttccttctcagagtcagaggaccaattatgaaacaagaaatgtttgttttagtggaaggatttttttttttcaagaagcttagcctaccaaacaagggagaagattttgaccctctctcccacctcgctccctcgattaatcatcattgcatttatttaacccaacaatcattggaaagcaaggattctagtaaatgataggtagatctccataaagaacaaatcttaaacctcggtaaaacacgagcctaatcactgtacctaaccctcatgagtatcttctctacaactgaaacaaacaaattagaattatgaaagaaaagaaaaatattatacactctatttaccctcccttttttggtttttccttccccaggcattatacgttccattcctatcttctcccactcctaccaaacatatagcctaaaagccagcctcaactttttttttgaaaaaaagactaactcgtgaaatgaaactataattgctcaattaatcaaattcagccaaagaaaaggccaaaggctcgacaaccaagcatttccacccttcgtatacaaagcaggcagcatattaacaaggatcaacaagcatcactcatatgtcatgtaaagacaacagaatttgcacaatttaataataccaaacatattgatatttaagaggtcacagatctacgaaaaataatgatttaagcttattaaaaggtacaagatgcataagactttaccattagatgttgggtcaatcgtttcaaaaaactccttcagtaaatgctggtaaaactcagaatcatctaatagttctggatcaccgtcagcctgtgcttcctaccagagtacaagccatacttaattacagatcaaagatattaatgatataattaattttgtggccatttagaaataggatattgaaatacaagtgtaaattatactaatgtttcttcagcctgtattctacataaaatttcactttcacaaataactttacacttattatagcaaaatgaactcaggtatgcaccataagaaagttacctctccctttagattagcttccactccaggaacctgctgttcaaatgacatgcacaagcaaagagataaattaagaaaattataaattacaatagagtccaggacttaataggcataattggcggaaactaaatagcaatccccttattctaaattaaagtaaaaaaaagacctataacttactgtcccaaatacggcaacagttgcttttctttgctgcatctgcttgatcatcctacttggatctctcatataagcagcaacttgttcactaatattctgcaagtaggaaataaaaaagtgaattttgttgcaactctggcagggtagcctgactataaccaaaatcacacagccattacctgattaaatgcttgtagtttgcctttaatagcggcagcaccggttgtcacttgagtcttcctttgccacttgtctactgacttgtctctgaaagcagctattctacaaagtacgaatatgaaagttgtcatgtcagactaggcacgatttataattttaaaatgcagcatatatgactgctaacaccaccaacgataaaacattaagcaggtacatcaaagtgcaagcatgtgactgaagttgtccgagcattgaacaaaagagttgtaatcattaagcataaatactatttccattctgaatcttctgccttgtgactttacagaattgcattttattatgtattcaatatcttgtatgtgataatgtgcatgagtaggaaggttaatggatttactagatatattattttcattctgttggcttctgcatttaacatgattttacaaaatttcatttatgtattatctatcccttctagtgaaaaaagaaaacagtgatcaaacctaaataccatcacagtttttacgtaagactaggtcatcaatatgaaattctgtataaatctattactaattacaaatattaataccaaaagaattaaattatcaattaataaaagtttccaaagaatagttaagttagcttgacaggatattcatgataaaaatgctattatcagttataacaaggcttaaatataatacaaaaatgatgtcatccacagagaacatggaaaaaccaaaagacattataaacacctcataaatgaataaattttaagtatcaattacttttaacttttttttataatttatgtattggcaaaagaaaaaaaaagtgttggggagggggagaaagaataacaagtatctgaaaagccatataaaactgaccatctttaagtccacatagcctgatactatatattagttgaacatagcaaaataatatccaacatatgattcaataccttgcatgcaattgagataatcgagcccaatcttcatcatcactcacagtagagctcttcaaagattgcaaattcttagacccttgtccaggtttaccttaagaaataggaagatatgtaaacatccacctcatttttgtagggaaactctgacatgcagagtgaatgttatatgagcagtaacataatccatcatagtgttggtaacagtgaaatgtattaaagaacaaataaatgaccacaaatatcaaatcatctgattttgtgcacatgtaatttattctttctggtctataattgtgaatttgaaagtttgtaattctctgacagtccaaaacattacattcgaatacaggacatagagtagcaagtatgataagagttttcatatacaaagcctattctactaatctgtgtgatgtttaatcagcacaaaaacaaccaaaaaaatccaaaaagcagatcatacataccatccgtggcttgaataatagatggatttttttcaagtaaaacctgaaataacaaaggaacatgatgtcattgtcagcaaacatgtgacaatattaacaaaaccaaatatgcacatgtccattgttcacattaattaaaacataacagaaaggaaacacaaaaggatttagtacctcctgtagttccatcatagaatccaaagttttctttgacgatgtaattaggtcagaatacgctgcattgacactctcctctgaatcacagaatgaagacctaagtggatcctgcaagtgaaatcacatgactgaccacctaaatatgtttaagcaatttgaatccaaattaatgagtttcaaccatgacaacatacctgtggtaatctatttgaacttgtgaatgctttctgaagcaaaaatctaagctcaagagttttatcccaaagaacctttcaaaaacagtaaagaaaagaaagaaaagagtaataagtttattaatatgcaaacgaatataaaaaataattaaacaaaatgttaaacacccagtgagtgttaaaaccatgtcaacattttctctgaacgaaacttctgaaaatactagcaacaaaaataatctgtaagattttacaaaccagatcctatatatatagtatgtgtgtgtgtgtaatgaatggaatgtaattgttattattatgatagataaatagtatgtcggataaattgaaactattcagggcatcagtgtaaatttgcagagtacaagaacacaccttttgattcttcactgcttgtcctttaagaatatcttcatccttatgacgtttcaaattctgaaagatatttctaatgtgaaaaaagaaaaaaaaaccaactgagtcaccgagtacaactgtttatatgaacagacaaaaagaaagaacaaatgagtttatgtttcttgcaactgagcatgccatgattcatgcaaatgggcatgaagatataagtcttactgctcctggtcgcgaagattcatatattctttctcaagctcttccatctcagcatcggtattttgcttattactattttgattttcttctccctcttcctcttcgtcctcttcatcatcgtcgtcagcactgtcatcctcatcctcgaattcatcatcatcttctatttcattctcttccacctacaattattattacttttatttttctatatacagattaaagaacagccaaataaaaagttacaaagccaaaattagacttacacttagttcatcactgtccatatcaacatcattatcgaattcatcatcactgtcctgagacttttttgaacgtttacaaggtaacaccattttgacctcctagaattcaatacaacaaaaatccttttaagacacaatttaagcattgttatcttttgatgcatacataaaatcctctctgctcagtacctgtcggaaacggccacggtatttcttcggtgggcgggagaaccggaaacgggcgccagaggaaaagagctgctctgctgtcagtggcgtcgaagagggagagagccgagggggtcggggcgtgggattgaggacgagagaggtgaggtcgggaggtggccgtcaccgtcgggaagaaatctttgcagttgcggagggagagaaagagtgacggagaggaacgggactataactactagggtttttgttttcgggagtatttattttcaaattataaattaagtatattttaatttttttttttttgaaagaaaagtatattttaattagaagggttaagtactactataaatatgtgtcatgccataaatacgatgaaagtttaagatatatctaaagctactaaattacattaaattttgtatacaagtataaaaaaaatatggatcatgtcatgttatctcatgccaataaaaaaataatgggtcgaatcgtgtcgtatttaaattagtatcgtgctttactcgcatcaaccaattttcttatataggctaaaattcgttctttacttttctatattttatttttgtgatgagctaattattatttttcgtgtcgtgtcgtgctcaagctcataaattcgaatttcactcaactaattgtgtaaatctaagttacaatgaaagttacataaggttacaaatgcttgtttagtactgaaaggctatacatcttaagggatgtaatttttaatgaagatgaattctcatttaaatatggttttttaaacacaaaacaatcaaaaacacctgcgtctgtctctgtccctttctggtatgcatcttccaccattagcacaccagctgccactcaatttaaacctcaaaccatcagtcaataaagtcagattgatagtgttcatccagactcaccaaacaaaacaccatttgctgactccccttcaagatcaactacatgtgaggtaattaatactgatcatatgtctgctagtcctaatatatctaatagttcactaggtgtatttgttcaacaaaaataagagcttcaccatgagaatgcaaccatggctgaaacatcagttacaaatcatactcatgatatcactactttacaacccacacaccctatgatcattaggtccatggcggaaattttcaagcccaagacatatttgagaaattcaaagtggtcaaatatacgtgaggaacctagttctgcagaagaggcattgtagcaca

SEQ ID NO: 225127 - DNA, 3003 bp, Cannabis indica
ggcgcacccgcacacccgaataccgggttcggttgtgcattccaaaacccgaagcccgaaaacccgaatccgaaaccccgaaaagccgaaaacccgacctgtgtgcacccctaacatcaggttagtcagttaacctttataaatcggcggtttgcttctctcctcgtatgcatggggatttgtgtattacgttggcttatgatttgggtgttcctcttgtgtcgtgccatgataagtatttgggccttgtactgctgggaaaagtaagagtggactctttcagtccattaaggacaagatctggaagaagctctttgggtggaagtcgaaacatttctcctttggtgggaggtccttttgaattcagtaatttaattcattcctacttatgcaatggggttgttttggattcctgtaggtattattaatgagatgcaccgtatgtgtgccagattttagtgggagtgacctggagaaataaaagatgtattggtgtacttggtctcgtctttgctggcataagtctgatagtagtgtgggttttcaggatatgttcttatctaatcaatctttgttggctaagcaggcgattgtatgacttccctgactctttggctgctaaggtcatgaaaagattttgttttcctaatagtaatgtggtagatattgtggagactaaaaggtcctcttttttttggaaaatattttaaaaaaaaaaagttgttaaaattaaattaaattttgtagagaagtcttgtttacaaggtttttagtaattttctaggaaagttattagatatgtttttccaaatggttttttttttattattattattattaatattagcttagataatatactaatgatacacaattttctttttacattaacgattcaattttaagccaaatattgtacctaatgactctagttagattttgatcatatcttgatatggctagttggctattctggaatgggagtaactcgacttattacttgatgaaagaaatctagtgtatttttgcacacttcatgaatatgttgtgcactaaattaaatatgtacttagcatgtaataattaggggaaaaaaacaattaactcttatcaaaaagtccaagtaactgacaaattaactcttattaaaaagtataagtaactgtttgctttttcttttttcaactcttctacgagaacaaatgtttagtcttattaagcaaaaaaacatagttacaaaaataaaaactttgagaacaataaaatgttactttttattttagcaaataattattttttgtgatattgttttttaatttctcttacatcacttttttttttattattatttttttttttatattattttctctattttttctctcctcgtcattttctctctccattctctcacatcactttctctcactattttctctattatctagcatatcatttttacagtttgggggtttgggttcggcatttgggtagggttgagatcgagtctgaggtcgagtttagggaaagtgccaggtttggggcctgattcgaggctgacactgcatttggggccagggttgagaatcgaggttaggcctggagccggaattggagctatgtatgtccaggtttcatccgagctctagtgtctaggtttaggatcgggttgggtccaaggccacgacttgatcatgcactgggggtccattcttgggtatagggttcgaggtctgggcatgggtccgagtccgagtcaagggcacagaccgagatcaaggttgagttaggggtctgggtctggactaggttagggtccgtgttgagatctggtgtattgaaatgttttttttaataaaaaaatctaaaaaattatttttagaaaacattaaacaaacaggtcctataattatctatcatagatgcttggatgattggagcacattgtgaagacacacagggccgaccctaggctaaggtgggctaggcccgcgcctagggcccacccattttaggggctcagataaaaaaaatatctttaaaaaaatatacatattattttaataatttttaagaatatcatttgtctttatagtaagggcccaattttttttttttttttgttctatgacccattttaattcagggctggtcctaggttaaggcgggctaggctcgtgcctagggcccatataaaaaatcttttaaaaaatatacatattagttttaataatttttaaaaataccatttatctttatagtaagggtccaagttttttttttgtctacgactcatttcaattcagggctggccctacagactcaccgcaacttttaaaatgttgtcttataacttcaaaaagaatttaagcttcatattacattctaacctaatgtaacagaagctatggtctttttctataaccaactcagttagcaagttgtttatgattagttgtttttgttagttgtcatttagtgttataataaacagctttggtgttttctttataacgttgtaatcctatgtttttttatacatattttattaaagaaaacttatattaaaaactatcagcttcacaacaaaagctgaagaaccaaagtttaacgtgggaacaaggggtctcacctcctctttactcaaaaagtcaaagaaagatgtcttacagcaaaattatgaccattgccattaatggcaaaaacaatccaaaaagattcagtaaatcgccaatttggagctttcttgaggtgaattccatccacaaatatcttgccagtactcactaggattacttcagaccatgggtggacatgttagaaaaattaataattaacccaagatctatttgtatataacatagaatacaatagtaatatataataattaggtatgtgtacttgattgatccatagcaattatctcaattcgatccacagcaattactccaattcgatagagcaatattattaactaagtcttcctccctagatctctaaatc

SEQ ID NO: 225128 - DNA, 3026 bp, Cannabis indica
catcaatgggcttaggctaaagtcttaaccttttggcatatctttggcaattggcatgccttcatatgaatctttatatattaatgcaatgtgacattatattgtattttataaccttatatgtgatgaggggtttaaaaggtttaacttttgacaactttattggtctctatgggattttgatttagtcatttagaattttcaaattgaatgaagaagaaataaacaaatatagtttccttgttaccaaaattatttggaaagttgattagaataagtgtcattgctctatcttgggctcaagagttgggatgattttgcttatcatctagaagagaggacttgattgtatcttgcaattgttgcaattcttgtacaatatttgaggcataagtatgtaattagccaggaatgacttgaacttctgaccttgtgggactgagaaaaaaccacaaattttgaccatttaagcaacccttcttgggttcttgaattgcacttttgattgcacagattcatatctcaagtttgagtttttttcatagcaattgttatttaaaagttcgaacgtaaatgatttaatggaatgcattttagtagttcaaattgtttgaatttttcactgttcttattaaagccgtgatagcatgaaatttcaattgacatggcaatggaagatacaaaatgaataatacatggtatcgcggtatgtcattggtgaactaattcgtatcggtttaggctgtgtattaactggtctctccccattccagacagttgattgaagctagtactttcttttttatctcatgaaagatgcttctctgactcaactttaagattaggtgatatttatgtgaagtttatctctaaaaacattaccattctaacttttaaccaacttttaaaaaattattttgattaacaatcttatgctagtcttgcttttttgatgttttctttaatgtttgcattttcccctattatttgttcatcacggtggaagtatcgcctaactgcttttctttttctcgtttcgctgatacaattgtgtgacaggactcttcggacggtgcagttggttcagaagatatcacaagtgatgaatcggaaagtgatacaagtgatgatgtagaagttgaagctgaggagaaacctgtttcagccgttgtagcatcacttcagtcatatagagaagctctagcgagtaacgatgaatctaaaatagctgaaatagaatcgttcctagtatcacttgaagatgagaaattaggtcttgaaaagaaactggcttctttatctgaagagatgtcaacagagagggatcgagttttgaggataagtgcggactttgacaatttcagaaaaaggacagaacgggaacgctcttcgttggtatcgaacgctcaaggagaagttgttgagactttgttaggtgtattggataattttgagagagctaaaacacagattaaggtggagaccgagggagaggagaagatcaacaatagttatcaaagcatatacaaacaattcatggagattctatcttcgctcggtgttgttcccgtggaaacagttgggaacccctttgatccattggtgagtcctgtaatttcgtaaaataacttacacacgagaataggtgttttcgggaatatgataacaacattatcgaaagcaagcatagtctgtgaaccccatcaagaaaaagaaatccattttgtagttcacatgatgacttttctatctaatcattggtttgatgcaggtaagctaccgagttggctcgaaatccaataatttacttgttgaacttaaacgaatagtaaaacaaattcgttcaggtttcacgaaggcctggacaaggttttgattctgaacaactcatgattgattcgagccaactcggtgagttgtcgtttggagtaaccgacactacaaaacaaatttgttcatagttaattaactggtttagactagcataatctttcattagcattcataaattttctttagcatagaaaaaatgtatgcagcttctaacatccataattttcatgtctgttgtaaaaaagctgcacgaagcgattatgcgagaagactcagatgaattcgaagaaggggtcgtacttcaagaatttcgtaaggggtttaagcttggcgacaggctattgcgtccctcgatggtgaaggtatcggctggtccaggccctgcaaagtcggagcaagtagcccccgaagaggagggacaagatgttagcgataccaataccgccaaagaggacagttcagaagcagaatcagcttaaagcttaatcaaaaggaaagaaagaaaaattatattaatgtagatcaagttttggaatagttggggttcaaattatttgggttaatctatatttgatagggttgttgtgattgttgttattggaatatttctacttaaatattattttcattgagaaatggatggattggatacaattttgaggcaattgagacattttattttattgattttggtttataatccaaaaagaaagtgttttattcttggacaatatttgtgtttcattgcttacatacaattatgacccagattctgaggtgggtggggttccaaacaagtcctaatgttgggcttttttttctttatttatgatatttggagaaattataatttgaagttttgaatttataattaatataaatacaataattttttaaaggatacaagtacttaatacttttaaagattgtaatttttgttcaattttgtctgtacaaaatctattagtgtcttaaaaatatgacacatgtaagacttatatcttacattattaagtttggatggagctgtgtagtatcatatagtaaatctttttttaataaattttaaatggagatacttgatgaaattgaatgaaaattacaattttactaatattgggtaattatgcattttaaaatattattgggtttatgatgatcataaaattaaaattttaagtatttatgttgca

SEQ ID NO: 225129 - DNA, 3708 bp, Cannabis indica
gagctgcacagtatgtttaaaactcacgtaatacgcctatggtagttagggtgttacaccaaatttcgggtatagcactagcttttaggtgaattctatggttgcctttttcaaaatcccaccaaaactcacgaaccataccatcaatattggctccaagataacttgagagcttggttgtttgcatagcatacataggtagagacaaacccacatattttataagggtaacacatcctgccttagatagtattttcgctttgcaaccctgaagctttgaagtgaggttatccaggatgaaattgaaataagcatgcttttaggggaactcccaagtacttaatattccctccgaaagattcaatccccagagttgtcatgatccttcttttcattccattggaagtatttttactaaagaatactgaggttttgagcttattaacttgcttgacagatcaagaacaaaaactctcaaaacaatgccagtagcctttaacttcattcatgttggctctaccaacctgaattaggtcatctgtaaagacgatatgggagagaacgagccccaaactgagtcttatacccttaattgtgtccttgcagagggcatcctcttaaattctaaacaaaatttcagcagcccaaataaagaggtaaggggacaaagagtcaccctggcgtaattcgccagagggcctaatcttgccaaacgacccaccattaaggtagagattaagggtggtggtggaaaggcactgggatacccagttatggaatttctgaggaaacccataataagaacgcacatggtcaataacctccaactcagtctatcatcagctttcataaggtcaatttttatcgcaaaaaaacctttttttgccttttttcctgttaaaagagtggataatctcttgcacaatcacattgttatcttgaatattccttctcaacacaaaagcagcttaagtaggacagatgagagaaggtaaaataggttttattctatttgcaatgattttgaaaatgaccttgtacatcacaatgcatagagaaatgggcctataatggttggtatttttttttttggattctggactttggggataaggactatattcatagcattgacacccttgtgcattatgccaatccaaaagaagtcagaaaccacatcacaaaagtcttcacccacagacccttaatagtacttaaagaagagaactgacattccatcaagacatggggctttattattacccatggaaaagagagttctacggatttcatcatgaatagggtacttaacaagctccacctgatccactatagtgattctatcctgaataagctgaccactattaagagtctccccaacatccgtgccagagaatgtccctttaaaaaaatcaatgaattcattaccaattaactcccgactagtaatctaaatgttctctttgtttaagatactctcaatggcattcctcctccctcggatagcagccgagaggaagaaaaatctagaacatttatccccttccttaagccaagagattctggccctttgtttccaacataaagattttctttctaaattctcattgagagatcgtcagatgaaacattctatttcccaatcctcggaatccgcaggtaagctctgggaaaagttaagtttctgctccaactcttttattatggtgttgaatttaccaaattgggatctattccagtgcaagagagcaacttgagtggccccaattttcttgaaaaccatggcaggggcccaagagtgaacaaccgaattctaggcatgggcaaccaccaagttactcctttcatctcgagtccagccttcttcaaacttaaagcttcttttaaagttggcttccaacccactagtaagaaggcataacaatctatgatctgagttgctcatctgagacgagcaaacgacagccttcaggaataaattgagccaagccccattaactagacctttgtcgagagtagatttaacatggtttttaccagatccacgattatccgaggtcagcttgtcaccatgaataggaatgttaagaaggcctctagaatccaccaaatttgaaatgaataggataattggtccctccccttagaaccctatcgtttcgaatcactgagcacaaaattagtatctcccaaaatcaaccacgggccaccaaatctatccccaaccttcatgaacttagcccaaaactttttctatgcatggaaatacgggggggggggggggggcatacacacaagagtggagccaagggtgggaagggggatctgagtagaccagaccagaaatatgattacgggaacaagaaatacactcaaaaataaacccaaccttgcacgccaaaataatccctcctgcaccaccaatagtcggcacaagaatattaaagtaaaaatggagggagttaagggtacgtaccagaggagtagcaaaaaatttaagctcagtcataaagacaaaatctagggagcacaaccgagtcacagacttcaattcacgaactgtaaaggtctgccctaaccctctacagttccacgccacacctccaatggctcctatagaggagatttgacatttttctccacatggatatgagagtgagaagacacacgagatctagagtcttcaatgaaattagtctcaatcactggcgaggcgatataaactttttattgaaggaatccctcatagacggaccaataatgcgactcacagattttgagttgtcatcagagtattcttcaaaggtcaccttggaagcttgatcctgctcctttgtgtcccacaaaaagtaacgaattgaaccagggtgctgacgaagaattttcaaaggtttggagcataaagaggatgaaacttcatttaatttcctttccttgataggagtagttgttgataagatgaaacttcattttaattattaacatataatgaaaatttaatttcatttgtttctatataaatgaaatgggaaataggtgaagatcggtattataatgagattttttctataataggcaattaagggaactattttacatattaatcctaggaaggaaaaataaaaaaaatagaaaagaaaactttctatttccaaaaatacggtgctaacaaaaatcacggaggcaactcctccttcttcgagacccagccaaagcacacccatcttaaatctccacgatttttattcaaaacctaagaaattcagctctaacaaaatgtagatctcaaccagaaaataataaaatcccgacatatccaaatacaaaaggtaaaacaaataaaaaagaaagaacacaaatatttctacttctattgataagaaaaaacacaaaaacagcataaaataaaaaatttaaattgtattgctcagagaatttgaataccaaggaaattagataaacttcaaagcttaactagaaacgaatcaaagaacaaattcaaggtacaaaattttttaatgattttcttcataattaagttattttaaaaagttttcttcatggttataaatgttttttagattgtggaaatcaaataagaattaatgatatagaaaattggttgatcttaataaataaatgagattagattacaacttaagaaatactaatgtaacaccctaactagcataggcgtattacgtgatt

SEQ ID NO: 225130 - DNA, 3323 bp, Cannabis indica
agatcctggtaaaataatatccaacatattcatccattgggatatcccttgtgctcctaggttgatcatcctgagtatctgtgggtcatgactacgtgcaacccttgcggccgcagcttagcactccaattctgtatttctttgatttgactcacctagtcacagtcgaagttgactattttctagttccactaatgaaacatatctagtaggatcataggcatcctcacttcgtctctctgggatttcatccccagtgtgctcaaattctctaccatttcctctcccagagcggagagtctcagttgtatttgtcctatgagatttgtgatattctttccctagacgttgagttgtttcccctggttgattctcttcgtctcgaggagtatcgtctgccatggatagaaagtttgagtatttttcaaggagggtattttctaaaaaatttcttataatgctatcaatgaaagcatcaatatgttaacgtagatatttgtaaactaataaataagccttttttgtaataaatatactcaaaaattaaatgaacaatgataataataatagtaataaataaaagaggattgttaacgtggctttgaagttaattctttatagttcacgagtccatcttattcagggattaataaattggatacatgatacaattgataaataaattgtatattgaatgaaagattagtataattctctctctttctcaaattggtcgtcctttgttccctgggtactatccctatttataggagtttagggtgaaagttattcccttgggatcttattgcttgtaaccattcgtgaaacgtgtataatcctcacatttcacatttacatcacatggaataataacaaataacttcccataactactcatttaactttatttataagcagttatactgactgtgcctcattcttctcgcaatgcaaccattttcctttagacgcttaatcataaaaatcagcgtctatgtatatgtcaagcagtacttttcgcattcttccattaaattaatattgagtaaggcattcgcgagacgcttatcacagcatgctaattgcgaggtgaaccatgctggggatgttgtctttagtctttcagcatactcacgagtatgtgggtcaatgaaatgcgagctctttaaataattcattatctatcctttctaaacagtcactgtcgtgtattctatgtatcccgagatggaccttctttttcccgaggcgagttgtctgaatgtatttattattgcataatttaggctgattcatactctagcttcattacacgtgtcaacactatattgctgctcgaaatatgtgtataacaaatactagtttcaagattaaaaaaatatgatagtttttatttttaaagtaaaataacaattataatcatcacaaagtatattttttaatacaaaataacttttccaagaagcacaatcatctctactgaacatttaggtctcaagtcgagtctttaggaaagttggtcgtcgaaaggagctctaaaaggctagcttgtccattcggaagaagtcttatggaaaattggtcattattcgaaaatgatttttggaaggctaactatttcctctagaaaagtgttacgaatagtctgttccaataggctttgtgcctaatttgggatgtcctttcagatggcacttcatcagtttgggacgtccgtctaggaagcatgatacatgtccaaagagagttcaatgacctggagatctcactgtaaggagccagttataagtcaattaagtcttaaatgaattaactacttagttgtttgaagccattgcctttgggattcatatacttgatctatcaatgaagccatcctcttcatttcaaaagaacacagcacaaaacaccagaagcaaagtgcacaagttctttgacagagagttttgattgagatgtagagagaaagaggtgcagaaaaaagagaggattgggatttgggtttcttaaaggggaagcttcggtagatgaagaagcttctcaagaaagagtgttatagagaaaataccttgaaagaatccaaacagatctagaatcgctctcaactgtattgtacctgtgttcttgctccatcaataaaggaagtttcgatggtgttctaaaactagagtagagtcatatatcacattaatctatttgacttgaactagtataattcttggtgtcgatttttacggttttcttgcattgtttatttatggtttcattgtctctgttattctctcaattcttgaattgtgtttggttgatttttttcatttctaattgtttgtttgtggagaataattattcgccgagtcatgattccctccaatatgatcaaaatattagagtcatttgagttggcttgctgatgtgtactaaggcttttaatagtttttctcattaggcatacttgtcacttttactaaactgccctaaactctataaatagacttagtcacaatcattttaatatatagtttcaaatatgatatctacacatttgatgttataataagctagtggtataacggcaaaaattacttggatcaagtccctacttcatgaacgacaacttaaactaccaagtcaacttgttctcatgtggtgtgataacttaagcaccatcatgcttacaggcaatccgattctctattcgtgaacaaaaaacatcgagttgaagtaaccaagatgacacagaactcaaattcattcccgttgttgaaaaatgcttataatttagtagaagaagagtgttggttgttgttaagacaaattgcactttccaacaagacagaacaagtaagaaaagattttttgaaactcatcacaatctttcagctgagctgaggttacaaattacaatgtccattttatgaagaaaacaaaaactaatgaaatgtaccacatggaaaacaaaatcctattataatttttgcttttttatataagaatgctcatgtgaaatgaacaatctcaatttgatataattgaagataaaatccaactattttttcatctagggagaaatctaattccgaccagtaaaaaattattaaacgccatagttattgaaatacgtctaagtagctaattcagctgagactacaaaaacatatataataggtacgtataaacctatatatatatagactaagcaaaaagctacgtgtctcgcacgtaatcaaaatttatgtctagttttttttatgttatttgaaagtgatacaattaaaaattaaagaaaaatattattacttattaggtagagtattattatt

SEQ ID NO: 225131 - DNA, 8319 bp, Cannabis indica
attgatataggacacaccaccaatgaaatgtgattagtttgagggatgagattgaaggattggttcaaaatagagatttattcaattggtaagaatactggtcatttatcctagacagggattacacatggatacttttattcctagaaacatggagccattaatcctcctcagggagtaggacatccacaagctcctggaattcaagctctgaatgcacaagccctgcagggggtacaaaatgttccaacagtaaggcttgttgtagctcccggtcctagaaatccatatccttctagagtagcccagcctgtgctagatagtcatctagtaaccatttttggtggaccacagattaccagaagcacttgaaatgcacaaaaaagaacttgaatgagtttgatcaagatgaaacttgaaatttggtataatcacctactcgcatcctcagatgatgaatttgccaattactttcatggaagatgatgccaagcatgtgcattttccccacaatgaccctgcggtgatagaatgtcacattgcaaataaaattgtttctagaattcttgtagatagtggaaaagaatctacctccgacgctgaataaaaagattgtctccgtagttaaggaaaatggtgatgtactagcttggagtcattctgacgtgactcgaatcagtgcccaagtaatttgtcttgtgctgaacatagatcctaaggctgatctagtttgacaaaagtgaagccccttagatccagtgagatcaaaagtagtgaaggtggaagtaaacaagttgaccaacatccatttccttaaggaagctctatatcccatatggctagccaatctagtttaggtcctaaagcctaatgagacatggagaatgtgcatagacttcatagatttgaataaagcttgtctaaaagactactttctacttccatgaattcatcagatggtcgacgtaacctcggggtacaaactcttaaccttcatggatgcatactccgattacaattaaatcaaaattcatgtggctgaccaagaacatataagctttcaaactaataaaggaagttattgctacaaggtcatgtcgtttggattgaagaacgctgaagctacttaccaacgaatggttaacaaaatgttcaagaatgtactaggaaagaacatggaagtttatgtcgatgacatgctagtgaaatcaaagacttccatgagccatcacaaatatttagaagaaggtttttccattatctaggagaattgaatgaaactaaacccaataaaatgcacttttggagattcttcagggatattcttcatttttatagttaattctggagccattgaggcaaacccggagaagattaaagctcttttagatatgccttcacccagaaaacacaaggaaattcaaaagctaactggaaagattgcagcacttagtagattcatctctaaatcaacagataagtgcatccctttctttaatgtacttcgaggaaataataagtttgaatggacaactaagtgtgaagaagccttccacgaactcaaagaacacctaatgaaggctccaatattgtccatacccattaagggagagtcgttattcctatatctggcagtgtcaaatcatgttataagtgtcgccttagtgcgagaagaatgaaatgtacaacttccaatgtattacgtaagcaaaagattgctgggcacggagtctaaatatcctatgatttaaaagatttccctttgcttgttaattgcttcatgaaagttgagaccatactttcaaacgcatgtcattagagtactaaccaaccaccctctctgtcaagtattacaaaagccggagtcttcaggaagactcctaaagtgggaaatggagctaagacaatttgatatacagtatcaaccaagaattttaatcaaagctcaagctttagcaaatttcattgtggaatgcacggggataaatgatgatcctaaaatattgatcccagagttataagtctggatagtgtatgtagatagagcatcaaatgagaaaggttctggagccaaaatcattttactctctcctcaacggcttcaactccaaagttcacttcaatttgaattcaaagcttccaacaatgaagctgaacttgaagctatgattgcaagcttgaaattggctaaagatgttggcgccaagaacattgagttgtatagtgattcacagctggttgtcaaccaactttctggagagtactagacgaaaggagagaagatggctagttacgtagcaaagaaaagggagttattgcgatagtttaagcactattatgtgaagcaaatctccagggacaaaaatgcatatgtagacatgctagctaaattggcaacatatttagaagtggagaaatacggactagtccccattgcacatctacttactccaagcatggagacactgggggtgtcagccattgatcactcaacttcctggatggcgccaatactaaggtatctaaaatcgggtacactcccaaaagatagagccgcttcgcaaaagatccaatatcaatcccctagatatgtgatcatggatggaaagctatacagaagaggattatcgatgtcatacttaaggtgcatagctggaactgagataagtgttgttatgcatgagatacacgaaggattttagagagatcacacatccaaacccagtcttccaagaatcattcaccaggttattttggccaccatgagaaggattgcactgaatatgtccacaaatgtgagcaaggccagcattattccaaagttccaagagctacaccaatagagataaccctcgtgaacagtccttggccctttaatgtgtgaggaatagacttagttggatcacttccaactgaaaaaagaggagtcaaattttacattatggttgttaactacttaactaaatgggtggaagctgaacccatgaacatagtaacttccaaaaaggccttagactctgtaatcaagaacatcgtgtgcagatatgggcttccacacaaaatagtgtccaacaacaaaatgcagtttgacggtgatcaattcactaatttttgtgtcaggcacgaaatcatcaccagcttttcaattgtggccagacctcaagcaaacagacaagtggaagttttcaacaagattttgaagacaaccttgaaagaagcttcaagcttgcaaagtacactggctagaagaacttccaagggttctttgggcctattgaacaattgaaagaacttccaccacacttgaatccatagtaccttcatataggagaaactgatgaccctaatcgaaaccatgctttacttcaagagtttttatatctaattgaaaaactttgagagcagacagaagttcaactccaaatgaaccaaaacaagattttcaaaaattttaattacaacgtcaaaagcagaagatttgaaattggtgatctagttttgagagaggtatttccaacgtcttaagagccaggagtgggggttataggacaaaactgggaaggtccatatgaagttcaagataaaattagtgatggcacctatcacttgagaaggcaagatggaaaaaaaattctaagagcatggaacattgaccacctacgtgtatatttatttttgttcaatttccatgtacgcctcaagataggaaccattttaataaagaagaaaattttcatttcaaatttagcttttcaaagttttatcttgtaacaagtgatcaaaagtctaaactcttaatcacttcggggtagcatatacattatatcattataacattatacctcttccataaaaaaataactaaattaacaacaagtataagagtaaggagtatcacctgaaattggagctccaagaaactgaaagtaattcactgtcttaatatacttaaaattaatttagtgtaatttgcaattaactcaggttaatttaacttagaagtttagactttgtaattaactcacgttaatttaacttagaagtttaggtttcataattaactcaagttaatttaactaagatgttcaagctttttaaatcactaattagttcaagttaattaagtagttaagtttaaaatttcttggaagtaagtacatttactaaaaagatttgatgcttgagtaattaattaacttgggttaattaaatgtttaagtttcaaaattctaaagtaaaacatacttactaaaatttttctaaaaaaagttgttaaaataccagggttcacgtcattggaaccattttccagggaatacaaacgacttattaaaaagaaaaaaaaaaccaaatctaagcatttaaacgaaagcccaaaagttcagacctttggaaccagaacttgagggagctgaaaattgagattaaaacttagtaaatccaatagataaaatcacaaatatataaatagtatgcaaatttttgaaatatggttatgtacttaaaagccctgctgcaagggcataaaaattatctccgcatatgcaaaaaagggatccttatcccccaaagttcaatgttgttaagaagatagtaagagttggataaaatctagtcaaggcatggctggatccgttagtggctaagtgctatcaggtttaatatcagtggatacctctgggatttcataatcaatcatggaaggagcatcaacagttggaagatcatggtcttctcaccctccaagggtgaagttccaggatcaaccaccgttgccctcactacctttttggcctcttctgcttcagctagttgaaggactggtggcatcagttgttctctgtcttcatcatccgaaaaatccatcatggaattgttgagtttctagatggtgtacagacaatacatgaaagccttctttaacgcttttaatgtcatagcctcctggtcttgcttctcctgagccattctctaaatttggccctccatctctgaaatctttttcctcgattcttcacaagcctgagccatggtttgtttggtagagctcaattcagttgcgatttcctcaacctttttgagagcatccttctcaacttctttctccttctattgcaaatctgaatgaagtttcacctttctctccatagtggcttcgaaaacaattttctcatttaggatttgagtgtgcttgttgtattcctgggatagaagggtgtgcttttgttctaactctttgaggtccatcttagcttactttagatctgcttccaagtcactaatatgagaaagatcctgagtatattcctccttgtatctatctccacagtctctcttagtcttgctctccttcttctgatgagcaacaaccttgtccaaagattcatttactctttgcttgatgatagactccattttggcattagcttcagctagagcttggacagtttgtctctccattattcagcgttggtgcattctaactttaatagttaaagctcataggctagcttattaaccaaagagcagctactctccgcaatcaagctaacttataaaaagagttatgaatgaatcagacaaataaaataggtatatcttttaccttagacaatttaactaaaagtaaacttacacctttggcttgggtcctcgtggtatctaccatgtagatggggtccccactcgccatcatcgcaaacctatcaaccctgagcttacaactggtggttgcactctaatccaacaaattagacaaaaatggagccaaatctatcccaactttaggatgaagtctctctatcatctctgctttgttaatgtttggaacaggttcatcccacttatcgtaatcagcaaactaagtgttgtgcctggaagaaatgttgttgtcaaacttcctcatttcatcatactctctgccacgcctctttaagtaaaattgctcgatggcttccatgtgtgcttttacttcctctggcatcgatgtaggcctaacaggaagattaaaaaataagaagaggtaaaggaggcaaagcaatcttctctctaaacaaatgtgtggaggtggtttgaatgcttttgggtgctggggatggtggaggcagatcttgattatcattgcttgttcaagtgctcctcctgattggccttccaccatcagagatattagatcccttccgggattgtgactcagtagcttttctcctcacagcggccacctattgcactttttcttggtctccacccttcacttccatttggcccctccatctgtagttccagaccgctttgttggaatgaggacttgcccatttcattctaacttgtcctcctcaacgtgcctcacatgcaccaatcgcaaaggcacaacgtccaagatcagttccgtcaagttaatgattgaagcagacaagtcccctggggctagagccttcagaacagcctcttagcttgaggccggaggtgcttgtttttgagattcaccccttgagacttgtctcttcttgcctttgcctttgcccttaccttccttggctacttcacgaacttcatcagatctagagctgatgatcaaggaagtagttgaggatgcccatttacaaagtggcgggttgttctaccagaagtaaataaaatatatcacatatcaaatcacaataaatagaactacaaatacaagctaccagacaatatgctagaagatccaaattttttatctttgtataatttgctgttgaaggaattttacaacaccaaaaatagataataataataataacagtaactataaaataagtgcgagtactctacccagaatggcgagtattcaaatcaggaatacaaatacttagcaaaagattggaaaaataatgaacacaagaggagtatagtggttcagtcagatctcgatctgcttagtctactgttgcaaagattttgtctcctttatttcacgatggatcactcctttatatacaaagcaagtgtcctatcatttacacaaggactgcattcattatcaatccgtttatacattgatttacaataattaagctaaaaaatgtaaacataataaatgaagaacagtttccaatttaatctactaaatacagcaacctatgcgacttctctagtgcgagttggctgttcatattatggcataagctcgcaggcttaagatgcattcgagactagtcgagtctaagatgtctgtgtccttgtaaagtcgcttttgcagacatcatataacgggctgatagaattaagacatgcgagtctatatcagtttatcaaggttgttgggtcatcgggaccagctcccaatatagagaaacgatctctatgttttcgcaggaggatcgcgaagatactcgcatatatcttgatatatgcgggctaaagtcgttccttggtcctacataatgcgagtcatacaaatgcaattagacttggtcatattcgcatcatctcgctgagtctccttcaggtcaggttcatacttcgaggagtctctcattgacatctcagctttcctcgaggaaattgagtacacatgtccttttagataagagtctggtctcgagtttttagatgagaaaaatctcactataacacatgcccctagtttcgcgactgacagatgcggtcgtgagggaaactataatcgagaggcaggtgaagagatgtcacgaggtggtgacctttgcttgtcccattgagggtttcaaaaaatgacggctgtaattattacattttatcctacctatggtgccacgtcacgaaactcttcggtttctgtgtaggcgtgcccatggtcaaccgttggattggatgaccttgggcattcctgttgccacgtgtcacgatcccaatttatgagggctattggtatttaagcctcctgatacgaaatgattccctcattttccctctcattttcattttctctcttcatccgaaacttcaaagacccaaaaatttctcccagattttctgtctttcccttttgaatcttctaagtttcggaggtagtaaaaagacattacagagagaatcgtcaaatctcaaggttagttttcgaaacgacttgcgaattttggtttctgattctaagaaacactctgcatttcgaatttttgaggaatataaaatgcatgttatttgtagggaatacacataaagccttttttttttgctagaattgagtaatttccagaaaaaatagacttaaaatttgtatagtcgtgaattctaggaagaacactttgaatatcccgtctttttacttgctattttgaatactcgcgagtattgaga

SEQ ID NO: 225132 - DNA, 5669 bp, Cannabis indica
gcatctgaatttatgaaaagcatgcccatgaaagaaatagaacagaaaaatacatatcacttagcagatcttgagcatgggattccgaaatagatgggataccaccattgtctttattttaaatgaatgtctatataaaaggttttttatatacctgtagggatatgaatcccacacattccatgaactgatgtgtcattaattggtaaaagttgaatgagatggaaccccgactcgacagcccaatcaactagcaacttcaggtcaagaaactctccaactccaagatcagtttccgatctaatagaaaacatggggattgcaacaccagcaccccgccaaggcgtttcctataaagcaagcaaaatattttggccatcactggaagttcaagtacagtgtaacacttttaggaacatgctcaagttcttatgcaatgcaacactcattagattatttatcattctcattggatggccagtagcttactctcatcatgccatctgaacggactacatatcttagtttagcatttgaagattcaagagagaggtctcgagtagcaccagtttccaaagaaaagtttcctgcatctctgtatttacagtacttatatgtggaatagttgttaaggaaaacaaagagaaagcctaaaatagacaaagcacaattagctaaataaacattaaagctccacaaggatattttaatggaaaatgagatttcggcaacacacagtccacatgccagattgattgccctgaatagctcagtttaagaccactgtcaatcttccattgccccagcttgaaggagctaccaataacataaatctgataagatgaaacatcaatcagtaggatgtagtctgggcaagaaaaagaaaaaaaaaacaacaatcagtagaaagtgttacgctgcactagaaaaatgaatcttacagatgtgtcttgttctatatttggacagcatattttgaaatgaacaatgacagaatctgttcatgaacgaattgagtaacagattagtaattatacaatttccaaacagcaaattatatcaatgataataattaagaaagatcaacttgagtaaaagtaccttcattgtctaatctattcttgattaatcctagatgcctttctaccttcagtatggacctagtgcggaatatgacatctttgaaggcacttgtgaaagaaagtgcatcagcaccaatctggatttcatgagtcatgagatataaaagttatatgaagatgtcaatcaggcaaaccaactttctttatttctcagacataatgaaatgggaatataattaaatcaactattcacatcacatataataatcttaataagacaacatcacagtgataccaaactcaacttttatgagaagtcagctgtaattgataatctgatcctactcaattaaactatgagcaacataaggctgcagtgacccttggtcctcaactataagttataactatatagagccataacaaagcaacaattgtagtttgaattgaataagactggacaaagtttagtagaatagataaataaagccaatgaagttaaacattttaacagggtcaactttatcttacaatccaagatcaagaattgtctttgtattgacatacaacagcttaacttaaaaaaaaaaaaaacctctgttttcattccttcaaagatcacactctatagtttgtattttctatagaaaaatatactcttgaatgttattttttatcactattggaaaggcctttaaatggggtgagtacaaagaaatattctaggtatagacattaattacaactcaactattaaccactaacttacacaataaatattatttctacactctccctcaagctggtgcatacaagtcccacatgcccagcttgcatacttgttcatcaaagcctttttttttataatccttttgtcaacaaatcagcagcctgttgctttcttggcacataaattacatatagttccttttttacaatttttcttttatgaaatgacggtccacctccacgtgtttggttctatcatgatgaactggattgtgtgctatattaatagttgatttattgtcactgtatagtttcaaaggacttgttatctcaagttgtagctcttcaagaactcgtttgatccagattaattcacatattcccgagcaagcttagcttcaacactgcttcttgcaacaataggttgcttcttgcttctccaagtaacaaggtttccccataccttggtacaatatccagatgttgatcttctgtcttcaattgaacctacccagtttgcatttgtgaaagcttctatggctctttcatcattttttctaaacaacaaaccttttcctagtgtcttctttagaatcgtaatatcttgtacactacctccaagtgttcttctaaaaggttgtgcatatactgactaaccaaactaacagcaaagcaatggcaggtcttgtgtgagataaatagatcaactttccactagtcattgatacatccctttgtctactggcttgtctttgtctttcttcttgtacttccctttaggttccacaggtgttgttgctagtttacatccaagcataccagtctccttgagtaaatcaataacatacttcaaagtgattttctaagattgaacatcaagagtatcaaaccctaattctttttaagagaaaagctgaaaaaaaattgagattactcccaatctttgagtttctaaagctctaacaccatgtagaaaaatatcctcaactattaaccactaactaacacaataaacgaacatgtgttctttcaaaaaaaaaaaaaactaacacaataaatactaattatttctatattttcaaatcttcttcttttttttcgagtggggatagaaatctaaaggttcacacatttcataattcaagtttgaaaaatctcaaaacattcaaaaacagaaggcaaacagcaatttagcacacatctagcccattaaatacaaacaaaaaaaaaaactagtcacggaaacaagactaaaacactcaaaaccatgtcacagggacaagactaatggcactagcaaaaatcgaattgtagtagcaaaacacaatcccgaccaaaccgcacctaagcccaagaaaggtcggcggccgaaaaaagacaatccccgatagctataaatttaagaatgaaaaaccctaatttttctcattgacaataaaaagttttggttaattttcttctcatttttcctaacagtttcacaactatttctggtattttatgggtgctagtttaaatctaattatgccatctaccaacgctttgcctcttttttttcttttttttttttcctagtaaagagatatatagtgtcactaggctatgcgtataaccacatactactctctattctattgtaattccttgtttttttttttgaaagactattgtaattccttgttcctttcttgtctattaatattttttatatatacacatatatatgtgacataattactcttaaatgaaaaatattacatataaaaactacttctaaaattattaaatgaccaaatacgattacatctatataattttacaaccacatgaaaagtgcagaattgaatagcatccacacactgaacaataaaacaaaaggagaatgctatggtgctggaaaaatacaaacgaaacaaaaagtaaaaaaaagtaaagaaataaagaaaggtagaataagaaaaagaatacttgttaactccaaaagtggatttctgaaagattcataagctaactttttctgatttcttcttattttatttatttttggtttcattttgagccacttcattggctattaaagtaattaaacatctaagaagtggagcagcatttcaagattcagaaatcttaaataattcaaaagattgccacagtttaactactaataccactaagtaaagaggcgaaggagagaaacccagtatcggctctcatatgctatgatctcaagcaaataaaagaaaaaggaatattcaatgaaaaataatccaaaggaagagaggaaatagcatagtaccagccaaagatcatgcaactccactaagataccatcttgaattccctcaggcagtaataatttacgcttctttcccatctcggacctcagcacatttctattatcatccaccacataataattgtattcactttcaaagtctttaggaatcgcaatagtcccacaccaaagaagctcatcgccttcatgaacaggactcagtaacaggcccttcttcacattccacgcaccaagcactggttcagaaccacaaaccaccaggctttgaccccattgtgtataatatggtaacctgaatctcacattcacacacttggtcccagaaaacaatcccaggctagccattacctcccaattcggatcagacccagatgaaatttctcaatttctacctaaaaataaacgtaaactgtcaaaatgcattccgaaactcgatacaaaataagaactccaattaacaaaagaaaaaaaatcctttgataaagagaaaccaggtacaatacatacaatactttcgggaaaagcgaaaaagatgtaaacaagagaacaatatcaaaaagtgttgatttttcctcctgaatccattttcagggaaaagaaattattacaaaccagagaggatttaacaaaataaatccacaacttcactgttaaagaagaaaataaagaaaacccagatacatataccttccagagataacctgaaacgaggaaaaaacagctgagattctgaaatgaaaaaatcaatgttgctccagtcagaagtaagccataaggagaaaggaataaatttggagaaaaataaaacaaaaaatatatattatatgaaagcggcgtgcgtttgttgggttcgaagagccaaaatggaaggaaggagtatcactcaagttgtgtatggtgggtgatatttgcagtaggaaaagtgacaacaataaaggaaaggttatgcgtttttgtcggagtgatgaggtgagatttggtttggttcggagtctcagatatttgttatttgtgaaatgagaaactggtgttgttttgttttgtagcatagagcctcgaagaagaagaagtaaggagagaacgtgaattcgagtgccgctttcacgggagatatactgactgacacggacccacccgcctttcgaaaatgaaaccaccacacagttttttttttctttttcttttttttgagataccaaatacattatattaattttacatctaatatgttaagagataccaatagtgtccattttaccttttcaaacaaaaaaaaaaatagtgtatattttatttgtcaatattattattgattttatataaggttgtattgaattgtattatattaaattggattatatatcacattttcatataatattatcttaaaattaataataaacctaaggtgaatttgtatataacagtaagcacaataataatatataataatacctgattcatctatagcaattaccacaatttgataatgcaatactattatctaagtcttcctttttagatctctaaatcagaagcaatttattaatttgattatcaaa

SEQ ID NO: 225133 - DNA, 7411 bp, Cannabis indica
aaaaaaaaataataacaacaaaaactcattttgtttgaggaattgtaaatttgtaatttttttttaataaataatttaaaattattattttggtcggcgaggactggaaatatgcagttcaaatcttggggcgtctgataatttgtctggtggttttgtgagaagaaaaattaatacacagaagaagaagaagaataccggttttgggattgtttgaaatcttagggttttttatttcttactctttgatagtttctaatgctattttctggaagttccttttcacaatgcctaaagcttcttcaacgcctcgaagctctgcttatctcagtgctcttacccaggaaatccataagaagcttcagagggttcgtattgtcactaatttcggttcacctttttttcttctttttaaaaataataaatgttgtgtttcagattgttttgtatgatatgcttaattaattgggttaagcagcctgaaattattgattatctctgaacaagggtgtgtaatctgagattttaagacaatttaacgaacgtctggcgatgattaatattgtaattgaatttgggagttgctggtttggtaatataaaacttgcaatggcttaactttttttttttttttgaataaatgttatatagttttttcggtaattgagtgttttgatttgttgcaggcactagcttcgccgtctcaaaggcccaacttgttgcaagagttgtttgccgacatagctctggaggttgatgaccgagccagaggttagataagatttgtcaaaatctcgttctgctttttatatatgatctgcacagtacttcagactatagtagcaactcattgtttggaatatgatgatgaaaatggaagttatgataactcgttctatgatgataagcgtttttagttcttcgtaagagtgtggtctaggtattggaatcacgtttgttaatgaacatttccgaagagttagatcttgtcatacataaacacttactattactctgataaaccgctgtttaagctgtcatacaaagctttaaaagcggtgttctcttaacttcttgtttttggtgttaaaaattaaatacagatgtgattcttcgcaaggaggaagatcttatttctcctgctgatgattatgttgatggtccattgtgcttttatgatgtacttgctgattattatattcgggttcttgagagtggaaaatccatcctggatttgattgtacaattatggagccagtcctttgcttctcacatctttgctctcctgttccacaagtgggtatgtgagctcgtgacttaatattgcctttgcagttattgtttggactcagaaatgttatgttattttagttataatgtttgctatagcatagaatagatcttgctgttgcccaagggaaatttttgcatcaagtgataattttgttgctgagaaaaagggtgccctttggatgcatacttctcattggaattgttggattaagcattgactacttactccagataatatatttgtgaagtaattgatcttgctacttttttggttcctacggcttcgaaactgcacactcttaactgttttctaattttattattcttcctgtatgaccaaatttagaaatgtggttgttgaccaaatagatttatttacttgaaaaattatattctaaaacttatgataagatgtttaacattgtgcctcaagtggttgggtgggtaattctgtttgaatggctttgtcttcaagttcttcttttaaactttcttaaaatatctgtgctatatataacaacaacgagcacttaagaaggtgcctagtttgttttacaccaaaacttgaagttttgaatgttttttctttcctgtgactgctgtgatgtttaaaatgtgcctttgtacttttctttgacagttgtttgaagtggaacttgacagctctgaagtcctccttcgttactcatctgcacttgttcaaggtgctacaaatctattttggtaagaagattatcgtataaaagtgtgttcaagtcactgattaaacctgcgtgaagctagttataaattaaatggttttaaaaagatacgctttattattgaacgattattgtcttagagtcaattctgtatttaactcttaaacttggtactttggctgttgagaaagaatgcaattcaattcttaaatttttctaattagttttaaacaaattatttgtttttatatgcttggatcaaatgaaatattgttactatactggggcactacatttcacagtatgtattgtttaatactatgttaatagaccttaagaaattttagatgtactgtttgttttggtccattacttcttaatcgtatatgaatacatttttttttacatgtgtcatcccctggtagtgtaatattcacttacaatctctttattcaacagtgaaccatagtcatgctattgctttgacattgttttgcctttggctaaaagtcactgtcggttttagcaacactccatgagaagtgtggtgtataatttatttggatatctgacttgctgtgttctttgtaatctctatataaagcatcctcactctaacagaggattcttttcgcatgcttccctaatggtacttatttttatgccaatttgtaggatcgacatccaaacaaattcaagacgatttcagtctttgtttcgtgtgagtgtttttcctatgcaaatatttgttgattaaaaatgtcatgacttgatttctttcttatgctgtttggattcagtatcttcttgaggaagtggtgttggagccagctcggttaaataagattcctgtacaggtcacgcataaatcttcccttttacacttgttgagattttatttccccttatttttaatattagggatcatgatgtggaatcctgtctaataataagcattcttaactagaatttaaagagttgttttgttaattctcaggcacagcgagatctctatcttttactttcaaggtttatattattttataactcaggtagggttgtgatgttgacattttattactgaacatttttgtatgcactcgtaatttgctgtttcccgcagttgacaagctcgaaagcttcttgaagcaaattcctgtgttcccaaatgctttcttagtaggtggtccagcagatttttttgtaattgaacttgcggaccaggtaattcaatcccacatcccaggtttagttctttctctcattttttaattttcattattccttgatattgaaaggttttcacaaattactgttcttaataacgttctactttatgctgctgaccagcttcaaaagctaaaggttgaaccagttttactacattacttttcacaaatgaaatttctccaaggtaaaaacatttctgccaattccttaattgaattttatgcacactcaatatcatttgactaagttgagttttacaggtatggaactgagaatgactacgagcacaagattgaaaagttgtttgtatagcttcacttcacccggaggtcctatgtatcccactagagctgttcgtcatgctgcctgggatgtattagattttctttttccagtgagtactgtttctttctccactcgcaatatcgactaggttgaacttgagatgggtggaagttctgacttatatcttctttacaggtcggtcgttaccctcgccatctcattagcttgtttttcagactactatacccatggtactggccttcctcttgttggaacttcgtaacgtcttgcatcaaagcaatattgtattctctgttcggcttgatcatttgcagttgggagaagctgataagtcataaaaggtcctaggctgtacatcatcctgtaaaggatcacacacttgccactttacatgtatcacttttgctctgtttcaatttcagctccaaaagatgtattcaacatttatattttatacattccaactttcatttcatgtcaacaacatttattttttttttttgatagatatgtcagcaacattatatttaactatttgtttgtaatatctttcggcttaaaatatgtatgaaaatacaatcgttaagcaatttgccaacgaaaaaggccactttataaaagagaaaaaaatgtagttttctcttattattatttttataatttaattatttttagaacttttcactaaaaaaaaatcaatattttttatttataccataacattaacctaacccaacccagagtgaccgagacttgagctcaatttagacccgagtatgagaaaatatataaaaagaagaaaaagtttgacaaaataaaaaatgtttttgaaaataaaagatcttttgttgtttctaacttttaatttgtaaaaatctcacatcgtaaatacttcttgaaacaactgcaatgctataaataatcttatataccacaattacacatgagaaggtaatgccgcaccaatcataaaactagcgccatctagttctccaattttccataactattcttagttcatgtttgtctataacccaacctaacttgctttggccccaggtccccctttcttgaagcggaccgtgggagcatgtgggcgttacccgcttttgggtagttggagaactggcttaaatagatgatgattatctttatccaccatttttttattaatatatttaatctgaatagttattaatgcagtacttaatttcaaaaaatatatattattattctgtagagcagaattaaaaaattaaatgggtacaacaacaaacgggtagagattctttgctactactcgattcccctatcctatataaatcagcaagttaaagaggctcacgcgcaccaacagaaatgaaaatacaagaaatgcataataaccataaccaaagtcacctttttcatcaagaatgcaccgatttcttgttggtagtttaacgaatgggaatctagacagaacgaccaaactttttatcaaaaagaagagaacgccgtaataaaacaacagctctgaaattatttggctgaacaaggatagaaatacggccccaacagttgacgtaaagactggatgataaattttaaagtatgttgatcctccatcagatatctttcaatcacaaaatattagcctagttagactaagttaaaagtaaatgcataacgattactttatccgggctatagttttaaacttaaattatttttcaggaggatcaaatcagtttctgaacacctgtttccccctttcctgcttaataggtttgagactagctacaaatcatcttccagagaacaatttttggatagtatctgcatgcagtaacagtggggagtggcttaacatcacagtcatcaccatttcaaaccccaacattgtggttttatgaaaaagaagtaaaccaaaaggacatgcacatatcttcagcagactgcagagcatatattgctgttactatccttcaacgatcaagggtagagacatcataaagttccaagccatatcaatatgcaaaaaaaccaaaatgatgaacaggattcggaattaagcagcaggttagctattctttgagatagtgtcaagctgcaaaaaattctgatacatttgcaaacattgtcaagacaggaattgatcaatttccttccaagagtaatagtaatgagcattcggatagctatcatccgatcgcaaatttactattgacatgtttacaagttgcatagcagagatctaatatctatatgaatgtcaagaagttgagtcaaaacaaagacttctaaaagtgccactataacacatcatacactatttccacaaactatagaattaataaataacaaatggtaatgctaagcagcctaatcaactggaccaattaaccatatggggcaaaacttaacaaaatgcaagtaaacaaagggaacaaggaaatctacctcagtgacgccccctcagatttttaagtgcagttgcaaccaaaagacatagcagcagtgtgtgattctttaagactcaatcctttcacaacttgcagtcaatgctctctttgaaacatcgagagcagagaattaagtttccgctcccatactccgactcgttgaatgaaataaaagaggacgaaatataaccaaaaaagtgttggcgcagattactgagtacatacagacagcagtgcagtaacccacatatttcatacacacccaagttaaaaggaataatcaacattaaatgcccaaactccataaagattctaacaggtgttcctaaggtaatttcttctgtttttctctaaaagttggattttggtaaagtacacaaaatagacggagttctcaatcatccaatacttaaacagccacagaagatataatagcaatgaataaacacaagatctgctttcagttttcttgcatggcttctgcgtgatacttctcaagatcagcatcaaggtcatcagaagatactttttcaccacggcctcttccccgtccgcggcccccccttctaggaccacggcctccaccattgccaccaggtccaccgccacgtggacgtcccatggcaccacccctaccttgtccactgttcaattgacacattaaaaaataataagaaataatataaaacttatttcagtagtaaatgaaaaataaataaatatgacatcagccactcatacaactatatacttgtgggcatttcttttttactttaattagggcatctatgagtatagacagttctcatatttggtttaaaagtaagcagtacaatttttctcagtgcaagaaaacaatcaaaaaagaaaaatttatcctacatactgctgcacaactagaaatagaaacacaatgacgaaacacaattgaccataaataagcacaatagtatgacacaacttctcttagctgaaccctacaccctaaaatctttggaggctggatgtaagctagataggtgcccatgagaatttgagacttaaaccaatgagcaacagtgttaaatttgattccaagatctaatcctcatcatgatttgctttcacttaatccaaacacctcatagtcgaagtaatcatttatcctatcaacgggtgctcaactaaaaacagttgtatgttattttcctatcacttgcaaacttcataattctttctgatgcaaacatacctataaagcaagaaataaaactaatatgcagacttattcagcaaaacatgaatgggggctaaaacagctaccagtaacaaaatgaaacactaagagaagatagaagtaaacatacagtctagagcttgcaaatccattggaatttccgaacgagccattggtggcaggaggaggtggtccagcagctgttgctatgttagttccca

SEQ ID NO: 225134 - DNA, 6421 bp, Cannabis indica
ttttttaaaaaaaaaaaaaatcatcataaaaattagtagaattgcaaatatttgacgttttgtatttatataaaaaaatatatacatataagaagtaatattagatttaaactaatattcccctcatatatatttttaattttgttgtattttacttcttgcattgtataattgcattaatatattacaaatgtttcctgtatacatatgtaatagatgatattttagctcaaatactgtacatgtcttcgcgaggtgcaaataatagatcgattgcaccatttttattcttactgatcaaaaccctacatattcattctcgcgttatagaggactttaaagaagaattccggcaagtattgtagaaaggtaattaaactaaatatgtcacaaacttgtttctcttgttcgtttactttgtttcttcatcaaacattataaagcaaataattaaacgattaaaagcttgtacataaattaaagcataaagtaaatcaaacggattgttaaattctacagagaattttgactattatataagtataattattttcgtcattatagttaatatttatacacgtattatttgcatggactactatatagctttgtcaatgacgacataaatatatacatagatattcccatttacacataaaatatttatttgtaatgatcaatattaaaaatagactgaaagaatatatgcattacattatgtattgtaggctagaaaaagaaaaatattacgaataacctagaagtgcatatgtttttcataagtttctttttgatagaaacaaaaattcaatggtgcagtagtccgttgtaatatgccagagtcatgcatgtgcatatacgtttctatatctatgtatatgataaatatagagatttatgatttcgggagtgaacagcttgctttctgaacccattgatttgggtaatttgatagtctcacaattttatcctttaatatatatcacagcaatttttattttatttatttttatccttttaattttttacattcacaccatatatcaactttacttatttttttttatcttacattattataaatattataattttaatgcattttatgaaataaaaatataataataatacatatataaaaaaaagtaactaaaataaataatagaatatatttctagctgaatgaatatttatctctacttatgtaaatactatctagtaaaaaatttgtaaaataactaaaatttagctcacttgttggaaatttaattttatcacagtatctttattatttgaaaattaattaagctattttagctcacttattgggaatattgttatattaaaaaaataagacatgtaatcgtatattatatatgaaatagctaactaataaacaagccgcaaaatctaaacaataagtatttatataaaccttataataaaatacatgtattaaaaaatggtatagaaaagttattaattaaaaatatttatttgttaagatttaattaatttagtagtaaattatctcaaatacgatattttttaagatagaatacactgttattttctatcgaaatctataagaaagaagaaatcaaaaatacaatttatgctattttagataaagatggttagaagacgtataatttataagttctttaagtgtttttagattattatcttactcttttaggtactatgctatggtgaatatgagagaagtgaatgatcacattgttaaaagaggtgctacgatttcagttcaccgtaattaatttcttactattgcgttcatcaaggaagatgttcataaagttatgtttgctatttcggggagaaagcccttagtctggatggtttcaagttttttctttcaaaaccatttggatttgattaaggatgaagtatgtggtactatcctttactttcttcaacatgcgtagagagattaacactcctataattaatctcattttgaaggtcatgtaagtgaatttaggctgatctcgtgctgtaatgtcatttacaagattagaattagaatgcttagtgaaaggttaaagacaatcactactataaaaaatctcttatacgaccatcaaagctggaaatgataatttttctgtctcttttgtgttggacatgatgtctagagacatgaaacctgtatttttcatgtttagcaatgttgacatacaaaaatagtaatgtccagtattgttagacttgaaaatgagacttgttggcattgtctttttgtgtctagcattgatggacatgaaatataataattttctattattattaaagaaacaattccttattttaaatgaataattagcatatatcaaaattagtatagataaatctgtcagaaaattattatatagataaataataaatataaaaaaaataatttcaataattcatttacaccattatttttttatattttttatgaaatagaaatgccgtattacttcaaaaactattacaaataacatccatttcaaagaataagacatggtaagtctctaattacttaaatatattaatcttctaaagaccactataccaattatatattaatttggctcacttttgatggtcaataacttgtatttctattttttacacactttaatttgttgtacacatactttcgatcttaaaagcttttgattccacaaaacatcatctctcaatagccaaatatagtacactacaactgctaccactgctgaaaaagtaagcttcataaagctacttatatttgttctttcaatccattcgagagaagaagcaaagaattcttctgtatgttccaattcaacgaacttctaatatgttggaaacaaatctcattgtaatgacagttaaaaaataaataatttaatgttttaacatgtgcaccacaatgaaggcaatcagaagagtcaactatgggcattttcaaaagtctttttttttttgtcttcaattgatcttgtattgcttgccatatcataaagctatgctttggtgtgtttagtctagtcaaaattttctgggaccaatgtgttattcaaaattttgtctacctaatatggcatgtccatgtaaaccaagatagagtatatgtggaatacagccatgcaaatagctagtaagacaaggtctccatacaagataaggcaaaagtgtcaagtagcaactgaaaggagtgaagcaagctatcaaggatttgtaataacatggttagtcggccaagagaagcctatagggcggttagggcgagcttgtatggctagccaggatctgggcacaagctagccggctaaaaggtgacttttagactaagagaacctgaactctacaaggaaaatgtgtacaaagctgtcctccacttgccaaaggctagcctccacatccaaaggctggcctcctcttggtaaagctaataggaacataacctttcagaccttggcaggagcatgacctgcaagaccctggcaggaacatgacctgccacaccctagcaggaacaagacctaccaaatcctggcaagatggaagactaggcctcaccctataggtgtacggccggccaagattgacttggtaggattctttgtacagcctaatacatggactacaagctacctacaaattagacccttaaaagcccaacaaattggatggaagagttctattttaaaaggccatttcagtcttttttatttaatcaatttaatatgtaagtatctaaggatttcagttttaaattagggtttaagctttcctatataaaggatcttaactctaacctaaaaagtctaagtctaatactaggccaagtgaataaccaaaataaatacattaacatgcatattttaatataattatattataaaataattaacttacctgatgactcacacaaagttgggatagtagtagaaatcagcggggcctcaccgccaccatctccaccgtggttgctagcaatatctgcagacatttatactaagaatgcaattttgtcattaagtatgcaatatattttttcattaacagtatacatacaatgtagcccaaactagtgttagcattaacagtcttccaatttaattaattaataaaatttgctttaaactactttcgagaactatctacaaattatcaaaatagaaaataacttaattcaatatcaaatcaaataatagaaaatgtgcatacatttatattagtattatgctgaagcaaaccaagcattgtgttcattcacttcttaattaattcaatcaacaaacaaagttaatgaaatacactttgaaacatatttattaataatactcaatgtattgttttcattatagaaatataaagactaagtataatagtcactatcatcatcactaatcaaatttaagtccatcgagcacacgtgatcattctcctcatcactaagataaacaatcaataggtcatcctcatcgtttgttacttctacgccttcggtagtaccatcttcaccgtagtcaataaaatcgtcatcatctttaacaatcgatgagcgttgagggacattgacaatcggtgttcgtggttgatcagattgttgcataaccaaatctccaagatccacaaacaattcaaagttagatgagtttgtgtcatgtacaatatcaacatcatcattaatctcatctgatttatgtaaaatattgtcccaaacttgtcgatgattcacattttgaaccactttccagttttgacctctcaccagatcatcaagataaaaaacttgtttcgcttggttggcaaggatatattcatctttatacaatgtattggtggtgtttatactagtaatattatttttcagtaaatattttcttcttttttggatcagtgttgaaccatttacatcgaaataataccaccgaatatgagccattaaaagacatgtgcaaaatttcttcaaattgcccataaaagttgaaaccatctgtcccagcgactaacactccactattttgagtggtgcgatctttatctcgattgtatgcaacaaatcgaaccccattgaccataccgaactcatagctatatgccaaatgatctgacccagatgctaaaggtaataattgatcaccatgctctaatgacccaagtcgatgcgactcatatatctgaatagagcaaaaaatatgaattaacattgaggaattttataatcagaaggatgtcattgatagggaacaattatccactataaattaccttcttatgaaaccatgaagggaactctttcttatgtaagagattatgattagcatttggatttctctatttgatctcaagaaggtgttccctgttaattagtaggacgttatgagtatagttgaatggtattacaatataaagaacatgaagatattagatactaattaacttactccatataaagatcgatttgtctacaattctccaatatgaaccactcggctatccttctagtcttttcgtcgagagacttcacagttctcttactcaatcgacaacattgagattcaaacactttaaggtggtgtgggacaaaaggtacatcttcattgcgatcagggaaattaaatttgtttcgatgcctttgaaatacatcgaacaaaatgtcaaagtctcatctacaacatatccttctactatagacccttctgcacgagctttttttcctacataatttttcaattttttcatgtatctttcaaaaggatacatctatctcataaacattggcccacccaatatagcttcttccggcaaatttaacaccaaatggatcatgatatcaaaaaaaagctagaggaaagatcaactccatcttgcatagtatgtgaaccagatcttttgtgctttctccatatctttcacatttaaagtcctagaacataattgtctaaaaaagttacacaattttgaaatagtgcctgaaattgattttggtagaaacttacgaataccaactgcaagtaatcgctgcattatcacatgacaatcatgggcctttaacccatggatattattatcatctttagttaccttcttcattattattttactacatgataaaataatttaatatacatatatataattataattttcaaattttaaaaacatataattatttaatatatttaaaaaaaatatcacaaagtcaaacacgaaaaaaaaattaaattatggaagtaaattagataataataataataataataataataataataataataataataataataataataataaacaaatcataatcagttttaagaaaaaaatcctataaatgaagtatatccctaactaaataaaaatcgcatgcattgatatagaaatctaaatcaaaccttcaaaaaatatactt

SEQ ID NO: 225135 - DNA, 6649 bp, Cannabis indica
aaaatattaatttaattttcaattttgtgaatgaaggaattttttttttcttcaaaaaatctacattaaatcttgtaattgtgcggttaaaaattaggctaaaaattaataccatttttatatttagatctttaaaatgttcaaaaaaaaaaaaactggagccataaagaaatcagaaaatgccagcaatgtcccacactctctcacccgaaaatggcctctgttgaagtggatgtgatttcttatcttcaatctcctctttcccagatacccaacaaaaatgaaagcaccactacttccttagttcaaactcataaacacaccaaaccacattcatcaccttcgaatttcccccatccatggaagctcttttcatgaatcaatctctctctcgccttaaaatactctccccaagcttcaccacttcctctttcgctacccaatctattcgtctcagaccgcctcaaaggcccaacctcacgaaggtctccgtcatccaaaacgaagagaaacagttacaagaagcaacggaaacggttcccaaacaagaattcaacgatgacgagtactacggcgaagtcagtaaaatcatcggcagtagagctttggagggtggaactggaatggaataccttatagagtggaaagacggtcataccccttcgtgggttccctccgattacatagctaaggacgttttagcggaatacgagaccccgtggtggactgccgcgagaaaagccgacgaaaatgccttgaagcaactcatcgaagctgaagatggccgtgacatagatgccgtcgactccgacggccgcacggctctactctttgtgtcggggctcggctcggagccttgcgtgaagcttttggctgaagccggagccgaccttgactaccgagataacagcggcggcttgacggcgttgcacatggctgctgggtacgccaggcctggggtagcgaagctgctactggaattcggtgcggatccagaggcggaagacgataagcggcggacggcgttggatttggcgagggagattctgaaggtgacgccaaaagggaatccgatgcattttgggagaaggatagggttagaaggagtgattggagctttggaaggagcagtattcgagtacgcggaggtgcaggagattatggagaagagagggaaaggtgatgacgtggagtatctggtgaggtggaaagatgatgaagtcaacgaatgggtcaaagccaagtacgtggctgaggatctggtgatggattacgaggctgggttagagtacgctgtggctgagggtgtaatggggaagagacttggggacgatgggaagaatgagtatttgattaaatggacggatattgatgaagccacgtgggagcctgaggagaatgttgatcctgatttgatccaggagtttgaaaatagtcaaagtggtcaaaatggtaaattaaagatgattgatggacaatgatcttagtaatttttgtattggctaattttcatgtatattgattaattatcatgataacagagttcttattgattaaataattaattaatgagttccttttccttccttgattgttgcactgattgatattggatttagaattagaatgagttattattctcctcaattttcaatttggtttaggaaggaagccatctagtattaattacaactttgacattttgaacaaaagaaatttggaaagaatagattttggggaccatagaaaatttagataccgtgaggttacagtgagtcttgtagacgtagtggatggagtaaaatattaaggagaactgaattagggtaagtagaaatggtatggaagaatgatgattgtatttgttgtaggatcatagatttgaatgaataggcaggaattgaattgacaatcacgtggtatgatctgagtgtgttagctagtcagtgttacccatcacgcaataatttgagtttaggcagagagagggtagttgcatataaataggtagctgcaattgggtttaagctcactgttttttaacgccataccaggtgtttagaaagtgaaaggctcggatcaatgggcccagcccataatcatcactgtaccttgaaaaggaaaatataatagttgtttcatttagttcatcaaaataataataaaaaaaatagttgtttcatatatttatattatgatatagatttaaaaaaaattaccctactatttttatgtattttttttttaatgaattttatgtgaaatccttttggaccttaatactactaacggttgaagatatagcacactcggtgtttaggtagagtttttatgtattttggtgttctcaatagtttttttaatttaatatttttttttataatcgtttatataataattatttaaagttgtttctaaatttttaaaaaaatttacaaacttttattgtaccaaaataaagtttaaatatattattacatgctcaactattttaattcttataccataataacagtttaaaaattatttttattactataaattgtttaagttattttgaaaaatttaaatgtggtcctaactatttttttgagtcgataaaaattctctggtcctaactatttaatcataattactattttctttcagaaaatgtataattatgtcatgttcaatctaacccgcatttattgccaaaaagatacgattttattctctaattataattacaatatttagaatatattgcacacatttacttttttttttgggaaagtattccacttcttcacacccttctttccaaatgccatttttattttaataatatatgacccagcaataaaacgttataagctggttaaatatagcatgagtagaaatagaatctctaatatagaagacaaaatgaatgcatatgactcataactctattataaatctgggagcaataatttgtaatcaagactttatgtgagagagactgtgtgaatatgggcaagcaaagcactgatgaaacacaggaatgtgtgattaaatattattacttttaattttaattaggttactcaaattaatttactttgattggctcaatttatttttgtatttttatttggataacacttaaccagaaaaacatccttctcaatcttaatccgattcatcctcgataacaaacatcacgctatttccgagattgtgccacacgctccaacccaattggcgcgtgtacttctgtcaaagcgtagaggctacaaacgacgcgcatcctagtcgttataaaattacacttgtttcgaaataaaataaaatatcaagtgatctgcaaattcaaagttttcgtatatagaagaagacttagcttcatccttaattacctgtcatttcctattccagagtttgtttcttttttttctctctttcacatatgaatattttctttttagcccttaaacttgtttatattgacaaaaagtttttcacacttttagaccaaaaacattgaaagaacgaagaaagagaaactaaaaacctaataccaccctaacttcctctcccatggcggctccgccggcgacaatgcacgtcaagtcagactcggaagtaacgagtttcgaccagtctactcccccgaggtccccacggcggccgctctattacgtccagagcccatcgaaccacgacgtggagaaaatgtcgtacgggtcaagcccaatagggtcacctcgccaccacaactactaccactgctccccaatccaccactcccgcgagtcctctacctccagattctctgcctcactaaaaaaccccagaactctctccgcctggaaaaagattcagccaggacaggagtctgacgaagacgacgacgatcaaaaccgcttcgtttctcgagacaagggcagaaatatcagactgttaggcttcactttgctttttgtagttctttttactctcttttctgtgattctttggggtgctagcaagtcctacaagcctgaagttgtcgttgaggtaactctgttgttttcttctcatttgagaaactgagtcaactcggttccgtgttgaagtgagaatttgcttttactgagtgaactcgttcgtattaatacttatttgttttttataacagaatattgttattaggcgattcgatattcaggcagggaatgatcgaacaggggtagccacagatatgttgtcactgaattcgacggtcaggatcttatacagaaatccagccacattcttcggcgtccacgtcacctctactcctctcgagcttcactactaccagctcaaggtggcctctggagaggtgtgtttaatgactctaaacaaaattttattagttttcatgtctgctttgtccttctttatgatgacaaacttgtttcatacatatgggtaatacggtcatttagtattctcacggtggtgttgtctagtataagcggcgattcaacgttatagttttgtaaagtatagttttgcttttgttttgaattgttggagtggggtcaaatgtttgtcgttttgggagttagaataatgcgacatatccatgaggaacagtactctgtcttttattaatggctgcctttaaaactgaaaaagtctgttttctttgcccacaccaacaataatcagtctacttctcattgggaagcgtgatgggttataaatcagtctttctttcattgaaaatgaaaatttcaacttggttggtagatcaatttatagtcaataagcagtttctttctaatcttaagagaatttgctttatagccgtaggtgggtttgtgttgaaaatttgattgaaatatataaacgtttaaatacaaaaaaaagaaagagaattggcattatacctaatcatgccatcatgggttttgtcgagaatcgggttccatctcaaaactaatgggtggataagtggagtagtccatataattatatatggttcaatactttaccatttattcaacgtgggacaatatctacaatatccttagcaacagtaataattaaagaacttccattgaacatcatttgtacgctagatgttccctttcagctcgtatatatctgcatgtgattgtactgtcgaggggaaccgaacacatcttgatgaaaatctagacaggttggctaaattagtttctgaaaaacagtactttgattggcattgtggggttttagttttgcttgttttggcttagatatgataaaaaacaaagttttgaagtttcctcattgtacgttataagaaaagctcaatttttgtttacattatcatatctacccgttggtgaagttcatttaatttagtagaatcttgttagcttttacaattttttttttgtttgaaataagagaatgtattttaaaccctcttctttttgccttgaatacagatgaagaagtttcatcaacggaggaaaagtcatcggaaaatagtgactatagtattgggacaccaaattcctctctatggtggaatttcagacgtcggaggtgctaaatatgatgtcgaaaaagttgtcgttcccctgaaactgacattcaagatgaggtcacgggcctacattttgggcaagctggtaaagtctaagttttatacaaaagtccaatgctctgtcatcctcaggggcaaaaaacttggcaagcccttaaaactgactaattcatgtacctataacgaataaattatttgttctctcattttctaatttggacggtaccattttggcttggttgtctaaccattttgttcatctgtaaaagttatataacctggctttgtcctcattgctgcaagctttgaagaactgtaattataggtgccactgtgccagtggtctagttgactttccaagttgttttgaatgatataaatcccaaaaatatttaagcttaaatgcctgaatcctatgctgtgacaggtaaaatgttttctgagtttgcttgtttaagtatgtttgttcaacattaaatcttgcctagaaaccatagcagcggaccttagaaaatggctttaaatcaacaagcagagtacaaatacattaccagattaccagattacaaatgagaagaaaagaaacttggattggaagtttaatacaagcacatgattcatgaatcatttttcttacaaataaaacaagcataacataatagttccgttctcacaaataaaacaagcttgactagcctagacaaagatatccataggcaacgtttgcctagttttccttggccctctcttcttctttgtggccaacaggcagcttctccttaatcttctcaaatattccctttttttccttggactcatcatcatggctcttgtggccttctgcaccacactctgcatttacaccatgattctcagccttcttgtgctgtccgggaagcttatccttgatcttctctaaaaatcccttctcctctgggttcactgttttttcattttcgacgtgattgttagtttttatctctgttgcatgaacatcgtcagtatgttccccttccttttccccgtaaatcctttccttaatcttatccttcacccttctcttctcttctctccattcccatctcctcatcactactagactgcaaaatttcatagcagtca

SEQ ID NO: 225136 - DNA, 3929 bp, Cannabis indica
ttttagttttatactaagatttcatatattttcttcttttaattttattatctaaataagtcttacacaattttacactaaaaagtactactaaagttaaactatatatatatatttttttttgaaagcaaagttaaactatatatgaaacaacataatcgttaatagtttccttgatttgaaaccattaatttgttaagaaatttaatcagagatcatcaagttctaatgtattaattaataatggatgcaggcagaagtgatatttctggggcaactgaggcacgtaaatttagtgaagctaattggatattgctgtgaagatgaagaaaggttactggtttatgaattcatgccccgtggaagcttagagaatcacttgttcaaaagtcagtttacattttttccctctttctacttatttctaatataaactttcaatatctataaattagaatgagctagtattcagttttcttatatctcaagttgatatattaagtgaattttcatgtagtaataatatggtttatatatgcctatatggtagtggccacaatattatttttggtaattgctatggtataggctgtaattcaccaacatagtgggattagttgatgaagccccaagacatggtaaacaatacagataaagaaaatgttatatcattgtatatttcctaatcaaaatcaatactagtatagatatagatatcatgtatgcgtctgtggggttacaaacactattaaaaaaatatattttcttttgttaatacgttgtgatttcaggactgtcagtgtcattaccatggggaacaaggttaagaattgcaattggagcagccaaaggtcttgctttcttgcatggagctgaaaaccctgtcatatatcgagatttcaaaacttcaaatgtcttactagactctgtaatatgcgcgtatatatttcttttcctgttattaaattttgaaactctacctttttacataatttgagtttgattgtgatgttgctggtaaactcttgttaacaggatttcacagcaaaattatcagattttggacttgcaaagatgggacctgaaggatcagaaacacatgtcacaacaagggtcatgggtacctatggatatgctgcacccgaatacgtctcaacaggtaacactgctatagaatctggcatgtacttgaatggaattttaagttgattgaggattgaaaatcaaaatattgtttggacaagattttcacttctagaaatttaattaagaatatcatcacgcaagattgtattttgaggatgcatctaatgagtctgattgtattgtgcataataacaaacttcatatatcagtgaaaaactagtgattttggttgagatatttgatggaagaaagatgttagaacaagtgatcagtgataatcaatttataagataccgaaaattcacaacaaaaattgtaatattggatgaatttacaggacacttgactaccaaaagtgacatatatagctttggagtggtgctgctagagctgctaacaggtcgtagagcaatggaaaaatcaaggccaaaaggtgagcaaaaccttgtggattgggtaaaaccatacttgactagttcaaggaggctgcggtatgttatagacccaagacttcaaggccaatattctgtgaaaggagcgaaggaaatggccttattgggattgcattgcattagtttgaacccaaaagacaggcctaagatgccaatcattattgaaactcttgaaagtcttcaacatctcaaggacatggccgtcacttgtggtcattggccggttgcggtgtcgtcctccaagtccgccagaactggaggctccacaaaagttaagatggagtttagaggtgggaatttcaggaaatcttctccaattttcaatccaacacagaaaacatgagcagaaaagaaagctctctcttgttcagtcttgacccagtcaaaactatttcaattgtaagtagcatagtaagtattttggaagtgacatgtttgaggcagccggtggcttataatatcttttttaagttaccaatgtatattgtatatatgcccgtacttacatactatttttttttttttgaaagaccgtacttacatacatgaaacctctatttttgtgtttaaaataaaatgttataatgcaaattattggatgcttgaagtacactcatctaaaattttgttctaaaattaatgcacaagggctattgtgatctcaagtgatgacctcgaaagaagtgtttcaattattaaatcattttgcaaatggtgatacattcttaaagcaaatttaaatctcatgtaccttacattatagtacttaatttcatgcatgcatttaatagcacaagtgcatttaatttcatgcatgcatgcaaggtttaccctttgttcaaacaaaaaaaaaaattacaatgcttcaaaaattaaaggcaataaatttggagatacaatttcaaaataaaactatagctaattagaatttttgtccatgaatttttacttgtactaaatcatgcctcttgaacttttaaagcggttaaaaattccttctgaatcattgaaattgttaaatttaagaacttttgtggcaaccagtttgggtagatatcaaaattggagaagtataatttagtacatggataattaacgaattaataaaattggacaaaaattcttaaatttaatgaaattaaaatgaatattatatatttatttataactcaaattatgttactgcattagtaacattctcctctacactttccaaacaatgaatatcccgatttcatatgtataccacctagcttatattggttaataactattctatcaaaacaagagttaatattatataagtgttgttaacccaaaaactctctctatctcaagactcaagaccataaatcagctaaggaaataccaaactcttcctcaaaatgagtggtatcaaagtcaaagtactcttcttcagtgctgaaatgagtggtatcaaagtcaaagtacccttcttcagtgctgaaaggagtgctatcaatactagtaaacacttcatcagtactgaaagaattgctgtcaatactaacaatatcttcttcttttcctttttccacagaccccaatattctctgattaatttggtcaagcaataccaaatatttttgcttcaaaaactccaactcttccacatcagtactagtcttacaatcagcttcaacctcattctcaatccaatgcttgagtcccatcaccaccttactttcctcatccatactctctagtttccgctcttgcttttggctgtacttgagaccttcaattctctggttctggtgtttgtgttcatcagtgaggcaacgtggaatgattgtagtttgatgaaggtagtgttgaagaacttcatccactgaagtgtgaccgaaagcataaggattgtctgttggtgataagatgacaatggcgatttgagcgccgaacttgacacataattcacttgccttatggaaaagccctgtacgtctctttgagaaactgacaaacacattggagcactgtcctggtttttgttgttgttgttctccctcttcttccaaacttctctttctcttacacatagtacctgtttggagcttaaatgttagtgggagaagaaaacatattaactacaaagctaaagagatacaaatgaataaagcatctgttcacaacttctctaaacagtacattattagagtatgtccaatggagatataaataagtggtatatagcttgtttaacacaaaaaatgtgcttcaatggtgtgtaaaaagtgatgtaaatttggtgtaaaataaatgtattattttttcattttacatttatgttattattttattaatgtattt

SEQ ID NO: 225137 - DNA, 6598 bp, Cannabis indica
agtataaatttataaaaatatgaatgttattcgaaaaaaaaaaataatttatgaaatatttttagaaaaaagtaaaaaacatatatataaaaaaaaaagaagtataaaataactagttaccctcttactaattactatttggttaccttcgttaatttcccatatttttcaaaaatttcttaaatttttctaaaaacctaaaaatgcaggtacttgggtttttacactttgcaaaaaaaaaatttacttttttataaattttccaataaaattaacttctttgagaaaaaaaaaggaccatattttggcaacatggttacttaaaccccataaaaataaaagttacccctctaaaaatgtgcaatgaataaataaaccaaattagagcactaaaaatgaaaaactaaaattaaaaaaggtgtaattatcacaccctttcttccacaaagtgtggtgagtagtagtagtagtagttctattaaaattaaataaactaaaaattcctacaaaatatatgttaaatgtgttacattgaaaagctacaatttcacagattatagtttttgcttgtttgtttgtttgttggtaggtaccaaataaaaataactaaacaaacaaattacagacaaaggggactttgatacactaataatatgcatgtaaatccacaaataactcaaaagggtaaaagaggaaataaaatattgttatacttactaatgctaatactttcttcatagttagtccccccacaaactctactaattccaatcttgttttcatcaaatcatatcaagcttctacttctttcccacttgacttagccttagtttcatccttctctgcattgccttcttctccttcttcctcttcttcttcgtctgcctcgtctgctagtttcgtaagctcctcttgaatcatcaactttatcgatgatttcattggtgtcagatcagcatcgaatcgctcagctgaaattattaggccagttattatcagttcggttaggaggattcttaatcagaatttcaactttgaaacccgaaagatggaaaaataaaagtagatagggaatatacctagtagcttcaaaatgtcggtgaaagtagcctgcaaaaatggaaaagagagaatcggattaaagttgcattttacatactttgctgtctgtacacaccgaaaaaccatttctcgaaaacaattatgcattctaaagcaatatatacattatagtatagatgttataagagaaagaagctatgataacataattaagcattcttaactgatactatgattgactacttactgtgttaaagtcgacttctttgaggatttcgcatattgaatctctcagctcatcatcacttggcttcaatttatccttggtcttaacctttcctctagaggattttttccctgtgaataaaacaagagaatttcattttagtatgttgtttgagatataagagaaaggtaaatgataacaaagaatgtatgcaaggcacccgcttctaaatttaagttcacgagaagacggagtatattatgcatagcaattacagtgaaaaaaatgtgacatttttcttttacctgatttctccttaggagcaggttttgctttagatggggctttcttttcacttgttttcttccttgagaatacctttggactcgcatcgctctcatcgtcatccttggactgctttgatgacttctttggttttttttaggtggtggggggctggacttaggtgaaacaattaccttcttgcttctagatttttgagcagattctttcttttggggagttttcttggaacttcttttacgttttttaacctcttcttcagattcctcttcttcggattcctctttctcttcacttatagaatgctcactaatctcatcttcagatttttctggaagaccattttcgttttccacctcattttcttcatcttcaactactttgttttcttcatcttctttgtgttcttcctcttctttgtgttcttcctcctcttcttcttcatcttctgattcatcttccgaatcagatccatgacttttggcttgtgcttttgaagtgtcctcattctttctctgataattggcaaacaggtaaacaagtattttcagagttaaagctatttcaaatcataatgctaaatgatattagcataatgaagatggatgagggaaggcaacataaataaataagtattaggctccaataagaaggttgtaatattgtgctctgagtaagattaaaaataacaccttaacagagcgttttgcagatgagctccttgacgaacttcgttttcctcctctcttacgctttttccctttatctgactgagaaacagaagatataatgctttagatgttgctgtttacagggagaaattatgatggttgaaaatggcaaaccttttctttttcagaaagtagcacagttgtagtagcataaggggccaacaaaaaatccatcagctttatgacagtatcttcctgcaaatgcatacccgcctcattattaacatgttcactttcaccaaaattacttaggaagattccaatctaccatagaatgattctttcttccgagaatgaaaaaaacaagatccatcaactaaatcttatttactttttacaaattacatatatggaggttggagacctgaacaaccagccatacaaactctttataacccaacctcttgcgttagcataaagtggcgccttaatttatctacattaaacttgtccttgctaaaaagaaatgattaggaaagctaattgaagcagcagaaagtatataaacaaaccttacgagttgtagtcttgacaattggtatgtcaaacaaatcacagaattccagtaatttctctttgttgcatttatcaagtttttcctttactttgttcttttgcttgtcctacaacaacaatggtaacacatgagaagagtgttggaggcttcaagatctacatcccattgcttcacagtaatcatttttaaacaaataagtaatgaatgcattagaaaactagatgtacaatgtactacaatttgtcaaccaatgacccgttatttttatcccaaattctttagtttgtgcattcctttacctcattttcatgccacacaaaacctgaaaaccgagatatattactcttgacctgaaattgctgcagcaaaaaaaaaggaaatgaggtaagtttattaccctcaaaggcaatctgtccaccaacacaaggaagttgaaaggaaaagtaatacgagaaaagcaagagataaggtcgtgaatacctttcctcttctgccaaaaagaatcgtatgaagtaatttcaaagtgtcatcagtttttctccttgaaaatttgaaagccactgtagaagtaaaggttttcaaatgttaatataagtaaactcagatcataaacatggcgtatgcacaaaacaagtctgctgcacagccttcgcaactaacagatgccaggaagaagcaacaaatttcaaaatggtccacgcactatgtacccaatttgagggaaaaacaatgtccacataattcctaaaaattaactataaatttaagtgcagaaacaataccattgggtatatctttcagtggtgtacccttgccctgaaattgaacgagtttacataagtcaatgatcttttggaagcaaactatgatgttctagcaccaaaaaacaattaatgggaataaaaatggacaaaaagaaaaaggaaaaacatgaacaaaacctttggaatttggaattccctgacagattctttatcaatagttgccaccagcctttcaactgatttgcgctctcgtacagggcgatcacttacaggagtttttggctctttctccttttcctccactaccttcttctccttcttggttttctccgacctcttccctttcacaggcttctttgatcctttttcctcctcgggctcttcagttttctcatccttgtcctgctcttcctcctttgacacatccatcttctcatccgcagcttcattaacttcatccttttctttcttctcttctttttcagctggactagtttcttcctttaccagctcagctttaggttcccctacttcttctttttctttctcatctatcttttcatctcccttggggtcttcatccatcttctcagcttcatctttattgtcttcttttttatcttcctccattggcttaggttcatcatttatttccacttccttttcctttggctcatcatttgctttctctgccttttccttaggtacatcttttccaattcctttgactcctcatttacttctatttccattccttttcctttgactcctcttttacttctatttccttttcatttgccttgtcgttcacctttatttccttttccttttcacttggcttgtgattcacctttacttccttttcatttggcttgtcattcacctttacttccttttcctttggctcatcattcacctttacttccttttcctttggctcgtcatttgcctttacttccttttcctttggctcgtcatttgcctttacttccttttcctttggcacatcatttacctttacttccttttcctttggctcgtcattcacctttacttccttttcctttgtctcagccacagtgtcactggttttgtccggcgggttagtcccatttgccacagtctcagttccctcaaccaccgtatcttcctctcccatgaccaaaaaatcttaaagttctgaaatgtaaactctttcctccccagctaacaatgcttatctggttagggattgctaaaggctgcaaaacgtgggaagcattataaatgagaactgaaaggcctaaccctagataccttaaacacaaattgtcacacagcaaaacaatgaaacaattttctgccaaatctatctgtcaaaaatattgtaaattttcagttatcgtactaataccccttctcttcaatccaaagtaaaaaagagtatgtgtgggggaaaccgcacaacaatgacaattgaaaaaaatttaatattcagatatgaaaattaaaagaacctcttctcttagggtcaaataatgtattcagaacaacaaagaaacatattagtaattttggctaaagagaaaaacaaaacattgtaaatcacaaaaataacacccaaaaccaatcactttactaaagggcgtgcaataatggaagcaagatttgaatttcaaaccttaatcctcaactctacaaaaccacaagctcaccaaaacctaaactttacccaaaattcaaaaagaccaaaaaccaaaactcgaaatttctcttcatttcccacattctcccaaacaccatgcaaagctcggaaatttcccaacttaatcaaccaacaacaacgaaagaaaccctttatcaaaaaacaatgaaagaaataaaaaactaacaaaaaccacaatttacaaatttctccaagaacaattcaaaaaccctaagttcgtacgaaaaatctctacataacctcaacccaaaagctcaaaattcaaccttatagagttatacctatgatagcaaaaatcaaatatgcagcaaaacacaatgttcagaataaaacacttagaaaagtattataagggcgtgcaatactagaaactaaatttgaattgcaaaccttaatcctcaactctacaaatcacaaactcaccaaaacctaaactttacccaaaattcaaaaaaagatcaaaagccaaaactccaaatttctcttcgtttcccacattcacccaaccaccatgcgaaactcataaattcccccacttaatcaaccaacaacaatgaaagaaatcaaaaaaaccaacaaaacccacaatttacaaaattccaacaaaaattcaaaaaccctaagtccgtaccaaaattctctccataacctcaacccaaaagctcaaaattcaacctcaaacgagttacctataatagcaaaaatcaaatttatgaaacaaaacgcatactgtccagaacaaaagacttagaaaagtattaaaaagggcgtgcaatactggaaactaaatttaaatttcaaacctcaatccataactctacagatcaccaaaacctgaactttacccaaaaactttacccaaaaaaaaaaaaaaaaaaatggatccaaatccaaaacccgaaatttctcttcattccccacattctcccaaacaccatgcaaagctcataaattttcctacttaaacaacaaccaccaacgaaagaaaccaaaaccacaattcacaaattcctcctacaaaaattcaaaaaccctaagttcgtaccaaaattctcaacccaaaagctcaaaattcaacctaaaacgagttacttttataatagcataaatcaaacacagaaaacaaaacacagagtattcacaataaaacactttaaaaagtaaagaagaaagaaaaacctggttattttctcgggaaaatctgaagcttcatacggagaaagtcttcgagtctctcactgttctcagtgttctttctctctcaaccattttttattttttatttctttt

SEQ ID NO: 225138 - DNA, 3186 bp, Cannabis indica
tatcgcgtgcactgtagacaaaccctcaatttgcagtcatagttgctgcctccttggagcattaaccacttcatatatccatttttgctgcctccttggaggtgctctaataggtatagaatagaagaaggaatagaatatgtatagtgtgagtgtttttgaaagggaacaaaggacatgggaggagtaatgcatggtagaaagagagccacttattcccgccgcttattaaaaagccctcatacactatatgctacctttttggggctcactttcaaatctagatgactctgtgtttcaaatctttctctgcattaacttcaactataatcgcaaggggatttcagtaatttttctaattttctcttggttttaggggagttgattttggttgtgttggcagcttttttacctgacaaataatggcaagtttttcgcattgatacatatttgaaaaagtatgaaaagataattgagacgctatagaagaaatttaaaaagattagacaaaattgaaaagatatatggattacagaaataaaatatatcttatctgaattattttaagtgactattatatatcaaattcggtcacatgctttaagagccaaaaaaaaagtagtttaagaaaataaaaaacaaatactctaaatgcgcttaaatatgaagaaatcgaatttagcctctgaataagtgcagtaaatgaaccctaatctaatggtctaaaaataggtaaaaataatgtcaaaaaatatgtacattaattaaacccatcctaagacatatttattatctatttaatatatgttaataattatagttcaatattagtttagtatttaataattgttctcactctagacacaattttgaaagttgaaaaagggagaagatttgaggttagtaagctttataactcttcttttactgatttggtataaattattcgtaccaaaatataaatttattctctgacaagcctcccataataacttattaactaaagttcacttgttagcaagaggtattatgatgatttcttgaggttggtgttgactgacataatcatcgttttttttattgttcttttccaagcatctcatgtgtgctatccattcttggcttgacaatgctatttggcacgagtcttacccgaattgacttttgtagttgaatgctaatcgtgatcgcaatctacttcatagggttgttgctgctacttgcgcggcatcaatttatttggtgaaatcgtaattgtatctttaagcaaaaggtcttcttaatttctcatgtgcataatttgattagagtcacacttaaagctagattactacttgttaataataggaggaatatctttaagaaaaaccaacaaatttttaattttatttgtaataacatgtaagtaatctctcttttgttattttgtgggtgctaattttagcatttgttcagttttgattaatgaaaatttattctttaataaaaaaaatattaaatataaatcacttataaacaaccaatcatggtagtggctaacttttgttcagacttcagagtcatactgttctatcttaaaagcaattagtttagtgataagaaaaatagttcatgttttttatgtatgatttaatacttaggacaatatccataataatttcaacccaaagctcgttagaagaagaaaaaagtatcatacactacaattaaattttcaactgtttaaattactacttattagttaagacgcacgcagtaataaatatagtttaaaatataggaatattgtaactatggtaagagaagatgttaagagctagcaactctaacgagaatgctttatttactattagactttttttttaagtagctggcaattacagcaggctagtttatattagcactggaagtagaagctaatatataattaattaaaaaaagatcacgcacacggttcagggggcagagcatcattacgatatgaccccagtagccaaagccaccttaattagtttcctgcttttctgctcaggtttaggaaaggttagttggacttcattactatgcatgtctttattatcgatcacatcatgatcaactatcaaagtttcttttgctcttgtttatttaaattcatcacatcaacgtaaaagcataatttttcaatttaattttcttttataattatataagttataatttttttattttacttaagttttttagaaacttacatataattttaaataaatacaacctatacaattataaaatataattaattaagaaaagctcttttttatactaaaacaaataaagaatgaatccaacaatctaaattttttagaaagtgtattatagtttttttttcttattctaaaaatccttacattccaaacctagtagcttataatgaattattaattgtactgattttacagtatcaaaataatgcatgatgcatcattgttaacatggtccatgtataaatctgtaattataactacttttgcaaataaattattttcttttctttagttatatttaatttaaagccttttttcttggaagatgatctaggaaaggaatcatttttctgaaccagcccccttatggtctacgcacaaatttagtcagccattgagtcaaacactcagaatttaatgctttctaataaataatttaacgataataaatgttttcccatgcaaaagcaatatggcagccctaaaataagctaaatctttttttgctcaaaggccgcaccagaccagtggccaagatggcaattttatttgcaacgctcttttcgttagtataatataatatttaattttatatcttttgggttaaaacggtttattatacgagaaatgctaaaaaacaccaatagtacttagttattttctgtgtcattatcgctatagtttaattaagtatcgagttccatatataattcaatgtaatcatttttaaaaatatagctaatcaatcacaatgcgacatgtctagagatgttaagtaatactggtgcccaataacaactccttaaagacattccaaagtgatgttaatttagtacaataaaacctttatctaaacactaaaacaatatcaatgtatagtttcttaatacgaagcttaaaaatatataactaattataatttaaaagttattcttattta

SEQ ID NO: 225139 - DNA, 3375 bp, Cannabis indica
cattatcttacttgtactataattgtcttacactctgcaatcatagagccttgttgtggagccagccaaagtggaggggaattcatgtataaatggactctatattgccaagttggttcattagctttccaagttaataggcctttatgaggtgagtttcttaattggcacatgattttctaagttcgatgataaacatatgcatccaaattcaagccaagccatgttttggttctatgaaataatgttaatggtttaagcttgatcatcttgaatggccccttagccattaaatccactcaaaagacatttatgttattttatgccgttcaatttttttgtgaaagtttctcatttcacctcacattcaaagaagggttgtgagttagtctaaacattcatttatattcacatttagcatacctttcactttattaagtccactgaagtattaattacattggcaatggtattttatggtattaaatatctataattttctatgtttttctctgttcttttctttctttttctttcaatatattaatttattataagttttgatgtttgatgattgatatgtaatatccaggtaatctgtggtctggttcaaaatgtggtgttattttgatgtggccatggagatccatagaaaaatctctttcactgaaactagaggaaagatgcatgactcatttgttggtcgagaggttattcgtggaccttagaagttaggtcatagtcaatggtgtttgtagcttatcttttcaagacgtcaagtatagtacttattatacgataacactagagttaaagtgtggtgtgttggatctctctcattctcaatgtgcactataacaattggtttgttatgtttacaaccactatctttattttatttattcacaattgtgaccaatgaaaacttgttgcaaagctcattaattcattgattgtgtgcaacaagtactatttttttttatatctcttataaagaagagaaagtaactaggtgctctgcttttcaaaactctaatgaggtaaggtaaattttagattaaatagaaatgcatttattttgaaatttctggtaataagaaacttatggtaggaagtttaatttttatgtcatattttttttttatgacttaatatgtaattagttatgagtgtaatgcattgatttgttgttgaatattgctgttcaaatgactaatcttctttcgtttaacgtagtggtgtacaaacttaaagtcgtctagagattataaatttatataatatgacatgtgttactgtggttgtctatttttacttctacttcaggtgatctacggtaatattttgatgattgtaaacgtattgtatatataatttatattttgttgttctttcatttatggatgatttagttttgaaactttttctctaattggagattgcatttgcagggattgatttttaccgcttactctttatgacaaatggacttcccgatggtgtcgagttggcatactatgtgagggatgtgtatatatctatatactttatataaataaaaaaaatttattttttctcaattataaataaaacagttagttgttatactgtacatattacttattttatctttggctggtatttgaaatttatagagctctcatagcagacacatctacaccttgagttagactaaatgccagggacatgtatatacttcaaatgcatttgtttgattttggagggttttggccaaattaaaataataattaaaaaaaattgatttatgggatttatgaatatgcgactatttaatatataattcgcctgagttctagagaatatttggtggctgcaatctgggaaatggcatcatattttgcgattgctataatagaaaggtgaagttcttgattcagatagacgttttgtagtatgataattttgatgcatcttaattagtttctgacatcatttgcatcatcttgaacaagttagtccttcccagtttgaagctaatgctgggatgcacgtatactttatttagatgagatgtttttttttctaatttatggcaatgtagcttaaataaaactaatattttcgtggcttggcacgtaacatctaactagtatatatatatatatattaagtcaccgaaatttacagttatgtatgcaccgcctgatagtgggcccttacaatttaattctggctcctcatgtctaacggaaaaacaaatataaggaggagatatatagttataaagagtacataatacataaccactcaaggttagctcaagtggccgtgcgcgtgtattggaggttttgagttcgaatcttaaattatgctgatgtaatatataaacgcttaaataaaaaaaatatatatatatgtaatacatatgtcgaaaacgttgtaaaaaaattaaataaaaataaataaaccaaaaacttttggacaaaagatcaatgagtggtttaattttcttcacctactcactgtgagaatataaaatcttgtggggcacgtccacgtgccttgttgacttgtagtatgtaattaagtcgtgaaggattattaacttcctttacgtacttttttttttacatccctacgtctgacactcattgcatgatcacaagctcaagatactgaataataaagaaaaatatactgaaacattactaattaataagctttctaataagaatataatgtgatatatattactactttctgttaatgtataccttctttcaatcgatgaatcttcttgatatgatatgaaataataataatttcactcagcatgatattactaaacaaaaagtaccacaaatataatatatgatataacaaaatagatgtggaaagatatatatgatttccgaggaagggacattttaaatgagaaaaatcgaatgcgagcatgcatgaatgcttgtgtgtgcgtccatgcatgagcatacctgcaagcacgcgcgtgcatgtgtgtgcatgcaaacccgttagcgtgaaagtgttacgaagtgctgaatatgctatttaagtgagaggacaaaatgtgaaatttgagtacatatggacaagaatgacattggaggaggaatcaaatgacaaaatgtgcaacagagaggcgtacaaccacacattctacaaactctgaaagcaaaggtacgagtagtggagacaacacacctccaaggtccgaggacccgaccaaaggtactctgcaacctcactcctgcaaattggggacgacactcctacaaccggagaccaaactcctgcaaccggggaccacttggcaccagaaaaaagtacgaggtgtaaggccacttcctgcacctgcgacgtgcagcttgaaag

SEQ ID NO: 225140 - DNA, 9375 bp, Cannabis indica
aattatattagtaatggggtgggtcctgcgtgtctcttctcacgcgcttaatcacctctcttcttttatacggcttcaaagtgcacaccacccaacaccacttcacattttcatgcttattcgcctatgcaaacaactctcctttttctttttgttctctactattaatttcacttaacaaaccattttttatttatttttaaatggtttgcttcaacaaggttaatacatatttatataataatatttttcaccactataattctgtggacttaaatttcctagaataagcttgttttgttatcatattttacaatgaatttattatacattgaattaagttataaataatttattagcataataaaattaagtgaccaaatatagaaaagcaagttttttttattaagtttagaagagcaacttgaataataagtaataacataccaactcacactatttagcaagatctcatccccatcacataattaagagaattgtcaaaaaatactattagtgtctagtacttttactattatactgccataaaccgattatttgcccaaaaagccatctgaaccgtaccaaaaaagtcctaaatgggcccaccgaaaaactcatctctattatcttaaccaatccgattggataccattaacaaattgaagtcatgatgatgttacagtgcacctaaacatactagatctttcccataattcgtttcttaacgaattatttatttatttatgaaaagcaatatcattaataactgtcttcaccgacgtaggtgtttcgtttcattaaatctgagtgtttttttgggtcaataaaaaatatatcactccggtttcagttccactaaattggtatccgaacccattagctcggagatccgacccataactaatttatttaaagatttttaattttattttccggaaaagggctttgtttggagcttagaaaaagtataaacatatgtaaaatgtacttgagacatggtagtttcgtccaatcagtgagagaaaggaaagaagaaaaatctcaatggtccaacaatgaaataagggaaaagtataaaaggactaagaaaaagtggaagtatcaactatcaatcaagtatggtataaaaagttgaataataaagaaaaatagtttatcgaaaataaaaataataataataattagaaaaataagtaggtagaaaatggtttacttaatgaagtcatataagtctaagaaagaacgaaacagtagaaaacagagaagctgagctgagctctctctgctttgcctttttcatccctttcagtcagccattcattccttcactcgttcacacccgccctttttcccctttttttaataatttcatctttacttaccccaccatgtgactctctctctctcttcttttctctctttacctctctatgaagttctatcatcttcttttgcttcttcttatataaacccgcgagtctgacactcggtaatggtggccagatagtaatagtgctgcattcacatgttctttctctctctctctctgtctgtttcgaagttttgagatttgggtttggtagaaaacgcaaatctggctattgggttggcttcggtttcgggaatcgagctaagatttgatgcagatagggggtggaggaaggatcgtaaatgaagctcttgctcgggggaacggccgcttcaccattatggtttctgttgattttggggttggggttcgggtgtcttagctctgtttctgctgacaatggaggtatcagagatcgtcgggaatttatcttaggttcgtctcttttgatgtttttgcttttccgattttgtggggttttttttttttttgcttgcttgatcactgagaaagcttaatgggaaaatgtgtaagcttagtgggtacgttatgacaatcacagtattagcctccaattcactaatggtttcttcgttttgatggatataattcaccctatgttcaacattttgtaagcaatgagaaaattttacaagtctcctgctttttcccatacacagattttgatttgatgtaattgaaatggttctttcttgtgtcctacctttgattttttttttttttatccttcaaaaagtgcgttttgatttgccttgttctgttctttaattgtaatttgatacaaattatgttggtgtaatcatctcaggaggaggagaagaaaatctggggccatggaagaacgaaatctcggagcttgcagcagcccctggtccagcaagagatgaacctcagaccacgcttgtcttggcagccaacagaacaaacagaccggacattcttcgcaacttcaggcgatacagaggcggttgggacatcactagtcgaaattactgggctgtaagttctgtgaactctgtacattgtcatgttcttttggtttttttttttgataattaatgttcttttggttagttgaattttttttatctctcaaaaactggactaagagatccgctttgttagcctccagattgttaagaagcacaaatgtcaagtgccacaaaatttgttctcaaaacatttcatacctctaaatctattttaggaaaatttgtatgaaaacaaccacatgcaggctacattatgaatagaagtaacaagctagtttaaacaatctatgagctaatttcaaagtgataattgcttttatttgtcactctattttatctttctctttttatgtgactagagtttaactcaagatttacggaagcatttcttaattttaggattatatctacaattactatctctttctttttttcactcatcattccttgaacattatttatctacgcagtctgttggatttactggctcagctgctttcattcttgctgtcctatggtttatttcctttgggttagttcttgttattcatcattgctgtggatggaggataaacatcaagaatgaaggatcacatctttcacaaaagatcactcttatcttgcttctagtcttcacctgtgttgcagcgtaattttctttctcttaaatattaaagttttattttgaaaacttttatcacaactctttgaaaacactggctttccttgaagtttcattgggtctttctttccatacgcttcaatcacaaatgacttgaaaattgactgcgattttacttttaaccacacaggattggatgtatccttctatctgttgggcaggatgaatttcatggtgaagttctgcatacactcaaatatgttgtaaatcagtcagattacacagtgcaaatcttgagaaatgtcacgcaatacctgtcccttgcaaaggatatcaacgtggcccaggttttccttccttctgatattatggaagatattgacaagttgaatgttgaattgaatactgcagcagatactctgactgaaaagacgagtgaaaattctgtgaaaattaaaaaagtcttcaatcttgtgtaggtgttcttgactttgtggtgttctgtctggtgaaacacttttctaacttatttaatgggctaaccttgactttttcttttctttctcaggcgttcagctttgattactgttgctgcagtaatgcttgtcctagccttgattggtcttggtacgtattaaaacaaatgataatcaccttatttctaattgactgatttttaccattttctgttcatgccaactcattgatgtttcttttgtgcagtcctctctgtccttggacaccaacatgcaatccacatgtaagtttctttgcaaatttaactgaaattctcttcgtggttgtattactatatattctggggagattgatatcttgttctaacaatttcattttattgtttcagatttataatcagtggatggctacttgtggcagttactttcattctttgtggagtttttgtaatcctcaacaagtaagagttttgttagttgttggacatcatacaatcgttattgtgtactggagacttgattacatgcatgttaattgatacacatgaccatccttaaatttttaacttcccttcgcatgcgatgttcagaaaaattcataatgcataccttaaactgttgaaagttccagtaatctgccattctctctgttagaaatttgaggcttcccttgtattctaatttttccttctgctcatgtttctcaacttgatgattaatgtatttttgtttttcatatcttcatcatgaattatctaacgcagcatatgtgctcttaacatcttttagtgcaatttccgacacttgtatggccatggaagaatgggttgaaaatccccatgcagaaacagctcttaccaacattcttccatgcgttgatcaaagaacaactaatcagactctcatccagagtaaacaaactatcaatggtattgtaaatgttgtcaatcgatttgtctatacctatgcaaatgcaaatccctcagaaggtgctccttattactacaatcagtctggacctcctatgcctcctctatgttatccgtttgactctaatctgaaacaaagccaatgtggggatcaagaggtgtctattgcaaatgcttcaatggtaagtagttttctcaattgcagggatatgcttcttaggattttaattatttctaaaaaaacataacattttcagttgattgagactggtttatggtaagtagtgatataaaagtgaatcatatgatgtaacatagacaatctttatcactggggtctggatggagaacccccctcgcctactcttctggtttgcctcacgtagattaattgataagcttggtcttcgttagggatcttctttaagatttacataaatagtatggagcttgacttaaatcctcgttcataccaagagttaccaagttgaaacaaagtaatttttgaaaaagaaaaacattgttggatagtttttggtgtctcttaaaatccggcaaggggacttgttttaaatgtttgtttgtatgatttacaattacttcaggtatggcagaaatatacatgtgaagtatcaacagctgaaatatgtataactgctggaagagtgactcccaacatatactcacagctggtagccgcagttaatgagagctacgcacttgagcactacaccccaccattgctgagcctccaggactgcaattttgtccgtgatacattccgaaatatcacttccagctactgccctccattagaccgtcatctcaagacggtgaatgctggcttggccctgatttctgttggtgtcttgctttgccttgttctctggattctctatgcaaaccgcccccaaagggaggaagtgtttgtgaaactatcctcactaatacaaggcaagggttacagaagtagcagcaataatgtgccatcatcaattacatcaattgaagtatgagtagaaaattacctgaaagattagaaatatccaatttttttggaagagttatgtataaagaaagaaagaagaaaccgaagtggagcaaagttccattttgagtttagagtatttgctccattatatatagtataaattattgtaatgtatagtaaagaaaaaaggaagttcgatttttccataagtcttgtgtaagttactttactttctcaatgaataaaagcagtgccaaaaaacaattatctttatattctgtactttatagcaattcaactatgtataatattgcaaatgaaaagtgtgtaatttctttctaaaagctaagacatgatttgaagtgtttaacatggcatcattttcagtcttgctttaacctgacccagatgtagttgcttgtccagtaagaagctcatttaggccatgaacaacgacagaatcactataatggaggttggaaacggttacaggaattccattaatcatcaatgtactacccgatctggtaatggtgatggtgaacccatccgagtatgtaggcaacaccgttccatcagtgaaattgatcaaatcactccaaagaagcttgcaaggaacgacatgtcgtagaaagattgatgggtcttgagcctgatcggttggacgattcgccatggccatgtcattaggagcaaacacagtcattgtagtcgggtccttgttgaaccccaacaactgcaaatccagaaacgaagccatggatgagtacccattggacctcaaatctctactggcttctttaaaccaagaagctcccggaaaccccatggcggcagccttcgatggcaacgatttgcatcttggaccaaacctcgggctattaccgggtccgggagcttgaaaattgggatcgaagaactctggaactccgaagacaatcagagaaccatcatcgaagatcggaaatcttctactgattttgacattgttcagtgaaatttcagaggtagaggaggaatgagtgacggtcaaggtacggcccggtaacagagtcgggatcttggtcccagagggaagcgatttgagggtctccagcggcaaagtgagggggcagaagtggtaacggaggagagatagagcgggttgccctgatctcttaaaggcgtcatcggccggagcaaatatcgtgagagaaggagtcctttgggttagggtttgggagacgagatccagagtaagagccatggaagcgaagccagagtcggagagaatctcggaggcatcgataatggtgtttgaggggagtgaggaggagagagaaagaaatgagagaagagttagagagatgagaagtgaagccgccattgatagtgacagagctaggaagaagaatttatttgtagaagagagaagtttcttatttggcgggaaagatttgattagtttgtgttcgttgatttggggagagaggaatgtactttcaaatgacggtattgccccttttccttatggtttcaaatgagggtagatttaaagatttttgtgtactttcattcaattttactatttcagtcattatttatgtattaaatcatgatccctaaagtttgatatctaccaaatcatactcctcgaattttgacacatatcaaacatgcacctcaactttcattttgttagatttttttttactaaaattagacaaatgtcattaaatctaacaatcttaatagtttaggggatatttttaagagaaaattagtatacccactttacttgttttaatttttacctccatttttatatcctttaagatatacccactttttatggatgatgtctccattagaccccttaagttaatgtaaattatatgcaagacttaagtaaacagtatgggtatattgggcaatctactcaaaaaatgggtatatttttttaaaaaaaaaatataatatgagggtatttttgattaatagatacaaaaatttgtattttttaacttaaaagttcacgagcatgatttggtacatgttaaagttcggagagtaaaaatcctaattagccaaaaaaaaaaataaaatgttttaaatttttattttttgaataaaaaatatgtaaataaaacaaaaacaagaagggttttccttttgttatagcctaaaagataataatattggaataattacataaatatcaatttttataaaaatttttgcattttccttgttcaaagtttttgtttttttttttttactatttttacggtattgtataaaaacacacacaaaaaaataatataaaagtaagaagaaacagcaagaaaataacatcaaaactacataaaaaaaataatatacaaatacaaataacaaaaaaattaactacaaaataacaagagtacaatataaaaataacaaaagaccgtattttatgtaaataaaatctaaaaaactgtaaaaatattgaaaattttgtacaaaccgtatttttttaatttttttctttgttgtttttatgttttttaaaagttatccctaattagtattatatatgcaagagttataaaaatgaaaagatatcattaattttagagtaatttgtggcataatctttataagtgcctagtttattgcaactaacttctaattctaaaattttggtggtaaaaccccctaaactcatgttctgttagcacttagccttttccatccatttttggcagttaactgccatgtgggcatgtccatgtggatacattgtacacgtgtcacaattttatggatccgagtaatttaattatttaaaaataaaaaatagttaaaaccattttattttgttaaaaaaatatataaataattttttactaaataaataaaaaattaaaaattaaacaaaaagaaaaagaaaccccctaacaaaaccatgcctccctcactctcctctctcactcacctctgcaaagccaactagacggttgaccactagttgccgtcgatggaacccattggccccaaaacctcttctcctccctcactcactctcctctctcgctcacgtctgtcctgataaccttacagagcaccaccaacgcttagtcgggtctaacccacaagaaactccggcggctcccccatgtctttagtcggggtttggagctaccatttcggtcagatgtcgatgtcttagttgaggagaacgctgatttcttccgattcgtggctaagtcggagggtttcgacgtcgatgtgagggctcacacggtcaaaatccatcctgaggtgacaaagattgtggttagaggaagtgggtcaatggagttgtccttggatcggatgagctcgaactcgacatgtggaggtttcagttgccagagatggcgcgaccggagctcgctagggcggtctttgttgatggcgagctcatagtgatggtgccgaaaggggagggcgttgagaactcaaagcatggaggagatggcggtggaaaggttttggggcgatggcactggaaatggaagtaatttcgaggaggtatgggaagtcagtttgtgcttgtacaataataaagaaatgcccttttaaaatttacttcttgttcttcaattggatctagtttacaaagtaaaaagatgatgataatgttgttatggatgaaactagtagttgtatgcttctttcgttaagttaatcaagaggatgttgatggacggctacttagattttaggggcactgagagagcacgagaagaagagagaaaatttttggagtaattaggggtttttttttaatcgttttttttattactctttaaatttttatgtattttatttttttatttttagtatttaaattttattttattcaattttttaaaataaaaattatttttaatttttttattgggtaaattagtaattgtattttaatttatttttaaaattaaatttaatttttaattttttattttt

SEQ ID NO: 225141 - DNA, 8231 bp, Cannabis indica
gaggatgatgcaaacctaattctagggattcaatttggctctttggagagggaggagtacgtgatatggcacttttcaaagaatggggagtataatgttcggagcgggtacactacagctatgaaagagagaattactgaagagaactcgaacacaaaaagcagtgagagatggtggaaacacctttggaacttgagagttccgccaaaagtcaaacaatttttgtggaaagtgagccataagtggctcccaaccaacagtgttttgttttgtaagggtatggaagtcgatcaaaattgttagcggtgtagaggaatgaaaagtgaggaaacaatcaatcatgctctatggaggtgtttgtctgtcaaagaagtttgaaaaaactgtggcttatacaagagtatcaagaaatgggagaacccagacttgcaaatcttcttctcgaccttaaaggaaaatatttcaagcagagacttcgatctttttatgatagtgtcgtggcagctttggtatattagaaacttgtcgctacacaataacttctcccctaaatatggagatgttattgagtagctacaaacattcttgatgaataccgaagacataatggaaatactaagaagtcccatatacaacaggaagcgaatatgcagcgctggacgcctcctgaggacggaaagcttataataaatgttgatgctactatcgacacttcgaatagaagcagcaaggttggggagttgttcgagatcatcttggcaggtgtgtgcgttcatatcacaggttttggcataattccttatctccctttgtggctgagcttaaggtaacaaaagaagccatcttgatcgccagagatacaggtattaacgaattttacatccattctgattgccagaatgcgattgttgttgtctgcagcaggaacatagtgggaggggacgatgtttttctggtcaacaacatcaaataaggccttgcttcgagtagatgtttagggatcaaatatgtacctagtctatgtaataagatggcacattgtattgctaagaatgccttactcgttaaggattctattatgtgggatggagattttccttcagttgcctatcatgccttcatggctgatttggccttcccctaagctctatatcacggttccatttttcaaaaaaatatatatatttagcattgtgctccaatacaaaattacaaaatttaataaaaaatctaatattttaagtaataaaaaatattatatataatctaccatttaataatgtaattaaatatactaataaaataatataaaagaccaaaaataatgtatttgtgataatacatcatgcaatatttgtcaaatttaacaatatttatcatataacaaatttgtatcatttttttcacatttttaaaatatatttttaatgagttatattttaactttactaatttacttctacgtgttcttttttttttagagtagttagcaactataatcgagaaggagcggggaagggaacaggagctaagagaaaggaacacaattgttccagaggacctcttcattagttcctaacgatcgatgagcaatgttatgttcaagagtgttatggatgcgaggaatgaagcaggtggatgcatcaggaaagtgagataaagaggaaatgatctgccaaactctatcagaaagagccgagaagttgtgctgcctttggactattttttaattagcagttgacagttggagataatcaacccaatggagaatttaaccactgtacaccatcttaaagctcttaagagagcttcgacttcagcaaagattggctgtattcgagagacagtcgagaagtgaaaacctgctatgatttggtcgttatggtcttgaactacaaccccaaaacctacttattagtgtgactctgaacagctgcatcaacactgagcttggtaaaaaccagggggagagttggaaagcgtcttcagtgatgtctgtagaggagctaccttgttaaaacttgagatctggaaggactttggattgagcttcattatattcctgcaagtaagaattaataaagtattatatatcttgaaagtttagcttcttatctgcaaaaatagtcttgttacgattattctatataacccataagataccataaaaagtgtaaagttcttgtttagtaaacttttcaaaacctctcaaaatatattctttaatatcacactctttgttacacttataaaagtaaaaaaaaaaaaaaaaaacttgtattctttcaaaacttacctactctggaacactctaaaagagaatgagaattggagttcactttgttagaacagagtgtacagtagggactatcgaggactcttctagagaaaatattaagattggagggaagtaggtgattgaaagctttccaaatgaaatgttttattttgggtgggatgttggaagaccatacagatttccaccagcttttgagactgctgcgattggaggaagaaggagaggaatgatgagaattagctaagtgatatgctgatttaatggtaagtataccagaaggatcatgtccccaaatgagacagtccttggaagatgggttagttggggtagatagaatggactgaaccaaatccttatcaaaaaaagagttgagtttgtgaagatcccaattgccattatcattgatgaaataagaaatagtgttctcaggaggcagggaatcatctttgtagcaaggatgaccataatcaggcagccaatttgggctaagggaaggaatggatttaccatccccaatcttctagtcaaggcattttgagaggagatttcttccccaaagaagacttctccaagaaaggaaggagaatgtcccaaggaggcttggaggatgaaatcattatgcttaaagtatttagcctttaagatagtggcaagaagggaagtaggattctggaaaatcctccaagcttgttaggccaacatagcttgattatgatgaattatagacctgaaaccaagatccccaaagaatttggatttgcaaaggttgtgccaagatttccagtgtatcttagatttattttggccttttgaaccccaccagaaattggccatgagcttttctagctgcttacaaatggactgaggaattctgtaacaagacatcacatatgaaggaattacttggattacagcttttaacagaatttctttgctagctttagaaaagagcttagagttccagctgctaagtttattgctgactctttggaggatgaagtgaaaagaggatttcttagatcaagtaaagcattgtgggacgcctaaataagtgtcaataaaaggtttgtcatccaaaccaagagaagagaagaaagagtttttgtcgtgggtggtggtgttgggggagaaaagaacagacgacttagcaaaattgatagattgaccagtggccttattgtaggtagtaagaatatcattgatagaatgactagtccaatgactgacctgagtgaaaagaagattgtcattagcaaagaggaggtgagaaatggagggagcagaacgacagatagagacacctttgaacaagttagcatgctctttggaacgaacgatatctgacaagccttcaccaaccagaagaaaaagataaggggacagggggtctccttgtctaattcctctcgaaggagtgataggggaagagattccattgttgatgcagagcttgaaggaaacagtgggatatacctaaagatgagagacacaaaactttgtgggaaactgaagtgaagaagaatttgttgaacaaatccccactcaactttgtcaaacgctttctccatattaagcttaagagcggcccaacctactttgccattctttcgaccattaatggcattgatgacttcattagcaatgagaatgttgtcaaaaataatacgattgttcaggaaggcaccttggttataagagatgagagtggtaagaacagttttgagcctgttagcaatagttttggctacaaccttgtaaatcgtcgagcataggctaatgggccagaaatcacgaactttggtggcattactttttcagggataagaacgagataagtctcattgatggaagtaatgctagcacccttatttaaaacatcaaaaacagcatggccaaaagtagaacccaagatgtgccagttcttctggtaaaaaagggggttgaggccatcgggatcgggggctttgtccccaaaaagttggaaaagagccaacttgacttcagagaagtcaaaattcttgttcagaaaagagaattggtcaggggtgatacgatgagtgatcccatgcagaacggtattgatggattccatatcaatctcagtagtggtaaagagatttttgtagaagtcaacaaaagtggcacaaatatcagggaaagaagtaacaatcatgctgtcatccagtgtcagagatttatggtgttattttatttcctagagttggctcgattataaaagtatttggtgttcttgtccccagcattaagtcaattaactctagctctttgcttccaaaaagcctcttcttttaataaaagagaatccaaggaggattggaggcgattggcattggtaatgtcatcaggggacaaggaaggcttgctgtgaataaacttgatttgggcttgaaaattcttaatactgtggcgaagattgtttttagattggctccagagtttaagatttttaatacaattattttgaaggccgagaaaaaagtgctaggtgagatcacaataggaattattcggattgttagaccaactcttcctcataagaggaaaaaaatctgggtccatcagccaatggttctcaaaaaataaatggttagcacgtttacagagataaggggtagggttgcactccactttaatggctctatggtcagagccataaaagggaagatgcgcaatgttagccattgggaaaaggttatcccaggccttattgacaattccccaatggagtctttcacgagtttggtcatgcttccacgtgaaccgattgcccacaaagggaagaggatgcaagtcgaacttagtgataggattttggaaattgatcatagcatgggaaggaggaggattggggctactcttatcattaaaacctaagtagtcattgaaatcaccaatgatgatccaggggaaaagggagcaacatcaaataaacgattgagaagggtccaagagtcctctttattatgagcataaggcgaaccatagtaacaagataagtggtactttttattattatcattaattatattacagtcaatgtggtaaagagagtgagataaaacatgaacattgacaacatcattccaaaaaagaaataagccccctcctaaaccttgcctaggcacctcaaaaatattatcaaaagacaacctagccttaaacaaaacactactattagcaggctatttatctccatcacaaaaagaatttcaggacgatgttgttgcaccagaagggagagatcctggaatgctcaggaacttcccaatcagcgagcattccaacttaagagactcatttttctgggcggggttgctgagcaacacctgcttgttcatcagtgtcaaagatagatggaacaacatcaaaatcagagtttgtggattgggctctcttcaaaatactcctcactgaagagccaacttgactactttgtctagtgtaagactgtttggaaccacaaatgttgatagaaacagcacgagtcctggggcgaatgggttcaggaggagtttcagaggaaaccctagtgcattcaggatacatggggtctttacctttggagatagaggtgaggacagtgggagtcatgatagggctggagttaataggacaaatgattgagctgaaaatcgaggctataggatgtggagagatgttgttaggttggtgagaggtattggaaggatacgcagatgaggggttcatggtagccgtgtattaaccagagtagtgttggcaatacttgggaccaagaattgatcaacagcatcttgaagactttgacttgaaacattgttgatggaggggatttcttcgaaagaggtagagttggatagtttaaagatactcttttgtagaaggttttggcaggggctctagaacatctttataattgagagatgggggatgggcatgggtatcaaactagtgaagaaaattttcacacttattgaaagtgtggtcaagctttcgacaatggtaacagtacttctgtataccttcgtattgatatttcatccatttagtgatggacagtttcctaaaatggatattcataccacgaaacaaaggtttagtggtatcgagaaggacttgaattctcatgaaaggagtaatggggtgacaaagtgaagcaaggtgcacttcaatgagatccccaatggtgtcagcaatgaagtgagccaagccatgtgatgacctattgccaaaaggaataaaatggacctacagccagagagggatgtatcgaagttggttagggaggatggtgtcaaaaccatcaggaatggcgaaaagcataaggaaactgtcaaagtgccaaggttggccttccacgacacgccttttatccccttcacagccaaatttaaccaaaaactgaccagagtgataatccgtgaaggtaaaaggaaaacaggcaatccaagcatctttcataacgttgccaatcaattcaggtttgggagttttagaggtgaaaattttgacaacaaggcaatacgaatcaggttggatttcaggatggatagaaacatgatcgaaatgatgaattagagcttcttcaacagtgagttgaagagagtggttgttggtttctggattggtattcatggtgggctgcatggaagaagaagatgataggagaaatcgtaaatatgtagaaaaaagtgtggtgcacacaaaccttaataataatctttaaatagaaagaggagaagagaaagtacctagagagattgacctctggaagattgggagatgctaaatcagccctagtatcgcctagcccaaatccatagcatcctaaaaccatgattattcctgatctcctgagaaaatacttgaagaaagtaacagttattaaatatgagatttgaggccatggtagaggagaaccaagagttctctgatacaccattaaatgcaacagtcgacttggggtgagagcatgaggtaataaatgaatcgtaatgatgaaacaagggtaatggagggaaagaaggaaagagagggatggacaacatcacgcggatgagcaaaagggaactggaaggaccataaagaaatctagagggttccagagcagtggttgtccaatctcttgaatatataaaatattagaatgagattattaatatataatgttacttctacgtgttcttaattagctgaaaagaaagtacaagctaacaagtttgattcaaaattcaaatggctttcttctttatagcaacttgtacaagaccgtgcaacttttcttttccgtctttcttttaagatcgcaaagccgtgcacttggttatcagtaatataaatatatgtttgtatattatctaattattttatattaggacaggagtagttatagagattaattaattaattacttggaatatgggctaatactcatggcatccaccggcatttttgcctttgccactttgacgtacggctcaaaatccaaagaggaaaaagaaaagctcctctctcgaagaaaagagttttgggtattatatgccatgttttttgcaacgagaagattacaaaaattaaataatattaaaaatgctataattatatattaagaaaccaatacaaatgtgagaccgggaaactcccccataaccatcactcatgagcttcattaattaacagcacttttttaacaccaaattaattaagacacttctcttatcatcaatatatatcatataatattatgatataataaattaatttgttatttcattttctttttttccttcgggcacttctttaaaataatttttttttattttagaaatttttacatgaaaaattacttttgcacaatttattacctaaatactcctacacgcctatatctacttttttacttacaaagtttgttttattacacaaataccac

SEQ ID NO: 225142 - DNA, 3201 bp, Cannabis indica
aacattaaatgttatttctgatctatattagtaagtaaatctgattattttgaaatgagttttatttagggcataaaacccaacactaactagattcccaaagatttttttcttgtatagttgtggtctcatcatcatccttatctgagaaatctcgtattttatggggttgttaatattaacaagtttccaatcaactccattcttcaagccaggaatgtaatgtatctaattttcttaggatgtaagtatgaattgttcattttggtaccattgactggcgacacaaaaactagtaaaaaaccatcatttttgtgttccaccacttgcacctaaaaatgataacactgtaatctttaaagtaagttaactcgtatacttgcttgagtacgccataaaaatttttatccaccttttctaagcaccaactatttttggtgttacgattataatcccaatcctcaatgaggaatttaacaccgttagcaatacattcaggataataatagtatgctggattagagagatttgtgatggcgtaaaactcatctgatatttccccaaggttatccacttggaggttattgctttatcatttagtggaaaatataagcaatactagtacaagaagccgtatttgaatgaaaaaattagtagaaagcaataattactcacttgagacttgaaccaacttggaaactcgttctcttcaactgtgttaagattttgatcgtccctaagttatagctcattcatatgctcactacacataaatagattttgcaagacaagatcgtgagtgaagaaaagtaaattaagaattcaaaaaatatcttacttgatatacttttacacttcagtataattgttaaagacactatggtcctcttaccaatgggtcacccaacatgcttgaatatagagaattccctttcaggcttatttgggaggacatcactatttcaatttggtcagttaaactgattttcaacttcccaaaagtacatggaacaaaagtttaatgactcattaactatgtaagtttcacaaatagatcctttcggtcgagaacaattttttacatattgtttgtacacggatatggctcgttcaattggatacaccacatgtagtgcactgttccccaagtatcgtttcttaaggtaaattcataactaagtgaaccattgtgtcaaaaaatatcggtggaaaaatggtttttaatttgtaaagaatgtctagaatacttttttgcatgctctctaagtcttcaacattcaatgtcttcatgcacaattattaaaaaatacacttagttcaattattgtatctcagacttctttcttcaaaaaattttgaatgcccctggcaacaagcattgtaacaacacatggaagtcgtgagactttgggccaacaatcttgtcttcattatcattcacattattctctaaatttgcagcaaatctgtctgggaattgcacagacttgataaatttgtaaaattcacatcgtgcgggaagactaagcgtgtaactagcaggcagtttcttctaattcatattgcgatcttcattcaaccatatttcacgatgtattttgagatcttccaaatcaagtctttctttcttggtatctttggacttgcccttgatacttaaaagagttccaaggacactatcgcacacatttttctcgatgtgcattacatcgagattatatctgagggactcgtccttccaatactctaattcaaagaatatactattttttgaccaatttagctcagatacagaacatttacgctttactcaaccaaatttcttgtgttttatgggcaaacaaaattgtatatgctccagtttagctaaaacattgacccttaacaattctggaggaggtggtctttcctcaatgcttccatcgtattttttacttctctaccttgtgctgtccatttcaagaaaccgtttgtgcccaacataaccaatcttgccgcgcaatccaatggaaggggtgtgttcattacgagtggggcacaccttgtaccctttggttctccaactagacatcaaagcatacgctgggaagtcattaatggtccacaaaacaacagcacacattgtaaatacaatctcattataagcatttcgagcttgaacacctgactcccacaactctttcaattcatcaatcaattgtctcatgaaaacatccatgtcttttccaggcgcagtgcgccatggaatcaatagagacaacatcaatgactccgctttcaagcacttcaagggggtaagttatacgagactaagatagcaggccacatactgtaagagttactcattttaccaaaaaaattgaacccatcagtggctgaacccaacctcatatttctgggttcaattgcgaaggatggatggcatgtgttgaactgcttccattgctctgcatccgtagggtgcctaagcacaccatcctttttgggtctcattgtgtgatgccaccacatgtcctcggtcgagtgtcttgaactacatacctctttagtcttggagttaggggaatgtatcgcataactttatgagcaactattttttctctctttttctttttccaacgactctcaccactaataggacaaaaatattttttctcattctcctttcaaaataaggcatagtgatacttgcatacattaatggagtcataacctaaaccaaggttgtgcaacttcatctttaactcgtaatgggacttgagtaattttgtaccctccaaaaataagtcaatcaatgtagagagtaacatataaaaataatggttactccacttgttaagaactttgcagtgcatcagcttcatcaaagcattgagtgctattttttgcaacccgagtacagttcactttccatattctggaacaaattgttgtacttaccactaccatttagcgggggctcattgaaggaatcaatagtagtacttgtatcatcaaaaccaagatcttctcttaaaatatcatccatcacatctgtcatttcttcttcatcgttgtctaccatttccatagtcgattgcatgaacgactctccttaaaaataccaggtcgtgtacgatcgttggatgccatccataaatagacgtaccctaatattatcgggagtctcaaagttcaaattcaaacatctcatgcaagggc

SEQ ID NO: 225143 - DNA, 2907 bp, Cannabis indica
cttaacatgctattcgaaatgttattttccaaattttattatttcataattttaaaataattttgtaaataattaggtcaacgttaaggtatagatttagattatataataacccacagttaaattttaccaaccacgaataatagtctccaccaaactttaaaatataaatctacaaaataacatcaaaaatattataattcaaaataactaaaaaaaaaaaaagtataaatatgtgtttttcattacatgacaagtgcattgaagtgcttggatttagtttctactctagacagtataatgtatataaattgaacacaaatagtcaaacgaagggaaaggtctagtcattccaaataataatattaataataattatttgttaaattctcaatattaccgataacaaatgcattgcaaaaatctgctaatactcaaatctaatattttttgacgagatgacaggtaattaactaccttatttttatgaaagaagacatgaccttagaggcgtaacctttgaatttgattatcttctgagaaaatctctggtttagtcggcaaaccacaaaaatccaaaagtcaccctgattctgagaaaaagaataagatgatgggtttttatcagatagcattgggaggtggaggagttcatggagttggtgtttcaatggccaaatcttgcctcatgaacgcagagcaacccacagttcctgatctctctactgaacgttccattttaggaagtgggtcctccttttctcgccgccgcgaccttgttttcatcgttaatcctcgaggttagtgaggtctctctctctctctctcatggtgggttcgagttcttactggtttcttacatggaatttggagcaggtgcaaatggcaggacagggaaggaatggaaaaagctgcttccatatctaaggtctcgactcggttcaaattgtaatgtgcgttttccctccctctcattttttgttgtaaatttatcattagcaatttgttcgaaatcattgtttttatttggttatgattgtggactctagcaactatcgatgttaattctagtttcaattggtcttggatgaattagtttattatattatataataattttgtttccgcctaacattgttatagatttattgattatgggttcatgctaaattactgttcttggaacttatagagtctatagtcaagtcaactagatatcatttatatctaaatgggttgagcttggactagttttcttatttagtgtgtggtttatccttctattttattacttgtttacgctaaattgtcttcatttattgaaaacaatcttcaaaattgttggcagataagtgaatcattgacttcaggcccttctcatgcaattgacataacaagagaggtaggaattcaggagttttattgtttgagatttgagcaaaacagaaatcttggatggatcactttcaagaaattggtttctcatatgagtttcatatttttgtgtgtaggctattagagaaggtgcagatgctgttatcgcagttggaggagatggaactcttcatgaggtactgcctgatttgcaccaaactctttcaagattgcatcaagatcttttgcatcagtcatccttattctttatgattatcttttttttttttggtataatgaaggttgttaatggattcttctgggctggaaaagctgtcactaatcatgacagagaagccacacattcaactgcacttggtgtaagtgctttaccattaggagatttttacatcatatttgattttatgctccttcacaactgcagcataagtgaccagtgagactaactgataatttgactgatctattatattttttactttctgcagctgattcccctaggaacaggctctgattttgccagaacacttagctggtgagtttatgcatttcaagctgctttcattgaatatcactagtattcatttactttggcaatgtttaatcattacctgtttagattattaactgattgcatttttaaaggccaaacaatcctgctgaagccattgaacgaatatatagaggttttatttcttctcttacttttctgttttcccttgtgattcatttttcactcagaaatagtcctctctgtatatcgcatttacttcatcgtgtgactactaatgtgatttttttttctcatcacctttcgtaggacacaggtcacgaatagatattggtgtcattgatggagaaaaaggagaatcccattacttcttgaatgttgctgatattcatttgtaaggttcctcagaaaatattattgttgagtttcaacaagaactcattctaatcttattaactctttgtacttttttttttgtgttttgaaatatgtgcaggagtgcaaaagcaggattttttgcctcaagatacaagaaatttggaaacttgtgctatgttattggtgctttgcaagcctttattgggcaccgtaataggacctcagaatcaaggtagatgtgtttcactaatctcagaaaaagattaatttcttttctacatttgtaattcatatcctactactagacaccatcacattgcttacttattttccattctaacattatttggcatcaatgtgtgctttttctatttaatatataggttaatgaaggtgaatggcaaacatatcctcaagtgacagccctttgcattggtaatggaaagtattttggtggcggcatgaaaattacaccaaatgctgatccatctagtggtgattttgaggtagaaatatgcttctcttctttctctctatctgagaaagtaaaacaaatcaaccttatttattgctcagttaatagtttatattcaatactggatttcggcttcctttttgcttgc

SEQ ID NO: 225144 - DNA, 4500 bp, Cannabis indica
tgttagccagatgtacctccgttatatgttctagttcagatgtatttgcaatgctttcttgattgtcaatgctccagcagaaccgaagacaaagtttcattatactgtccagtattcttgataaagaaccgatatccaggaaagattgtgaaattaaagctgacaaatacctgacagatatttttttttttttggaaataccatcaatataaagagccgcagctaccatatagaagataagtaataatatggcaactgaataaataaagccacttaaccaaattattcaagcaaaaccagaaaagttctcagcaaaactggggacattaacttgctttgtagagaactaagatagcaaaatgagtcaataagtcttgtaattgaatatcaagtattaaaaaactaatttcaatgccttgtaaaagcaagctatatatattattctcatattgagcaatttatcacataaatttattgtccttgcatataatgcgaccttgagacatactagatactactgctttgcagaaagtctccaacacaagaagtttgaacaaggatatcccattcccagaagataatttgcaatgaaacgaaagggacgttcccttgttatatttaatgtactgtggctacgaaattgatacaaagtgacatcgttactcatatccaatttgtaagttaggtgaaaatagtagcctattctaatagtaagacactaacaattccaaaacagcaaagcaaataatagaataagatggaatgagagctatatattgacttactcttgatgaaatcccactagttcagtaaaatcatgagaatcttgaatgtgagcttgaagaacattccattgagattctatcacatccacctatagcaaatacagaaacattttgaatgaggatggaatatcagatggtcaacatttgtcgactattgtaaagatgtgcacttttatggttttatacatattacaaatagtgattgtaataatacattcatgcaatcacatgaaccaaagtaagcagtgattgcagaagccaatcatcttagcatagaagcagtctaaaaactttttttctgttgacaaataagatcagcataaacacaattcagtacagtttttttttctaagagaactagtattaaggaaaaatattgagaagggaataagaaacttgttatgacctgtatataaaattgaagatttctaatcaagaatgccatatgttctctaatacgccacattggtctaaatcgttgtcgtcgttgttgagatactgagcaatttatgcggtcattgcggtgtttggcaaaatctgtgtgatcttggtgcattgcagaagcccatgatttctccaattccatttgtgtgcgcttaaggcgtagcaaatattgaaagaccctgctgtatctgaaacaaaaccattgtaaacatgtaaatgtgtgaggcagaaaagaaacatcaatttccaacaatcaaatgtttgagaaaaacagcttttttacctcttcctaaataaaaattgattaaaaattaaataggacattaaatactaaacatcaaaagcaaagcatccacaagtagtgttgtaatcttacttagatagcacatcttgggtgaagaacaactgtagcggccaatcaaccttgtactcaagagcgatcccatcccagccatctagtgttgcttctgaagtaccacctatgtttccatccttcggtaaagctccttgggaggatttaacagtcattccaaacaaaggcatcctagaaggtagagaatagtttatcatacactaagcttgttgtgagtgaaaccatcaaaaggaagcaccgaaaattccctcagcagtctttaatcaaatgagtcaatttttccacacaaccaaagcaaaagaaagtgagttggaggaattgaaaaagtgctctaacctcaaagatactcgggtgaagtatttgtcttcctcaccaatagtttttattgctgcctatattgcaaatagattagagtcaatggatttatttcctaactactaatattcaatttcaattacaaaacaagatgagtcatgtaatatttatcttaccagctgaaaaggaatcatgagatcagcttcagcagttgactggcgaggaggtaaacgcatcaactggcgactctcctcgagaaataactggcatagtaatttagttcaagttaaaagtatttttcttaaatcataaacatattattagtgtcagtaatgtctgcataattcaagaaatattaatatggcgcaagatagagcatttttacacagaatataaaatctataagagctactaagacttaaattcacttccttcatcggagaggaaaaatttgcctagcaaaccttataattgctaaaataaagaacatcactttcaagaaatgtgcaccatatacctgaaagaaatctcctttcgccaaaaggaaataatcctttaaggccttcagatggccattcaggtcagctcgtacaactacaagctgcagcagtgaaaagtttacattagattttaagcccactagcattacagacccaaatatgtcacactccagacctgccaaagatgactggctgcaatagcccggatggaatcaacggcatattcgaatgatcttttgtgaaactctgaagattcctgcacagtataatccagaaataaattaatctcctgcctactgaaataactgtaaagacagtataaaactattcatttcagtatcaacgatcaattgcaagctgtcatcttgtacatctacatgttcaagaagtcaaggcatacaaagtgaactctcattgtataaagttggctggaaaacctttaaatcggaaagcatcgcttcaatcttatccgcttcagactgtggaagcagttcttctccaatcttttcttgatcaacaaaaggctccttatgaaaaggataccgtccagtaaagccttgaaatttctgagtgccccttggcatttgctgatgatgtacaacatcctgaaaccgaaaggcatgacttgggttgcgaagaaccctgatagctttacccgcaaacaaaattgattctgcaacacgcatgtgaatgtattctggtagcatatcctacagaaaagaaagaaaaaatccagtatgatacatgaaatatcaggtgaagattccactcataagtttttctttagggaataataaagaaacttcaagtccacattgaagaagctaaaatgaactattttggcctaaagagttaactccagatccttcaagtctttcatcagaaactactatactctaatgtcacataaattacagcaccctttccttgttagagagtactcaatttcttataaaattacacttgttaactaacctatttcatctttatttcaagactgtaatattacaaaaagacggcactaaccctaacaaaggcacactaggtaagtatccataaaaggtgtgaaattttgttgaatggaatgaaagaaaaaaaaagtgacaatagaaaatttagcagcagtaccagtatcatcctatactctgacttcagtgaatattgcaaaaataagtcaacatctatatatatatacaccaagggtgaaaattataagtatgaaacaagacatgcacaggaaaggccaatcaggctaccaaaaaaatatgaaaacccaggtgccaatctgttagagatgtatcctcagttgataatcgtgacaacttttctgatatgtctgaatgagatgaactatgatctacctctgtgtcttcctgcctgaaaggttataagcccataaaatcttttcattttccttgcaatagataaaacaaaaccaagcaggaaaatgaaaatacaacaataccatgaacacaaaatttctacaatacatgacttctaggagcttatgagaatatatagaaatatttatccagtgctcgcaattgcaaaacctattaattctcttttcaaaatgcaattgtagtacttatattattttcaaaggaaacatttaaatacaccattcacaacacaaagttatccactaataatctcatataagcatgcaaaaagtacaaattaatcagatttttggttcaaatacaaaatatgtaatcttgttatagaatttccaaatatcaccaaataaatcccttaaaaaagaagcttgcaaactaccttcaaacaaagaagtttgacaatgaaattattttaacccctgagaagttgttttcttcaaacattacctcctgataaaaaattccccatagtgatcttgaagagtcccataaaccacccaagctgcgagctggttatacataacctgatgtccgtgccaaagaagcctacaattcaaacaccacaatcatgagtaagcgaaaagaaagaaatacagagtataattgtgtctacataaaaaccagatactaaaataaataaacaagtgttgagcaataacaaatgcagtagctcaatactaatt

SEQ ID NO: 225145 - DNA, 3813 bp, Cannabis indica
aaacatacttgttagtaagtttagatcatggtaaaatattcccaacaatgctttgcacatcaaaaagtgatgatgatgtggttgatgatgtcgataatgaggatgatggtgatgatgaagaagtcagtttcgaggaagatataatgaggacaaagatgatgatgggaaagaagatgatgatggcaatgatgattgtggggatgatggatgatgacgatgatgatggcgctggagatgatcgtggataggatgtgtctgatgttgaaaaggttaaaactaatgaggcatgtgttgttgttgatggttgtacaaaggttgatgaacgtgcgaaagatgcatctactgctcaagaaggcaccaaaaataatgataaaataattgttgtttcaggaattcttgcagatctcaatgaggttaaattttttagttgttttaacgttattttactgatattttgccatgctttgtgttttataaattgattatttttaagttgtttttgctttttttgtgcattgaagcaggatttaattttgaaaaatgatgataattttgttgatgttggtgctagtatggattgtggtgttcaagttgttgagaagatggtatttgttttcaatagctatcttattgttgtttttggtttgttttaagattttatctttgttgttttgatattctttatatataatcagtttgacattagttattttattctagatggagtattcttccattgttgctggtgagactaccatgtcttttggtgttcaaggtgtggaggagaaggtatgttttttgatatagtgttttattgttgttttggcttttttttttaaataaattttcattcatgttttttgtttccttgtacgtgtatcttgacattacttattttattatagcctcaatcttctggcaaaattactggtgactcttgccgcaatgatttgggtcaaaataatgtttgtgatattgttgttttcgaggagactccgatcataattcctggaaagagggatagaaataaatgagctgtttcaaagtctctatttatggaactaggatttggtgatgctaatttagattcaagatctgaatctcctaataaatcggagtacaaaattatgaaatatgtttcgggattatgtccgttggatgataagattggtgaacctgttgacccatctttggaggctgaattcaatgtttggctatggcaggatctgagatctaagaaatcaacgtaattgtttaatttgttgattagtttcttatcagtttttattatttttagatttattgtatctaattatattgtaaacccttattaaaatatctttttttttttaattttttaattattaaaatataattacagttgtgtataataacatcgggttattttttaccttttatttttttatttactttttttcctcaaaaaaacattacagctgtcttatttttttttttttaatttaagattatgatatagtgacacgccaggtgagttgggacatatttacccaatcgcgcatgacgtgtcactataaatcagtatttttcaaattaataaaaattagaaaaaatagattttactcttcgttgactctctatatttttagtgacgcgcattaaaagagactaacattgaatatttagagtctaattttgcgtgtcactaaaaatcactcctaattctttagtggcccacaccttttgtgcaggtcactaaataatgtcattaaaatgccaaattgtggtagtgataaattttctcgccccttttgttttggtattgaggaagtggatagcaacatcacatgtcaacatgggtgctagatgtcaacctaagcgctaggagcagaacaacctcagtaaaacgaccataacacacactcaatatattaatatgtttgacacgattgaacttgcattttgaagcagttacaaatttaagctacaacttaccctaagtgagtcccacagatgcaacctctagagtcaatttcaccgttagattatcatcaacagtcaaaaatagcctaaaagtatttttcatattttttggaatattttattattattttaacaggacctcctataaaagaagctccactagctcatttctaaaattataaaaagtacacataaggtcagagcattactctttaattagtttctctctagaaatcagagcatccagacttagcttttttttttttttttgtaatccatcacgtgagaaataaaactcgaagtagacgtagctccattattgtcgcgacacaacaggaagtgagctactataaaatattgtatctctcttatttacacttaactcttaatacattctcaccggtctagcaagtgagtttggccaaatatctgtatcctaatttttatgtccaaacactatgtgtaaatttattgggctttcctaaaatactaaataaattacttttgttttggtttgaattttgaataatgaatgaagacaacataacaaagtgataaaataaaacaactcatacagggtgctaattatatacaaacaaacaagaagaggtagatatatccaaaatgtaaaaagtagaaaaaaatatagaactgtgcagatcataccaatttccaagaagaaaaaagaaagccattgagttgaattgaattgcaatagtttctggcttgccatttttagataggcatatcagagttggtttttttttttttggaggccgggaaagacatatcagaaattattacaacagatagatttcgttacagtactgttttaatgaaataacacatcaactgtaacaattatttggattttagttttttgtttttcttgatgattcacttacactccactcctacctagctttttcaatactatatatacttattgatctgcaacacgaaattaataattcaaatccactattcatttaattataagaactgcatatagagctgctaaattacaacaaattatattcacttttctttatataccaaataaaggcacaaccctattagtatcatttatataaattttgatcgtagtcttatgattcattgttataatcattttcaaacttatatatattttataatagtgtaggtttaaatataacatcaaacatattattactacccaattctccagttgacgatgcatgtcgttatcattttttgttagaggggtgcatgtttatatatgtcacagttattcttacacataaaaatttaactaataatacagtagaaggggttattaacaactttctgatatatataatggaaaaagagagagctaataagaattaattgttcgaagctagctagcgcaactaattaatatatatatatatacgtggcatttatagatatatggtcattctagctgccaccatagggcacagaagttaaaacatatatggaataggagtttagattagatggtgtcccaaccaaaaagatcactaggtccacaaatcagctttgacttgattgaggtgaaatgtgtccataatattattcacacacactatatatgctacgttaaggccttttctccaaagtttgcattatttttccaattatttgtattgatcatacatatatatatatataatactattactacaagtctacaaccatattcgttctcttcttctcatttccctaatctaaatataacaaaaaaaaaattcactcgaccagtacaacaccaaaatatataatactttagaattaaaaaatatcaataatagtaaaaataataatgtttaatctgatatatgaaac

SEQ ID NO: 225146 - DNA, 4436 bp, Cannabis indica
aaattaatcaaaaaataataaatgtatattgccgttaacatgaatttaatatttttcaaattcttgaaagtaatccaaaaaaataataataattaattaatataacaataaattataatataattagtttaatctattatattatatgaatttcagagtttatgctttcaccaaataatctattatccatgtcttcatgtagattacacagccatctctaactccttattctctgtttctcgctttctcttataaccatttcagctaataacagtgatgtaagcctctctctgtttttaaccaataagttgttctatacttaaatcttttaattatgacagacattgtggttgctgttcagaaaagtttgcttgggctcttgattacgataatggcagcatagtgtggtcaagggtaagtttgtttgtatcaccttctatatatatatatactatgaaatgaaacttaactgaccaagattagagttttaattctgtagtatttgagtacgtgaatgattgaagcagaagtaaatatatatagtaggagatattcttggatggttgaaaaagtttatgatagatttatagttattcccacattgatgattagaaatgtgtgtaaacttaataccacttataagtgtatggctactcacttttgtaaattaattttgaaatgaaaatatagtttttagaagttaaaatggtttataaaattattactgagttatttaacttaataacttattcatgtctaattcaaaatgggttaatttatgtggttaagattttggaattgtctttgccaaaaaatacaatacaagtaatgtggacagacttatttaattttacttacaccttactaaatcgtgcctaatcagacgtttgttagtatgatggaatgaaattagatcaaaatccttaaatttaataacctcaataagtataatagttacctcaataagtataatagttagtgaattgttttagcaatcattgttttgttatttatattttactttattgacattgttattttgattatggttttgagtttattttggtcctttcaatcatagaatgaataatcattatgttacatgtccacaatattgatgatgtgatcacaatctctcatagaaaatagtcacattaatatgttatttacaggaagcaggaccgggaggactgggtggaggaggtatgtggggttcagccactgatgaaaggagtgtctacactaacattgccaacagtcaaaagaagaatttcactatcaaaccatccgaaaacatcagcatcgccggaggatgggtggcgatggaggcacacagcggcaatgtactatggtccacagctgatccttcaaatgctacagcctctggtcctgtcacagtagctaatggtgttgtttttggagggtctacttcttcacaaggacccttatacgcaatgaatgccaagactggaaaaattttatggtcacacgatacaggagccaccatatacggcggcgtttcggtcagcaacggatgcatccaccttggaaatggttacaaggtatttgttggatttgctaggaactatacagcaggaaagtcactctatactttctgtgtttagtaaagtatattttggttaagaaataattgaactttcttacattatatctattgattgattttgagttttcgttcatttatttttgttttataattgttcatgttggttattaaagacaaactgattagtatttcaagaaactaaaacaataacaattattacactcaagcacacaatcaaatcaagtggactaaaaactagagaaaaatcaagtacatatacttaaaactcacacccccaaagttcatcatacacttgttcttcttccacactcatttattttctagtgtctcataccggatttcagctcactcacctcctccaaccaggccgtacacccttccctgaaattgggaaaacagataaaaattggtcaagaagaagtgtgaaccatgtgacaagttagcaagttaagcaataagaccaatttgagtatattaattggagaaaatataaggggtgttaccatggccatctgtagaggacaatacagatctgttttctcctctggaacttgattgaacttttttctctgttcgcgaagacatgatcaagctcgagttaccactagtatacaaaggcaaggaatgccgcctcacaaagccttgattttcgacctcatcttcatcgagccgggggtatccaagtcctctaagttttgccttggctgattcagttgcagtcatgtagtttggcaaagtggggcttctttgtgggacattctcttggtattccaccttagtaggaacctttttcttgtagtttttttgggagtccttgctagttttctcaatctcaaagttatttttatgttcattctctattgatgcatcttcaaccatttcaacatctctaataggaattggctcaacaccatcatcatgcagctcatcaagtttctcattcttctcaactacttgttttggaggaacttccacctcagatgactcacttgttttctcaatcaaattcacaacactcttctcagaaatctcagaactaggaatggctggcaatgttgttggagtaggcttgagcttctcagctacagattctgctgttgaacccgaaattcgtcgcaaattttgcttaaccctctccaaatcatttagaggctttgattcttctttactaaattccaattttcttggcttgttgatctgtttttcatatgcaaggctaggatgcaatggaagtttcctatttttaacaggtgagaccttcccctctgcttgttttgctctgcctatttcggtttccttggtttgaattttaccttgctttatcttagaccttatctcaagagcatgatgtagctgtggaagtggttcccaaaagttggaaaaagaccatcgttctaaccattgccaagcacaatttggctccattggatcataatgaatgagcagaggcttagcatttggtgatgatgcaataagcttcaacatattgagtgtaaataacatattcatcagtgctattatttacatttttcacgtgaacattaaaaaacaccaacatccaaaccaaactgaaaaaggtcaagaaagacataaaatgaagcagcagaaatagtacaatgcacaattacttctcacgagatcttcaatattatggtgtatagtatatggagtaggaaatttctctagtatacccctttaaagggtggtcttggtagatcttcttatctgtttaatttagtctaatttttaatttttatgattgcgtatgttctaattatttaggataatttgtaaattatttaaaaaatttggaataatttacagtgtcaaaaataaagtattataaactacacgtaattttttaaaaaatttacaagtgatcttaaaataattataacgtacacatttatgaaaaaaaaattagactaaaacccctttcggatgtcaaaaaagataggaaatttactgaaatacccttgtactataaattaaccctataaagtatctacaatattgatcgaattgcttattgtttaccttacaaataaaggcattggatgctagcctatctggccttggtgtaagtttcagtcgagggagccccaccagagtaccattctgataaaaggaaatatcgaacaaatattgctgtaaaccaaataagaagtaaataataaaaacattatagacaattaatgaattcatttacttttgtagtggttttgttatgtagttgggcaccaatgtgtgagactagtctgacccttttgccacgatacagtgcttgaactcgaacaatcctctgaatgcagtgtaaggtggcaatagcctgtctcctaaccaagtgtccccgaattagtgcttgcagccttattaaccccttgagtgcaccaaaggaacgccgagcctacatttagcgagggagagcaaggcaaaagtgaattcaaatcaataagaattatattgattttagtaaatgcaatgctttttacataaagatcatgttattgttatacaaagcagtaaatagaatccagcaagtgaaaataactaatcagaaacccaattacgttatgttcaattttagatgtttgacaagacagaatgtggtcctagacatacaagacatcactacgtacgaataaaggccccaaaccacattaaattcttaccgacaccacacacacacactcacaaacaaataccaaagccacacacaccaactaaaagggaagagtcatataaaatttaaaagttatgatttatctaattatgttctcttttttttttaagtcataaagtgaaaaaaagacacttcaaaattaacttttgttaaagataaatgagc

SEQ ID NO: 225147 - DNA, 3379 bp, Cannabis indica
ttttttaatattaaattatacacgtgacgttgatgtggcaattggttaagcaaccatatcatcattttgtttgccacgtgtgacaaaacttgacagaatgaccaatttaaaatgttatgaatagttcagggactatttagaacgggttgaaaaatttagaggatacaataatacatatgtcataattcgggggcaaaaatccttaatagctttttttttccaaacaaatcattactattcacatgattgttattattatgcttttttttaccttttcttttttaatcataaaagaaaacttcattaatcaaacaaaaagttaaatgtgacttcccaaccgaatttcattctttgcaaaactctccaaaagaaaaaacgagtgtggatgatctaatatgttcatctcatacactggtcacttggcaatcagcaacgttaaacatacacaagttttttaatcaaaatatctctagtaagaagattagtatatgaattacctgccacattatgaagcgatgctttggagccgatgatgaacaccaaacaagcttctcaaaattgaccctaaaattgtttgctatcatggaatcatatatctcgttcacttgaaaattacacataatacccgctttcacaatctcatctttggagaaggttttcctcagcctcttaagcttcttccaatactagctcacatcgagctttagctcatgagaccaaacatcttggttaaaaagtaaacatagttgacccatttcacccgtgggacatcttgttttattatttatgcccaaagataattagccaaaaaagatttgttccactttgactcctctctaaaccctaaacctccatacttttacggcttacaaactaaatcccaagatgccatttgcaatttacttgtgttgcctttttcacctcagagaaaatttctacagattttgtcaatcttattttattgttagtgcccaaagatatttagccaaagaagatttgttccacttcaacccttctctaaaccctaaccctccatacttttttggcttgcaaactaaatcacaagatgccatttgcaattcacttgtgctgccttcttttactccagagaatttttttacagattttgttaatttccttcaaaaattttagggtaacaagatgatattcatccagtaaattctaatcccaatcaatactgagttgatgagaagagccctcccaatatatgtcaaatggtagctagcccaagtgtgtagtttcatgcttaacttttgtaatacaatgtcacaatctgactttttctattttgttggtctaagattcaccccatgatatttcatagaaaaaaaatcctccctaaatagtagcatttccttaatgcttcgtttctcattagcatttacacctgtaaactatatactagcttttaccttgttttctgacaagccagaacatcaaccaagctgatgtaaattgtgcttctgcaatgcaactaatcgaaattggtttatcttttaaaaaataggattaaataatttgcaaagcaaagccagctcgaggctttttcataatgggtgaaatctgaacgcttcattcctagattgtctctttagtattcaagtcaaatactccatgactaggacaaataaaagagacgagattggatctccttgtttgaacccttttgcacctttgaactgccccttctcattcataactagaagatatgttgagctccacacacaattcataacccaattaacaaattgagtaggtaaatggtactctttcaaaagctgttctaaacaattctaggcaattgtatcataagctttactcaaattaatttttatcttcgagaaatatttttaataaacacactttgattatcacttaccaaaataggtaagacttcggctagccttgaacacattattttggatatgcatttgtacaccgtgttgcaataagtaattggacgataataatcaatggccttggaagggttatcaacttttgtaacgagcatcaaaagagtcttatttaactgattaggggtaatgccattctgaaaaaaaattctggatagcacttgtgaactctttccccaaatcctcactttgaagaactttgagccataaccattagatactgtgatctttagattaaaaattgaaaacattcctttcttaacttccttagggtctaattagctttatttaaagagatatgaacaaccaagtagggctggctctgaggatagcaagccaggcgcgggtctcgggcccccgaacacttaggatcctataattgtgaaaaaaaattattagtatgtagataaaatattaaataataacaaatataacaaatattatttagtgtagttgtaaagagccttactttaagctataagagagatcaattttcaatctctatttttatattttttctaaaaaaatatttaatatatatttataaagtagtgaacattggagttttaaaaagttttaccattacattaaaatactaaaattattattttaataataattaaactatatataagagttctaaaatttaattttatgttaaatggcatataacttaagtctcaccaagccactcatcaatacaattcatctgaatttgaactcttggcttgttggacttcccataaaatctttgaaatgagacagaaattggtccactactttaggatagtcttccactatttgcccctgagaatcagtaaatgaagttatcctttattattgttattatccttttaaaatttaaatacaattccgtagtttaataagttgcttagagagagggagaagtgaagatcaacatatttttcgtgcttaattttaatgttttatatatacttttttttttagctgcaccaagtatatatgcacggaataaataattttctcctttttctctgtttgggttaactaatcttgcatcaatctcctttccaaaaaaaaaaaaaaaatcttgcatcaatcactttgaataaataaagcaaacttatactttttaaagtgtcttttttacttttcttcctttcagactgtaaacttgataaattaatttaatagtgtaaatatatatatattatacggggacttggggataaggtccattaaggatatatattgtgtaatggtttttttttttaacagtaatatgaatttaatccaaggactaattatcatagaaaagaaaaataaattttcctatttccttaattcaatattaaaagtgtccttgatcgtcaagtaatccgactacatcgtaaaaataatatatagctcagctcctgttcctatagtataatacaaacacttaactccaaaaaaaaaaaaaa

SEQ ID NO: 225148 - DNA, 8922 bp, Cannabis indica
accaattggggccctcccttcaccaaccccacgggcatggagaaaaaagtaacgctcattccataacaaagaatacaaacaaccaaaagaagggagagaaaacactattaggacgttttaacttaaaaatgtagttttattttttaaagagaaacacatgtataataataagaaaaatgtagttttcaccatcctctatgcatttttatatatgattaaacaaaacttgaatactttatggcgcatcagatttttctcaaaaagatgaaataacaattttatctcaatagcttccaagtccagcaaaagacaaagacgtagaagcccttggaacacaaaaatataaaataaaataaacaatcccataccatatatgcagccaaaaatgcattgtaatgtagatgggaaactatttgcggctgtaatggatctgcagaaagtagacatcagctttactttcaaagcatggttcccaggagtaaccctagactcaggagcaacattttgagatccggcagatcctgcagaaaaattaagagataagttgaccatgcacaaagtatttctttatgttgatcctgcatagtatttctatgaaaaagaaaaaagtttatagtcaagtaaaacaacaaagtatggtggaactcccattcatcaatcacaaaatttaagcatgctactacactagtgccttatatttcaacagaatatttgtatgtaatattaagcaaaactcaaatatgcatcaccgtattaagtaacaatcgttatcttcaacaaaaccaaagctcctcaattatgataacatttttaacaaaacaaaaggcccttgagttcattaatatatatatgcacacacagtagaatgagccgaacagaaaaggtatagaaatctcaaacaaacattagtagcagagtaagtatgttagctcagacaacaattaatcaactccaatataatacagtaactcattcaaatcatgtaagaaaagaagaaggtatattctataccattaaacagcaagaaaagtttgtttatgaggttcatatcatctaggttagtgccattagccttcttcctcaaaagctcctcacccctttttacaacagggtcttgactagaatcaatcaacaacgacaaagtcattacagaattataaagtatggtcaaaaaacaaaatgctacacagagagtgaccacaaataaaaaacctatgagtactaaaaattactacttacaaatcaacagaggcagcaagatacagtggataaacaagctctggtgccagctccatgacttcaacaacgttcaagatccccaactgcttacagaaaaaagtaaatagtatcataaattctgactaaaagatatcttattataggggtgaatagcaggatgctaacagagaatctgattttcgcttcttttttaatataaactttttacataaaaagacgatggctaacggtggcacaataatatataggtcatagttcgtggagaaaaatcctaaaagcacaaaaagacacttgtctttatatatatacataaatatattatatattaatataatatataatatattagtatatatattagtttaggagaattaatacaggtataataaggaacataacctcacttaaacatatattattattgttgtaaataaaagaaaacataatatacacttgtctatgtgaatatctacatagatgtaagtaatcttcgtatcattttacatacaattaggagttatgacataagagactgagacagaaatcatatttaaggagatcaatacaagttttaaaaatagtaaagaagtccacaccaaaagcaaaactacgacaacaagttccaatccttaacaatactagaaagcagaactcccaaaacaattgccagggactggaagcatacttattagattgttcagttgtttttctttctttttttttgacattgagattattaacagacccatacctacaccatatataatccgacttacatatattatatggctgtactgttaggaccgattcacccttcttttgtaggtttcacaatagtaatattataacaataagtatcttcagactgctaacatgaataatgtaggattcaagggcagaacaagtaccataaaaataaataatctctgaattccaaaacaagggaataccacatttaccttccttattaacacgatatctttgtccaaagactgcttcccagtaacacccattgtctgagagattgaaagtccaggtgagcattgtctactgcatagatgcatcataaacaaacactttaagaattccatcttaacaaaaacttctgctaaaagggaagaaaaaaataatctagatttatatactgctctaataatatgtactgctgccatgtaactttggatattaccgttctaaagtcagcacccactcttttcttcctttttttttaacccatgggtatctgggccccaccccaactaatcccacacaggatacactttctagatttgagaataggtaattagaacgtaagaatattcacgagtttttcttcggctgttaaatagaaaattgtggaattgagctgggatggccatcaattcatgagtaaaaaaagtatgaaagacaatttgaaaagccagaataccagggtgtttggagaaacaactcaggggtagaatgcaagcacttgatcaaaaatatcctctacaagatgaacaaaggacagtacgaagaaaaaaggaaatgtgttacagaaattgattatattagaagagagggctatcaaacagaagttaagatttcaataggcaaatgataggatgccaattccaagctgtttcaaaatagcaatcaaatttagtatcaaaggcttaaggggcatttattgttgcagataggttcttaatgttgctcctatgatatagctgattaagttgtggagtattatagagtggctgatcaagaaggaattgttctaaagatcgactttgaaaaaagagagtagggtaacctattgtattagatgtgatgttctcctattttaataggctatgagagtctagcttcagctataattgtagaattttgtccctttttttcctttaaaaatgcacatacgagaaagttgaaagaaaggttgtgagcaacaatggatatcatggatgggagggtgcttatcatcagcaacacattcaacttaatgaacaaaagaccgtcacaaaagttggtgattcacttttgcctttcctaatttattctagtggttgatgacccaagcagattgctaatgaaagcaaatctagaaggtctttttcgaaggctttggcattgatatagatacagtgaaagtctcccacttacagacgatacattgttctttactaaaccaaagatacaaaacttaacgaattagtcgcttctactaaaaatattctatctagtgtcaggtgtgtgactactaatatgagcaaaagtgtgatttcaataattaaccttggggacttatatgttaatgagctagcaaatttattgggtcattcagtggatagctagcccatcaagtattaaggtttgtaggggtgatagtcacttagatcagaattttcgagatccaattttggataagattagcaaaaagattgtacagaatgaaaacatctgtgactcggaggtggtttatagttggtgttgtttgccaccaagttatctcttctcttttccaaattccaaagaagatagtgggagacatgaaatgaaggttcaagaacttttgatgggaacggagagcatttattagttgggaacctaagtaaataggaggtttggtattggcaacattttgaattgcaacaaagctttactagtgaagcggctatggcgcttttctcttataaaggatacataatggcataaggaaaaccaaatacagactcgtatgaaatggttaagatagttctgggaatttcaaagtacaattatagaagcattattttcatcatagcaagatacaaggaattgtttaagtgcatcatatgcaattttcaatcctatgaatagagaaaccacttgatgttgtaaagataatttagtgaaagaaactttggcagaaaaaacttcgttacttgtacaagattgttgaccatagctgacttaaaaacaaatgaccaagagagcctttctacggatgtgagttctttacaaatcttaactaaaaggaacttctacagataatgtattaggcacccaagaatcaaataaatagaaacaaagtggggactgtgaaagactttctagagaagagctattttgtgtactcaaagcgtaggtggtttgcgagaagtgtaatagtctttctataaatattgagaatatttaaatagtggaagagtgaatgaaagggtgcccatttttatctttaaaaatgaggtttgaagcattgccaaataatacttggcacttgtggatgtaacttaaggtgatgtcttatcacctgttatattaacattcgactaccgtttcattaaataaaaacaatatactttcttccaaacctttgagatgatggttgatataaaactgtatgaaggcaaaaatcaacaaatagttctctatccttagaatcactaactgccctgtattttggagcaacatcatcatcaacttgttttgaatgacaatcaccaataacctgaaaccaacaatcactgggtaaataagggtagtcaatttccaagagagaccaaaagagtaccacaattctaaatataatgaaaccatcaaagcatagacaggaagatgatgcaacccaaaggaagttggagagtgactttgattaaaacattatttggacatgaactcttgccgaacctggcataccttgcttgaaaagccaggttacagcatgcccactccacttagttagtgggggactacaatggaaattgttaacaaatgtaacaatacatagggcagcattcatataccatattggcataatcaagaaaccatctaggtgtgagagtcaaattccttttgggaaaaaaaaaactaattacttaatcagcaagtaatacgatgtatgaagtaaattacttcagaaaacacttccaagtttccaactaatccgaaattgaagtaggcactaattgataccttagtgacgattctaaggatgatctcttggtgctggtgaggaagctttgaaatattcaccagaagcatgggtgccaaaatttgtttttcctacatataggaaacattacaaaactcttcaaacgaaagtcagtgccttaagcaatataagtaaataaataaataaacaaacaccaaccttagcgggcgcacgctcaaatgccatttctatatagacaatgcaaaaatttcggaccattggagccgcattagcttctgaataaatattccatagctctaccaaaggtaaaccaatctcaggctgatgttttactctcttgttcagatgactcaatatctcaagcacctgttagaaacccaaattcacaacattcgatgaaaatccataccgactagaagcacagcactcatttttagcatatatatagtacacgaccttgttcagatgttcattaattattaaaatataataatcaaacaactatatacaagaagtcctaattgcaaagcagtggtaataatattccccgcatttcctttgtacttcacctaaatttccacacacaaaaatggcagaattggcatttaacttgagtttcaaatccataaaatatcatatagaatcgattccgcaaacaccgaacaaaagcagaagaagctcaaattcaaacctatcaaactatatttgaaattaggctatctatattagccaaaaggaagatttggagagagtgaaaaccttgttccggacagcagatgagggagaagaaagggaggatatggtgatgggaagaagcttggagagcaagggttggagtttggagtcgtcgcagagagcaagacgagtcagcattcgatccaacatctcttctatctctccatccgatttcccagtcagcgccgccgctgccgccgcggccgatgacgatgaagacgccgttagttcttcggccattatgtctagtttctttcttcaactttcgaaactcaaaaccagctttagagaaaaagggtgttgtaggttgtagcaactagcaagcaagccaggacaacggtcagtcagtgtgccttttggggtcaatttggcagcttcaccgcttccagttctaccccaaacttatttcatgtggctttttttattttaattcaaaaaatgtaatggtatttgcccacatgatacaccaaaactcttaataaaataaataaatgtaataaaaaatatttactttcttttttttactaaaataaatgtactctaaaaaaaatccaaataatttggttagcgtaggtaatgaaatgaaatagaatagaaaagaaacaattttcattctatttctttgtttggttgcatttaaaactattagaatatcattttgatggaatagtctttccattattttggtgaaatgattattccattttaaaatagaatgaaagatcattccaatgcaagatttaaaaaaatttaataatttttttatcaatttttttatgcattataatttttattccattccattcctattccaattcccattctcatttctattcctatattttaattcctcacaactaaacgtcacttagttcgtagtaaagttatgtgatatgtgttctaagaatataaacataactttaccatgacgaaataatcgaaatcttagtcgtgtcgtatgaaatgttggttgcctctctaatttttgagattgttgttttgggtttttttgagtattgttggtatttcgtttttgtgatggcttctagtatcattgatgggcgagggatggtggttagaggggtagatgtgagtatagaggaggaaaagacaagtgttttgaggctactagttgagagggaagaagaggtagtaattgatacaaggtggtgtttggttcttgacgggtccagcatttgatttcaatgtgtttcagaatctgatggcttacatttggcagcctaagatgggaatgtatgttaaggaactcggtccaaacttatttttgtttcaattttatcatgaggttaatattcaaagggttatagagaggagtctgtggacatataatcgtaagcaatttatttttacaaggttgaaggagggtgataatccttggcaagtcaccatgaatcatcttgatatttgggttctacatgatttgcaatcaggttgtttggttgggataaatggaaacataggaatgggaatgagaatgggaatatgaataagaatggaatggaataaaatttaaaatgcataaaaaaaattgataaaaaaattattaaattttttctcatcatgcattggaatggtctttccttcaattttaaaatggaagtgtcattccaccaaaatggtggaaaggccattccattggaatgacattccaaactttaatatgcaaccaaacaaaggaatagaatggagattgtttcctttcctttccattccatttcattactttcaaccaaacgccacctaagtgtattgaagactctaggtaattatgggaagtttgtgaaatctaatcccgataattttataggcgtgtggagagtatctgcatgtttggctcgcatcaatgttgaaaaatcaatcaaacggcgcatgaagttgagtaatggttttgggtgaattttaagtacgaaaagcttccaacgttttgtttcatttgtggaattatggattattctaaaagattttgctctaagttgtttgagaaatcgttacaccttcacgagaaaccttatggtttggagttcagggctatgaattagaggaatgcacagtggcttcattctagtgcggtggcacgtgatgggggcaggcaggtcgaaaatggtggcaatatttttcagggaagtcttatgattcctagaaattaggagcaaaatgtggggatgaatgaaaagaattggggcaaagatattattgaagatcatggccaagttgttagccacaataataaggatgtggttatgggaggaaattatggagagaggcattaaatattagtggtaaatgagactttttttattctgctattactttgttagttgaccctaagaggaaaaggtcagaccatttgttggtgggctcggtgggcatacagaaggggctagttgaggaagtatgggatgttatcgagaatgatggtgttgggctttcaaaaaataggtttttggcaggttctagtgttcaggcctgcccggagccatgagtttcttaagctagaattatcgtgggcttgggaacctacgggctagacaattcttagtggaccttgtgttccaaaaaaagcccagtgtttaatttctttgtgaaactttgagtgatatgaaaggggtggagaggattagggctcagttggggtttgaaggggtgttttattgtggaggcccgtggccacattggaggtttggctttgctttggaaggccgagagtgaggtggtgatgtagtgtttctcttatcgtcataatgatggggtggttcagatgcaaggtttagcagcttgttgttttactggagtctatggggagcaaaagcgtggtttgtagttccaaacatgggattagtttcgttctcttaaagatgatcatggcttgtcatggtgtttaatgggggacatgaataatttgggggatcattctgagaagaggggtgattgtaaatgtcctgagtggttaattgaggggtttcgaggggtgttgtgtaacaccctaactagcataggcgtattacgtgatt

SEQ ID NO: 225149 - DNA, 3317 bp, Cannabis indica
ccggtataatcctttccccaaactagaagcgtatctccacaatttttaatcttttccaacacttcaagatcaggtagaagagaccaactttcttcaataatcttgaaacaaagtggttctttgagccatgaattttcaaacctgaacttgcggtttgaagccaccgtagtcgcattacgagtcacaagatgaagtggacagtggtccgaaatggttgcttccaagttatacaacttagccgtgggaaataaatccaaccaagattgatttgccaaagctctatcaatacgcacctcaacccaatcgtccgtgccacgatgcctttcccaagtatacgaatagccataaagatccatatcacaaagaccacactcacccaaagcatcagtaaaactatcaattaaccaatttgggtaagggttacctcctcttttgtcttcttgggaagttacattgttaaggtccccgatgatacaccaagggagccttgacttatctcgaagcacctttaacaactcccaagttctcttgcgcaagcttcgattaggttcgccatacaatcccgtcaaccgccattcaccaacatcaccatcagtaatacatacatcaatgtagtcaccactaaactccataactttaacctcctcctctactcgccagagcaaagcaactccaccacttttaccacgagcatcaacagaaatagcaccctcaaatccaatagccacacgcaacttctctacagcttccttctttgtcaaagtctcacataaaaacaagtaattgggtttcttttggatcacaagatcttttatgaattgttgggtccatgggttcccaagcccatggcaattccaagaaagaatgctcatgatatctggtgggcctgagaaccatggcccaccttcaaatcgttttttggatcaagcttcaccacattaacctggcccacttccttctcagccacttcatttgcacgtgtactatattccaacacagtacgtcttcttttgctgtccaaaagcaataaagtctcatcttcactaacagccacctctccataattcttgccactatcaattttctccacatcagcatcattactaccattatttccaaataaaactcctttattttttgctgaattcaaggtaatcgtatcctctccctgatcaccatcatcaatctccatgatttttggcccaatcgaatcagcagggatctcaccagatcgccgaacatctccaccaccgtcgactgctgtgttttgttcagaaccagtccggagccattgagctcctatcaaataattcttcttcttggtctgtgctcgcataccattcccataaggcttgactaatggatcataatcttcatcaaatcttcgaggacaaaaacgttcggagtggccaattattccacaaacaaaacaaaaagttggaatgtgttcatacttaaagttcgcccatatccaatcacctttgtctttgcataacttcattcgacgcttcaacggtttgtcaatgtcgactgttgcccgaactcgaaggtattccctccaaattccattaaaattcttagcatccgtcttgataaactttccaacatagtctcctgcctttcgaaccaccttctccaacatatatcccgttttcagatcatgaatctgaacccaaagatcaaggcagtgtaatcgaaccaacttcggatcctccccacgcttgagacgatgaaagatcaacggactcctattaaaagtccatgggctaccatcaatgacagcttgaacatcaatttcatgataaaattgaaagagatacctattcgtatctagttctctgatataaactcccttccccggttcccaaagagacgccatcatatgcctcatagcatcgaaatcaaacgtgctacccgtcaagaatctacccacgaggcaccatcgatcatcaaaggctacctcttctccctcattatcatcaccaatcaagatcccttcctcctcctcctccaaatttatttgtgcatactctttgtttaatcaaatcctgtatagctactggaagccatagatgacaccagactaatccagccaaaaacaaactacaccagaaaaacaatcaacaacgacaatacatacaacgacaagtcaaaagactagacatgagcacaactgtattatttcaagaagtttttgtaacagaaattaatacatttggcatgtcatctattagttcctatgaatcttgttattctccttttttctcactcctattaatatttaatttttctgagattaactaaacgaaagactcgagagacagagaaaaattagaatagcaaatagcaggaaaaaaaaataaagaattaagtttagaatacaataaacaagaagtaattcagattttatacttattttatggcaaagagagatttggtcatgactcatgctagtctcatttggaatatatgggctttgttatttttcttaggattttaatttagcttactttgtcccttttttacgtttcgcaggagaagaaacataataatcaaggactttctaaatgttgctgggctaatgtgtgttacacatttctttatatattgtcaaaaactccatctgcaccatacttgagggttgcaagaaccccacaaggcccaattcttacatttaagataaaagaatactctttggatgttgatgttgttaaatctcaattgcggcctagatgtccgcacgatctattcactaatcccgctttggtaatcttatgtttatgaagatatgtgtgcaatcatactaacttgtcatattggttttattttcactttctagactttttattataccgtttgtgattatttttcctctgcagattgttcttttgggtttttgcacacaggagaacctctaaaacttacaacaatatgtttcaaaatatcttttcagctattgatattaacacaatgagttcatctatgttgttaatataccattttgatgctaatagctttagtttatttcctaattgattgggtttatggatgtttatttcctttagtttttggttttgtattgtatgtatgattctcttttttctctggtggtatggttcataattgtttctctttgtaagtttagaattttcaacctcacaaagacttatctcttgaatttgatatttgactactcttgaggaattatttgtttcttgtttcagagttttaaaaggaccaaatactattcctttgccttctcatgttaacaccctctctcaaatccttggtatgtatttatgtatttatatatatat

SEQ ID NO: 225150 - DNA, 2921 bp, Cannabis indica
gaagctttatgatgaaagtactttgtattttgatctccccatttcaaccacatagcacgactcctctgcttccaatatgtctcttctttgtcaagcaaaccattaagttgcttctcagtcttttgaatttcagtccacacacctggctgctgcaaggcagagagctctttcaagatctttttcagttgattagtctcctcattcatcgttttctttttctttttattccaaatctgtaaagcctttcccactcgcaccgttttcctcttaaaagaatgggccgatccatcaatataagtgccatcccattggttctccactatttccttacattccacttcctcacaccatgcttcctcaaagtggaatcgactccttcgtttcgtctgtccacacttatctccccccgttctaaccggaacatcaacaattagagcacgatgatcggactcccaccaatcaagaagttgaatgtccgctccctcaaactgattcaaccacatctcattacaaagtcctctgtccagcctctccataacactatcagtactatgcccatcacaccacgttagctcagtcttaatggaactaaaatcaattagttgacagtcatccaacacctccctaaactcctccatagccttagatgctcgtaatcggcccccagttttttcagccaagctaacgatttcattaaagtcaccaacacaaagccacgcccccactatctctcttcgcatcttacgtaacaactcccatgaaaacttacgttgactcgcctccgggttcccatagaaacaagtaagagtccacgggcaaaaatcttttccagcaacttcagcgacaatgtgtccaggagaactagaatcaattcgcaaatttatatcatcacgccataacaacaacagacccccacttaaaccgaccctatccacagtccacaacctctccccaaactgaagcgtattagctatacgttcagcctgcactcgtgtaagtttactctcagccaagaacacaatactcgggttaaattcccgaatatgggattggagagcacgtaatgtccaagggttcccaattccttggacattccagcttaaaattttcattgctctcggcgaccttgctccgcaaggtgcgccgcttttaaatcaagcttcggggatgataaatctacagtcttagaaatactcacctccgcattaacatcgtgactctctactgagctgagatcagaccgccccccagctccaaacacaaaatttccatccaatgaattcccatcagctataccgtttgtctccttccccatcatgctttgtgaaaccccctgaaccacccttgaatgtcgaccactgagttgccgtgctctgttcttaatagagacttttttcctctgtccccgagtagtcttagccatcgtagcaattccaccattactccctccttcatgattgttctcggcctcatcatccccatcaacacccaaaatttgttttcctttgatttgtgcccgtcgatccctacctacttcctcttgagacaaacgattatcactctttcttttttttacctctgcttcatgaccccgagcatctacttcaccctcttgccctatatgcaaagcatcttctctctcctgcccaatggttggtctattagtattatccataaggccctttgaagtagagcccatcccatcaagcccattaatgtttttaatattaatatggcccaccgtagactgcatgggctgttttccataagtcaacacatccccacccataaagtggtcaacataactactttgccccatattctctaccccactctgcatgacacccataaccgtttgagaaactgatgaatgaacggtttgctttctacagttcgtctgcccatctccggccgatccaacaccgttatcttccaaaagtatagaagtatcccggcggttctcatcacctatcgtaacaccaccttctcgctgtccccgaagttgcgatacatccgtccctcctcctgcaaccatatggcaaatcgattggtcgaatgccattatacaattaggggtaggatcatcttcattcaaccaattcccatacttcggcatttgtcttccggcatcgtccaccaccacaacctcctctctagtgcattcagcttgctcatgaccccatataccacacttataacaaagtattggtaatctttcgaatttgatctgaatccatgttttgttccccctcgcaggaataaaacggcccacaaagatacttctcccaataggaaatctgatgcgcacccgaacatatccattaagcataacttgttgagtggtactccaacggatatcggttacttccccagccatctcgccaatacggcgaacatttgtcaaagtaaaagacttcaacggaaagcctctaatacgtgtccaacaatacaccttatccaacttagcatccttccagtttcccgtcgatggccactcttccaatatgagcattcccccatggaaaatccatggttgtttattcaaaatcactttggcatctcctctggaattgaaattaatctgaaccacccccttatccctctgtttatcaacaattttcatcttccaattgtctaccatcttccacattctactaaaaatactctgaaacaatttcgcagtcatttcacgttttgctacaatcctcccaagaagcgtatgttcaccaaactcagttgctgcttcctcattctcatcccaatcctcctcagcctcaactcccaacttattagtcatattcactaaatcatcaacatctccagatcccatagttaccattacccacaccagaatcacactaccacaattacaaacaaagtcccaacgactagagcatcctctcagggtccgcgcgaccatt

SEQ ID NO: 225151 - DNA, 2962 bp, Cannabis indica
atatatatatatataatatagcttttgaaaactttgagaaattacgttgaagaattaattaattttattgaggaaatctacagttaactatacacataatatgactacatatgattgtaaacgagcaagataaacacaagtgaatgtcgattaaaataaatcgatcggtttatagaatgaaatttaacgatgacaaacaacaaaattttgtggtggtttattccctttcagcggtaatatactagtctacttcgagttttattgatcttgatatgcttgagaagagttatgttctctgaaagtcctaattactacaagttctaattgatgattcttaacagagtaattctatgttatgaactgaacataaaatcaatgaacacagaatttacaagcttcctctgcattggaaacgcattccaaccgagtagtgcttgggttcccttgaaccgggtacaataactttcactaaacaattaattcaattacaatttccagttctgattcttcaaatcaaacaatgtaatctaaattgacttttgtacaaagttacctatgtgtttagatctcagtacacaagaaacacacagctgaaccacattcagcaaggtaatctgaactcccttcagatcaagcagattcgaactccatcttcaacctcaggaagatctctggaatttctctctgcaaactacaaaaaaaaacaaaaagaagttgtgccctagcagagcaagaatcaagaaaatgattctaaccgaagagagttagttagaacaacagtcacaacagaatttatatcctaaagataataaaatctgactaactaaccaaccagcaaagtacagctggcacaaactaacaaacacgcagaaagctgacatggcactaaaatgcacttagtgaaatcagatgcaactaactacagaaaagatgtttagacaaacaaatactgatgcagatatactgaacaaaagcaatatctaatttgccacacaaaacatgacacttacattctctaacaatctgttctcaaataaattttttaaaataagagagtgtatgtgtatgtcaatgtcaatttccttacacttgacttaataacttttatataggtatacatctagagcttagggtttcctaacccaatatgtctcttttcctaactaaaattaagtttaaaatataaaacaatattcaaaactaaatatcttcaaaaaatgataagtacttgttgtagatatacttagattagctctgatggcacatgtatagcacgagagtgtctttcacacgtgaactcaagttcacgtgcgtgcctagtacgagagtacctttcacgtgcactcaagtccacaaatgcctatagtttttaggttggcctaatatatggagcactgaatgtcagtttcagtgtggagcactgaagggcggcctgttgtggagcattgagggtcagcctcgtgtggagcattgaaagtcgttggtcatgagtcttcatgacttttgccatgaaaccatatattcccgatgaccctgttgatatccggaagaaaaattcatgcacatctacattcgatttttcgaagagaacataaatatcataagaaacaagatacacagaagatgatctattatatagttttttacatatatatgagagtggaggatattcatccatgcatggacaatactctatactcatctaagcattttattgacatttcaagattcattcatgaagaatatgtactattaaaaatggttaccaactacttgtacccaagtgtggggtagatcgactcactctcatatagtatcatattgtggttggccgtgacagattaaaaacctaagtagagattattgaaatttcagatcatgaacaactcatcatgccttctttgatccatgaaaaaaatgtaactcttttgagattaatctctctggcactacaaaaatacatacttttagtgataattttttagttacaacataaattttttataactaaatatgacttttagtcacaaaaaaaaaattatttgtgactaaacatagtatttagatacaagttgtcactaatttagttttagttacaacaaatattgtgactaaaaacatgtttagtcacaacaaattgtgatttttgcacgaatatacctttagccacaatttttttaattataacataagaatgatgatttataattagtcacaactattttacttttaatcataaattttattgtgactaaaagtaaaaaaacttctagtacggactcacttgagtaagtttcgtcaggacatgaagtttttaggttgtttacggtgtgagattgtacatcatattgttagtgatgtaaaaagtagagtatgccgaaaaaagttagtaacaattatttggaatggtaatctatcataacttggatagaaaaatgagtatattcaggcctttcataggtgttgttaagttttaatgtttgattgattttaataaagctacggatttaaaataataataataataatatatagttgtgaaattgtaatttttttcattagattttattttaattttttttgtcaaataatttaagaattaagcggctaaatatttagcttatttttctaattctatttttctcattataagagggaataagataattaaaatcaaagtattacatcaagattacaagaaaattagagaaaaagaaaatattttgtgctaaaagtcatttcttccctcacatggacaattagagaaattttagaaatgccactacggatttccaagcctcatatgctcatccttatatgcttagtctagtgtttaagaatgagtacatcctcataagtgaataaatagtgactatttatagagttttcactctcatatgcacatgaatggccaccataaaatctttgggtgttaccaatcataaatgagcgttcatgatat

SEQ ID NO: 225152 - DNA, 3609 bp, Cannabis indica
acacttcatatactctagtatgtagtggtattgcatgacatttttatagatggaatctaagcttgtattgtactaacacatttatgctttaagtgattaacaactctcatcaatcttcattaatccaatcatttataaaagtaaggacgatgcaaaatgagatatgtatatatatattatataatatgcatttcagctttgaaaatggcttaatttggaatatatcatatatatcgaacgagatatatattgtaattatgtatgttttttatactatattttatgtatatcataaccatagaaatatattataaatagatttataaatatgcaccaacagacaaaggaaaagaaaagtaacataagagtccaaagttatttaaggagtttctcagagcacagcttatatataacatgtaaatgtaacgtaatggtgtgcatgcatgtcaaaattgggaaacctatccatctgtctcatcctatcacagctatatatataaatatatatatatatatatataatgtgaacatataaaatgaatatatacggtgagaattaatacaataatgaagtgatttaaagagtgttatatatattgaatggtgaataatacataaggttatatgcggcttaaccagggaaagggggagactttgaattagtgggggctaaagtgtaattattgaaaatattaaataaaaaatacagaaaaaactaaataaatttattgtatttttagaaatttgggggattgggcatgcctaccattattgttattaggtatcaggaatcctaaatgtagcacattgtatttttgaaaataaaagtcatcattttatttaacgaatatctccgttatcaaactaggtaacaacttaattaggacagtgtccaagttgaacaggcgatcagggtgggatatagaggtcctcccaaaagagtgagccgctacatttgttgatcgttttacaaaatgaaaagaaacattacgcaaagtacttaataaattcttacaatcactaacaactttgccaaataaagaaatcataaccatagagctacggacaacttgaacaacagaaagacaattcgtttctaatgtcatattaagccaggaatgatcttcgatccaactcaatgcctcccggagtctaattgcttcggccaccacatgagaaatcgagccatgaaataactttgtaccgtcttcaacaaagaaactactggaatctctcgccacaaaaccaactccatagttagaggaattattaaacacaggcgcatcgacattaaccttaatactattaacactttttgagcactacattaaccttaacacttgtagcacattgtataattagctatattctataatatttattaaataaaatggagtgggattcaataattaattagggacattcttttagtatttttcatattataattatgaatcattgagagagtgagagtaagttttgatatagatttgcaaaattgaaattcacaaaataaataaataaataaataaaattaattaagatttttgtccttaaactttgacatgtaataaattatgctctttgaaatttaaaattgttatatttaaggacttttcgttcaatttcattcaattttgttaatgtaatgattgtcaaatcatattcttcgaacctcaacatctattaaatcacgtcctttgaacttaaacatgtactaaattgtattctttaaattttcatccatatcataattttttagtgaaattgaataaaaatttttaaattcaataatcttaatagtttggagagaattattaatgatctaaaaaattcaaaaagtataatttaatacatatcaaagctaagaattaaaaaactaaaattttgtgtatatatatatatgtgccatgcatgccatattatatggtagtcggtgaggactatgagtgtcagtgtccattagagtcgtatgcataagttttgccatttaagattttatttttattttttttaaaaaaaaacaagatatttacaataataatatgaatagttatccaaccaagccatatgtagtaaatgttttcatttggttagtacttagtaggtagttttgtgaattgtgaaaggagcctcattataaagttgttcatgcacatcttgtatatgcaaatattcatataatatttgcctactaattaattgtacacctttctttatctttgtacttgttatttcaagagagagagagagaggaaataaatttttctttaaatgtaattgaattatttcacttaataaattaatgaagaagaagcttcccttatgctccaaaacaaagtacacaagtattcaaattcaaggttttcaaaatgcttctattctagctaactctcttatatctataaagtaaataatgtaatttacttaattacccttcatttcttctttttttttttgtatccttatcttatatttcatactttggtgaatgtgaattcttgaagggccctcttatctttttcttctttttacattaattggtagtgaatgaatgaatttcaactaagcaagcaaagtcatgtcattagttaggttgggctttaagtcttgatcttttcttgcttagcaaagtcctccccaagacattattattattattttaaggggattattattatcttcttaaattataaattttaatataaagttgtcattttccaattaatgaatatgccattaatttacatctctaaaatttatgaaaagtttcattgagtaactcatttgtaattaaaaataaaaattgaattaattttaagaaaccactttatttgagtattatcttcaaagtttaatagtttacccctacttttatctacgatctatacattttggttacctaggtaattcttttaaggataaatagtgacataagtacttaaaattttaagtttataaatagtataattttaataattttctttaacatcataattactcaatgttaataaaaatgtaatttttctcaatacagagatttcgttagtgtcttaaataagacacatgtaaagcttaattctaaattattgggtatagacgaaaacaaataatataagttacgtccaaattttaatttaataaatttaaaacggagtgtgtattgacgaaattgaaaaaaaaaattaatacttttacaaacattgaatatatgtgctgctaaaaaattattaaatttatgccagctacaaacacaaaattttacaacttatactgcaattatctaattatatttataattaacatttaatcacaccaaattataattttttattagttatttatatttagtttgtaacatacataatttggtgtgaaataaatgatgaatgtatgtacaataccaatgtaaaaccatgggaaagaaaactagcatgatccatgaaaagagttatgaccataaaaatctctcttttaagttttaattaaacctttttttctttttaaaaaaaaatagaagaagttagtactacttgttggtgaaattaaaagatgaagaagatgtatatagatagatatagatctcattgaaccacttgaggttagctc

SEQ ID NO: 225153 - DNA, 5038 bp, Cannabis indica
ctttctttgatacattgtatgaagatttgtaagtttgtgttgggtgacctaaggagccattgcgtaaattttcttaactttgttcatagatttattgatctcaaccctttccaaagagatgcttgaattggttatggtaattttatggggaatttggtttcgaagtaataggaaagcccataacaatattgagttgactcctgagctcactgttatttgggctagagactaccttgggaattttcacaacaaacaacaggtggtggctggcccccgtcacggccgagagtgactgttcctcgggatggcgcttctaatgaaagattaggttttgctcttcaaacttctaaatgggctcctctccctcgtggttttttgaaagtgaatactgatgctgctcttaatttgacaaatcaatgcagagaggttgggtatggtaattcatgatgaattattaagtgcccgttgctctagatgtttggtggttgagactttctcctcaaaaaaaagtttcttatattataatttaaatgaaattatatggactcttcctagtcaattgcactaattattgctatatggggccagtgacagaggcgagatatataaattgggggacaaattatgaacaaaaaatatttcaaacaggatataagaataacctcataactcgggaagccgccaagacaccagaaggggctccccgaggtaattcatctcatttttatggatggtcccctaccgtcctcgaaaaaacccctaatcgcttggtcaagtttagggatagccaatataacttctacatctggaaccgtgtcaattttctgtcccatgattagtattcaaagtttcatgtttagttgactaacaacagttcttactatggaattgctgaccaatatagtacaaatactcatagggctgctagttgggatttggacttgtctccgcttaattcctttgacctttttatgataactggtctagagaatttagtaactattatagcaatccccctctcctagctcttctaaaagttatttaggtgggagttttggtctcgcaactttatagttatcctcgcttttcagactttaattatttcctgttttacctttacaaaaatggatcttgaagtagctcttaatagccccattattactgtaaagagaggaaaaaagcgagaaacttcttctactaaaggatctaaacaaccaaaggttccacaaaagaataagactaataagctatcttttcttcctctaaaactagtcaatatcgagacagtttctattgtcgaagtcccctcgtctccgccaaaggcagttgaagactcgacccttgataaaggaaaacatgtggttcaagatccacgtaaggtcacctttaaccctgagtttcttgaggtgcagcttctcgatccaatcattcctcttccccatgaagcaggagtttctaaagcaaaggcttgttctggtttcattacctgagcaagtcattactcctgaaactatgtgaaggacgactgggagcttatcaactacgactcatcttctgacctcctcaaccgaagcgaagatctggtgtaatttgaaagttttccctctccactttgaagtaaaaaaaaattcttttctcctcttttttttagtccttctttcttttccacctaggggactctaatggcatgccttggcttctaatctcactagtagaatactacttggcttaccctctaacttaatgaagcccttaagacatacgaagctttagcatctaaaatggattctgtcgttgcggagaatgacaagctcaaaattcaagccaatgaccttcaaactgaaatctaagagaaaaactcaaggattgaatctctaaaacagagttttaatgaagttactgagaaagccaaaaagggcctgactgttaaagaaaaatatgccaagatgattgtaaagggtttgggtctagccttgtcggcccaaccctacagtggtacattaatttacaaaataaacaccccattttatgaagacatatcagaatcaatatgcaagggtttagggttagttggtcacgtgcaccattctccataccacaatataaaataaatttctaaccattatatattattaatacataaaccattaaaaacattaaaaattgactttgacctcggtgagtgtcgatctcatgaaccccaaggaaatcatccaatgtattaccaattgtgttgctatattttcttgcatatatcagggtacatttatatatattacatattttctatacattatatattaattttcaattttgggcccccaaaattatggggcctagggtctaggccccaattgccctacccttaggtcgaccctgggttatgcacaactggctatcgttatggtccagccagaataaagaccccatcttacgaagacatatcagattcaatatacaagagtttagggttagttggtcactagggctggacatttatagggttgggccgaccaacccgcccaacccaacccgatatgggtcgaacagcccaataaaaagtgggggcgaaattagtttaggttaaaattttaataacctacatgtattgggtcgaaaatgggttggctaaattgtagcccgttgaacccaacccgacccgcagcttaaacaagataatagataatatatattgcatttatttcacatgactaattttctaacactacctaccaacctaccacgtgaagaaatagtcttgaataatattcacacgtgaataatattcacaaatgacaatcacacctaccaacctaccactaaacaagctacatcatctgacatcatgtttttgaaagactctgtagaggacccaatctccttcttcagaattcctagttcttatgtttttgttaaagtgttttgcaatcttctattggtaggttgctactcttatcagtgcttgatctctatgttcatcaattaagtcaaggttatgcctggctgtcattgtggtccagccaaataataaaacaaattcctaactattatatattattaatatataaactattaaaaactttaaaaattgactttggcatcggtcaatgtcgatctcatgaatcccaaggaattcatccaatgcattaccaattgtgctgctatattttcttgcatacattagcgtacatttgtatatattatatattttctacacattatataccaattttcaattttgggcccccaaaattatgggacctggggcttagggcctaggccccagttgctccacccttgggccgaccctgggttatggctcaactgactatcgttgtggtccagccagataaaagaccccatcttacaaagacatatcagaatcattatacaagggtttagggttagttggtcatgtgcaccattctacacccactccactccctaagttgtgagaaaagccaattttgtagtagtgaaaggatgagatgttgtaacttctaagtgtactgatgctacacttaataacttaaattgaataaagtaaataatttaaagaaaaagatcagaagtgatactatttgaggtggattgcattccaactattacttatggttgggcttggagtttgtacgcctttcatcctatgaccttggttatttggtacggactttctcaagttggtccaagtttagcggtgcctcgctcttgagtgttttggaatactctacagaggacctaatatccttctttgaaattcctagtccttatgcttttgttgaagtattttgcaatcttctgttggtaggctgctactcttattagtgtttgatctttatgttcatcgattaagttaaggttatgacacagctggctatcgttatgatctagccagataaaagaccccgtcttacgaagacatatcaaaatcaatatgcaaaggtttagggttagctggtcacgtgcaccattctccacccacaccactccctaaattgtgggaaaagctaattttatagtagtgaaaggatgagaaattgtaagcttctaagtgtactgatctgagacttaataactgaaattaaataaagtaaataattgagagaaaaagatcataagtgatactatttaaggtggactgcattctaactattacttatgattcgtccttctttggcttggagtatgtacgcccctcgtcctatgaccttggttatttggtactaaccttcttaagttggtccaagtttaccggtgccaggttcttgagtgttttggaagattttgcgaaggactcaatctccttctttgaaattcctagtctttatatatttattgaagtgttttgcaatcttctgttggtaggctgctactcttatcagtgtttaatctttatattcatcaattaatcaaggttatggcacagctgcctatcgctgtggtcctctattgcatgtaggcatcaagctgttgggaggtcttgttcgactggaatatcgctttttctctataggttagggagaaagttgtttatctagtcgatgttcttgtgattgttcggtaagaccaaaggactcctggaagctcatctgcccatctccctttggatttttctaatcttttcttgagcattccaatgatggtcttgtttgtagattcaacttgaacattagcttgagggtatcttgaggtgtagaaatttagttgaataccccacctcttgcaaaaatccttgaagtcattgttaatgaagtaggatccgctgtctgtcaaaatttcttttggtactccgaacctacaaatgatgctaaagaaaagttcttagagtctcagggtgttgaaaaacacttataatcttacaacatctcatcatttcactactataaaattggcttttctcacatattaacgtagatttttgtgaacctattttgagcctcacgattatgattcaacacagaaaatataaaagctatagaaaaataaaatatgaacattgggtttttttacgaggttttgcagttaaaattctacatag

SEQ ID NO: 225154 - DNA, 6452 bp, Cannabis indica
atccagataataccattgcctttactgctagttttccaccaaaaacgagccattagtttctcaatctcatcacaagtaccaaggggaataaggaagacgctcatagcataagtgggaagagattgagccactgtttttaagagaatctccttccccgcactagatagcagctttccagtccagctattaattctattcagaaccttattcttcagaaaaccaagaatatcatttttgtttctcccaattatgtttggccttttatgttttgtttctcattattcttaatcatgttatcaagttgtcatacaataagagatttggaagatgattatgctaatatttaagaggacactagttaacatttgatgtgagcgtttatgtattgttgggtgattccttactggcaggactatagaatttgaagttttcactgtagcaaccaggaaaaggtatgtacgttaaagaattagaagtaaatcagtaaggtatgtacgttaaagaattagaagtaaatcagtatctcttttagtttcatattatcctaattaaatcagtttttttattaaaaagaaaaccctaaacatcttttaagaacaaaattatattaatcaaatgatctcatacataataatgtttaaaatacaatctcaataactaaaccatcctagaaaaataaataaagttagcaacaataaaagagcaaaattacaaataatatcactaaaaattaaacctaaagacgtattcaaaacttaattgtgaatcttattaaattttcttaattctatttttttcacaataaattcttttttaaaaacaatgtattataaactcccttcttcttctttttaattacaattaataaaatctcttaattctaacttgaactcgaacatgacttcttagcaagaaaattcaatatgaacatttcaccatctacaaaaagatgtcaagtttattttactttcttagaattacaaaaaatagtggatggtggctaggtaaaggtaaaaatgatccatacacatttgacaaacataaagttagaatatttgattttatgaaattggaacatgtattaaatattgaagttttgacattatacagtctaaaatgagccaacttgttattacgagcatagaagtgatggcaaaaagtaacaagttcatgaaaactaccaacaaaattgtctcaactctcaactagaaagtttcacagccactcacaaaatcaaggtttggtcttgtcttcttccttcatcttcttctcccacctgcgcttcttgtagtcaagcaacatttgtggcattttctccatcaatctagctgtgttttctcgcttctcggcagctattctatcgtgtttgtgtcctttcctcttggttctcatttctttcctctctggatcataatgccaatcttgctcagctaggagaacttccttccggagtcgagctcgccgacgtgcgctaagtccaagcggcttccacgctcccaactcccagtaaccccaaactcctttagatagctcattcttatactttaccaacttctcacgccatggatactggtattctgcaactgccttcaccacagattttgcagcattccctgccatttcggttcttcaccttcaaaatgtcttttcggcagaccaagcacacaacaaagagaatatataaagttaacaaaaccaatatagatgaaattttttttttttttttaaaaaaaaagggtaaaatcaaacaataagatctaataagtaactttaaataaaattaatattacttctaccccattaaagaccttaaaaatatcagtcaataattagtgactgaaaatgcagtctcttatcacagttacctatcaaactggaaagctttcgcagcgttgcgtagatataaaaactatgaaagctttcagaggagcataatgagtctcaataagggttctagaagaataaagtctccatgttagggatggccaatatgagtgagtttaggaagaacaaaagttaattccacacatgccaaaagcaaagcaagtttagcaacacaaaactacaaatatatgcacacgttttggcctctggtaatatcaaacagattggttttcgtgtaattcagccaatttgtgctcattcattctaaattcttctacacctagttagtaaagttttcagacaaatctatacaattgtctggtatacaactcttacaacaactattcaaaaaccggatatcaagtctaacaatattaattgttccttttgaagaacatatcttcattatctttttggtggataagaacgagaaaatttattagagagaagggtttgcagaagatgataagaagaaaaatctttgaaggcagaaaatgatagaagatctaaaattttacccaaaggatccaatatcttagagcaaaaagaaggtatacaaagaaataatcctttgcaatgaaggtccacacagctacccaaaactcaatttttttttaaatttgtaaacaccctacccatatcatgaaagttcctattgttttgtttctttctaacgaaaaaagatcgaatgactacgattatgaacaacaaagttgaaaataactaccatggaatagaaagctgtaagctaaaagtaagactagtaatataaactcagattaaaatttaactctggataaagtgaacaggataatcaaacttacattttgaagcttgaaattaagattaagagtatgattaaagaggggctcatatttttaagacaacataaacttaacattccaaatggacaaagacaagatatcttaaagccaaataaatacattatacatacgaaagtttgaagttgcagaacactagtgttacatatattcatctatataataaattgataacctaaaatctctacagtaatactaatgaaatagactgtattatcattataaacaaagaaagaagtctcatctctgtatcactttcacagagcaatctgttaacccaacagaaacttggttgcgttcaagaattatcatcaccacaccactaatccttatcccactactacaataatactattatatatcgtttatcttcatttcctctttcttttacttcagttctatcttctaccaccactaccattgcccaatcttcatttcgcaaatcataaaacaaaaataagttggcagtggattgatcaccgcttaatcaatttatggaagtttcttataatcacaaacaccaaaatcagatcagacctaaaaccaaaagagtagaaataacttgtggtacctggggaacaccacggacgactgcagttgatcccagtcaccgataacaacgcgggaatcccggccggcgacgatctggcgtggtggaccggagatttttggcggctgaagatggaggagtgtgttagtaggagtattgaggagagtggtggaataggaattttaaataaaatacccaataattagcaatttcatttcttagctttttagtttttacactagagttgtgcccttataatgtagtgtttgttaataatattcttaaaaatataatttttacaataagatgatttttctatcttactatgttaaattttattgtaaaatgagtaatcataaaatgatatgtagattctttaatcttttgggagcgcttattatttgagtgatattattataggtaaaaaatttaggaaaaaaagtaataattattctaaaatatataataaaataataataataataatgtatatttgttgtataaatacttatttatttattttattgttaataagtattaatttttgagtttttttgcgactaaactctttcaactgtcgtttcacttgcattaaactctctaagcataaattttaacggtaaaaccttccaaactactgaactagtagtaaatttaaagtgtcatttgattaactgtcactatggattgtttatgtgtacactcttgtacacataacacgtttatattagttcaattaatattattatttaaaaattattttcaaaatttatttaaaaattaaataaaaataaaaaatattatcaagtttgaaataattttaatatttttaaaataataatattaggtgtaccaatataaatttgacacatgaacaaacacataaacagtctatatcgacagttaattgtaaaaaatagataaaaccttaaatatgcaagcagttcagtagtttgaagaattttactgttaaaatttgagcttagagagttaagtgcaaaataaataatagttaagagagtttaaccgtaaaattgcggtaataatactctgttatgttaatttaatgaacactaatagattactctattttttttttatttatattcacctaaaaattaatttaaaataaaatctatttgttaaaatggtatcaaataaaaatcccacatttgttttgaacataactcaccgtaaaagctgttcatttatattgtagcctttaaatgaacccataatactataatagcatatcttaatttaattctacatccaccatagtccataactgtcaaatttgaaaatataacttccagcacatcataagtgagttcgcgttgttcacatacctttttctatgaaaatctaatacaagttttattattccaccttaaaaattaatataacaatttttttcgttgggaatctaatacaagtttacatcttaaaaattaattaattaatttagtaaaataattaattaagttgtttagataaaaacatcaattacttatgatgttgatgatgagaagaatattgaaatttgataactttaacatcttttgttataccgaactaaaaataattggaacaaattactaaatgatgattctagctgagtcgccgactatgttgctctctttaagacattttatgattctgcccgaagtgtgtatgacaatctatcaaccataacgttttcaggataaaacaacctctctaaacgattcgttctacaccgaacaatatcgctctttaataacaatgttcagtcagtcttttcaatcgaagacaaaatatccccacatattatgtgcgcattacaatcaggtttggattttgacgatgaaagctatgctggacttttcaacatagatacaatcaccactggtcaactgatcctgatagtaaaaatacatgtcatcccaataaaatactcaaagctaataaaagtagctgcattttttgatacgggagcatcatacacaattatgaaccccgacatcttactctcagaaccgtggaagaaaaagaaacaatatttctaagttgcaaataaccaagtactccgcactaaattaattaacaagccaataaagctacaatttttccctggatgtttcgttgtccatagagtcattggatcaaaactttcaggaaaggacctcatagtgggatttgacctttacacaaaacaaaaagggcttagaatacttccatgagggtcggcctacaagaatttcttcaccaaatgggagcaaatcccgaattactttcacttagtgcaagacgtccaccaatcaaagaaaagctaattcggaggtcatgtgcaacttctcactcaaaattctcaacgaagtgcaatcacccattatggaaaaatgaagaagtctacatctctctaccattcaaacaaaatgaggatgtcaatccaaccaaagcaagccactccgaaatgaattcggaacatcaactaatggcgagtgaagaatgtcaacaacttcaatcaaaatggctaattgaagacactgaatcgccatgggcgtgtcacgccttttatgtcaacaatagggtggagcaaactagaggaagacaaaggttggtaatcaattatcaaccactaaaccatttttggatgatgataaatttcctctactaaacaaaaactctcttttctctaacatctttcaagcaaagatattttcaaagtttgatctaaaagtggatttttggcaattgggcatcaagaaagaagacagacccaagacaacattttgtatcccaaatcatcattttcaatggacagtattgccctttggactcaaaactgccccatccctattccagaaggcaatgagtagaatctatagtccaatcctaaaccgagccctaatctacatcgacgatatactattgttctcacccaataacaaggcacatacaatcctcctggtccaatttgcagagatatcactgaaaaatatgttatcatgctctctgaaaagaagatggttattggccgatcatagaagaagaagtgtcttcagaagagcggtttacatctactaaacatcaatttagtggcgaacccaatacattcatgcttgatgatcttcccccaaatcaatggagatcttgcctccaagaattcagagcatggacccttttagaagcac

SEQ ID NO: 225155 - DNA, 7926 bp, Cannabis indica
tagtcacaataaactgtaatttttgtgactaatacgtttagctacagactttttaatcacaacatagaaatgatcatttataattagtcacaaattttttactttagtcataagttttgtgtgactaaaagtaaaaaaatttatagtgagagtaaatttaggaagcgagtataggggtggggcaacaatctccgctccaaccccgccccgtttatatctctaaaagaaaagatttttttttgtgaagttttaataagtaaaaaaaagtataaatataaaaaattctttattagagtatgaatgtaaatttaaagaaaatttgtatttagtgtaaatattctttaaaatttaaaccatttaatatgggaatatgctccagcttgaattgaagattggattgatggtaagtttgggcaacgagtgaattaacccaaatagatgtactatgtttcaaattttaataatatattagtatgtggacaaattcaagaattatttttttttttttaatttttggcaatagataattttattgagaataggctaaatgttatacaatctagaaaaaatgaatcatacatccctatgaaaccaaagataacattccctttgctctaaacaagttctctatctactcaaaaattatgcataataatccaagaccaaaataaattaatatctcctacaaatctaagcatcaaacttgtaataatcacaaaagtcatgaaaagattaattatcttaaaaaaatacaaacaaaaggtttcaatcacgagccaatatccacaaaaggtaaataaataaaaggatattctcacaaaatacttaaaatcctttatatatttatatatttttactctctttttctaaataatttgtggctcaattgtaaattaatactcaagtttaatttttaatgataataatacttaagttatatttttaaaactttcgtgtgtatctgtccattaagtgtcacctgtaatttcttattgttatatttaaattaatttttaaataaaaataaaaatttaatgatctaaaccaatcaagaactgtcgcgtggtcattaacttgatacttaacagccaaatacctacaaaatataacttaagtatttatttgcaaccgagaattaaacttatatatttatatcacaaattaatttttttttacatatttttacagaaaataaaatttttcatgttacacaacatagtataataatttagtaaaaataatgacttttttgcgtattttcgtaaaaagaagtttaaatttgtaaaaatgttgtgtatttttgtaaactttttgtataaattggtattgggcaccatgggagtgtagtgtcatcataattaaaaagggtcaggtcctcgggtcggacccgacaatggcgttctcactactccggaaatggaaatggaggaccgttaactcagcattgccgccatggccgcgacctcagactttccgatcagatgcggcattggaggccatagccaaagcttcccaacacaacctctctactatatttctctacaactatccctccttttctggagctttctccgctctctttgctcacctctttcactcccgtatcaacctcccttgtctcatactccctttctcttccgtcgaacctctcaggtattttcctcttctttttctctctcactctcattttctcactaaccaaacagagttgtttcatttcatttttcgcagggttgaggatttatgcactgaaggccttgagaatttgtatcttctcgacttttttggtcccaaaggatttgccgaagcgctttctaggcgagcttcattcaagtaaagttatcttcaaatatatataaatatgaattgtgagcgattcttgataattttatttcaattcatttgagactgtttaatgtgtattgtatgatttttgatgtgattagagtgataggatttgatcatagaaaatcagttcttcctattataccatctgaggaagattgtcctgcaaatctcaaatttcatctgaatgttgagaagagcagctctattgctgtgtatgaatacttctctgctaaactttctcagaccaaacattctgatgtaagttgaatttgagtcacttttggccttgttggtacaatgaagaagatgtattttttagttttttactattgcattttgaaatttttagggaatggctgcaagtttattagagtcaaaggaccaaggtcgtgtagaaatgattcttaagcacattgaagatactgatttacgtcgatggagcttaccagatactaaagcatttaatattggacttgacaaatggaggtcgaaattgaattgcttaaccaatccatatatgtatgaacaggtttgttagtattaattgtgttttgtcttaatttaatttgtaagttttttataataattgggttgattttctgttaaatgttctttcagtgtctgtcttgtgcacaacaacttcacataacccagaatttctatggcctccttgctatgcatacatgagtcaaaagtaccataaaggatttttgctttagttttagtattcaacattagtttttgctagaaagaagtaataactaaagattcatggaactcaacttgtttgtaacttatatgagttattcattgtaatctgtatattaaaacaacgtatattattctttgtttcttgtcaaagtaaaggaaagccatttggggtgggatttttgtgctctgagcctgttgtctagtgtcacagtttcttttctttgactgagttttgataatattgttgcagttgatggagattaattctgctgatttaattgctgttggaaattcttatatttctactcgtgaaaaagccgcagagaagttgcttaataaagctttcaaagttatgttgggcagaggattttatggggaatgcctggtattgattatctactcccttacaagttttaaaatacaaaacttaaaaaaaaattacctttgtttcttcacagcgtggacttctcttggtgacttttgttcatttgttttttttttcttttttgtgcatgtgtgtggcataaaataattttatgatacagctgcaacttcccattatctcaactttatatataactgatccttggaaatatcagatttattttaagatctaattatgatattggatattatagggagttcgagcagatacaaattctgatttagttgatgaaattggcaagaaacttagtgtaaaaagtgccgctgcgggtctcaggtaatttaattacagatatttttaggcatatgtatttatgtaattattatattcttttactgtagataatgatgtcatcttttatatatatattttagaactattgttattgttattgttattgttattatgccaggcctataggagctgtcatacacatgcaaggaagtaatctcaaagtatgcttgaggagtaatgttaatggcattgatacctctgaagttgctaaagtatgcatcattgcagatatactttcttctagtatgtatacttttatgatatgataaataatgccattttaaacatgaaggcatatggtggaggggggatcttcaagttcaagctcctttatcataaggatggatgagtataaccagtggctttctgcgatataaaggtgttaaaaactatctctctgctgtttatatatatcagccacatgactaacttttaagatgtgttgacacccaatctaaatcattactgcctaccaattatctcattttcagagaccaaaatgttttgttgcggcgttttgttaagtaaagagtcagttacataaacagccttaattaataaggagtgtattccttgcactcttgtttgcagtatagataaggagttagattgattttaggcataaaatccgtaatgaatcaggagttgtatatgatcggtatccctgcgttcttgtttgcagtcaagttaatggagatcagtaggatgggtttgttatataaaagctctagtttgctgcgagttaatttcatttccacaaataattattttgaggagcatcagtgacatgtggagaagtaggcttgcaagtgcaacttgaacttatgcacaaatgtgttaaagaatgtattacagcttggcttaattaacatttgacacaattacttatattgtattgcttaaagtatgctctgcaacaatgacaatagacaagccttacttcactggacagccatcaactactatgcctttagcagttggacaacttgctaatgggcagtgttcaccatctgttccccaccatttcaagcctctattctccacacccagtgaaaagtataataacactgccatgaaagccaccccagcatccagtgctgctgaaagaatataattgtacctctgccaccattgtttcctgtatcggaagacaaagaagttgaaaatggttccaactataatccaggcattgtagttcagtggtgttgctggtggcatcattgctgttgctcctagaaggactggaaggttgatcaggggtatccatgtttgtttggggaatgccttgtggaacagccaaacaactattggtccaatcgcacctccaaggaaaaaccaattcatctctggatagtttccacgagatccaaatatacgctttggtccaactaatccccatatgacagatgcatcaaagaagactcggtcaccaggacaagtccagggactatctggtgggagaagattatcctggcatatattctccacagaacccaacaaccaccatgccactgcaagattgatggttccagcaaggatcgttcctatgaactgggaccacatattcagatgttaaagaagaatagaaaattgaaaatatttacatgtgcggtatagaaaaaataaggcaaagtaagtatgcagattattcagaataacttatctggggacaatttttgtgaaattgcttaatgcctgattgtgcaaagaagattatttttcttcctagtgttagagaatgtacctgaactagaaacatcgatcttggaggaatcttcatataatgccccagcttaaaatcatttagaaaggacacagcctgtgccgtactcatatagccatacgttttgaagcaaacattggcaattggatgtcctggtaatatgatacccatgacatactctgttattatgttgagccctggtgtctgttattatttcatagcattagtagattgtgaaaaattctgggctttgcagggaagagtagaaatgaaagataatagcatggttgctagaagattttgtatacaaaatagaatagagatgtaatgtgataatagttacatcgagtcttaacaaaacctacttttcgtaaactacaattagtaaacaaccagacttggatagtaaagctaaagcgaaagctaatcatgggattgaaagatattaaagttttgacttgcctggtttgttgtagcagttataatgctgattgggagagtgaaaatgaaggccatagcagcagcaaagaggagtccccaccatggcatctgaacctggtcattcataaaaatgcagagtgctagggatattaatagtgtcacaccaagcaagaagtaaaaccaccaggaaggtatgtccttgtatcttctcattagttttgtatggatgtcctccttgcctttatatgaagcactgtaccgctgatagatctccctgtgcacaagctgtgaattaatttggattggagttgttttttgtccatagtctaaagaaagagtgtttctattccatctaaaaatttggtggccgtacaattattttggttgttctttgcttgtgtgtttcattttttaacattttatagatagtagtacaaaattgaaatgacaagtaaacaaactctcttctgaggatgtcaagtgtaactgtaactaaatgcaacacatttggatgaaacttattgacataggaagattaaatacaattaatgccgattttctattttctctctgttaggatacaattgcagctaacaaaaattagataattaccttccttagaaatatgaaataaggaaatgtaatttaattttttgggataacaaagtattaccttccatagaagaaagccacatgtgtgagggtggcagctatggtggcaaaaccgaaaccataagtgagggcgaaaaacatgcttaagtgaattcttccttggtcctcatactttgctgtatccaactcgaacttgttgttcactatagctgatatattgtaaatttgaccttctgcggtaaacaagtgtgaagagaaaatgggaaattttcttgcactgtacaagtccagtccccagtatgctataggtagtgcaacataaattatcagtgcatagccagcaaaaatgttgagaatgctaaagaacgggcagattagagggctgaataagaaagatgccacggctgaccagtcaagtgtgaacgatcccagtccaaggcctttcatgcctgaaccgatctgctgtgctgtaactgactttgagaatacccagcaaacccatgatatgtttgtgagtgttgggaataggaatcccggaaaaacataccatgaaaaactgcagattagagctattaaaaagaactttgcccgtgacatccgctgctcgtctttctcatgcaatgctctgttcattggtatgggaaattttcattagagcaggcatagataatgttcataagttatttaccattaaaattttaggcaattgtgacttgtgagtaaaaaaaaaaggagggtgataatgcattcatgaaaattgatggcaataccatctaccctaaggctgaagctaaataggatcaagagttaggccaaataaaatttactttcaaaacttactgttattttggcatcactttaaatacatggtatctaattagattatccatagctagaaaatatgatttggattcactttgatattgtttttgattattttcatgagtttctatttaaaattttgtttattatggaaaactatgctgaatgtgcattgaacttttcattttattaaatcaaactagaacagtatgcaaatctatcttaattatctcacagatgacacacctaattatccaaatcttacttgtagtgattagtgaacaattaattatttactcaaaaatctcgtctacttttctttggggctaattgacagcaattcgtgagtgggactggtgactaattaaaaaacaaaaacaattaataaaaaaggctttatcttcgttgacttgggtcacaagtccaacaagtattttttttaatgaaataaaataaataaaaatggggcaccatttttgtagctaaggggagccaggaggagccagtatcaaccagtagatttgttattatttttaaaagtaagaaagatggataataatgttaataataaccaatggtcaaaccaaatcggtattgaagtaaaatttcatgaaatgtgaattgcacaccagggcattcacagatgagcagatttgaaatttgaataatgttaggcaagagaagagctacactaatggccacttcgataggataatttaatataactatttttatcaaatatcactaatcattcttaaagcactacttcacagtggtatctatcttagaagtgtaaatagatcgggtcaaatctaatccgactatgattggatcaatctgccccatcctgccttgctagataagatacttgcacctaacctaactttttttttaattaatatctaagcttatattttatatctattttaattttgtattagtattatttaatataatattatgtttagtattgacttgtattaatagattgtgtaaagttataatatattttcaataaactcgatcccaa

SEQ ID NO: 225156 - DNA, 3540 bp, Cannabis indica
ggtcatgagttcaaatcccataagactcttcttttaatttttttttatatatttttgagagccccaaaatttaattcgtcttgggcccatatattttcagggccggccctgccttggagtagtgtagttcataaatcgtgggcacaaccgttgcaaggctagacttggtcttaatgggctgttcatcccacaatcatgggctgaccacgtggttcaaatgagcatgtatttggacttaccacttcttggaccatatcgtaggtctaagtatgtctaaagaattattgtgggttgtacaacccataatcaagttggcttgtatggttagttgtacataccatatacattgtagtttaactaaagcctactctataatttaggtccttgggttttcttgtgcagcccacgaaaaagtggtttgtacaaacaatctagtggtggtcatcagctataggttatgagtttattcaactgaaccaaaatctaattagaaattttactcttacattgcttaacatttttatgagtggtgtaatattattattagtacaaaatctcatttttattttttaaaagtaaaatcttatttatataatgtaataaaatttataaagaatcattaaataattataagaccacatcttatagaatgctaaatacttttgtgcgccaacaatggtgtatgagaatgggtggaacaacacgtaagcggaaaagcgtctacagaatttcttaagggcaaaatgcctttgtggctgagaagatccagcttggacactcttcagccaataagaaactcccatactcctaaactctcatctctcagttgccacgtgtcattcccacatccacccctttccctccatttttatatattttgggaaataaaatataaataaataaaaatcttgtgcttctgattccatacacgctcacaccttgtcttcttcttcttctccactactctgactccataaccgtcctcaacatccttctcactcacacacacaccgtatcggactatgaaatttagggttaagcttgattgaatccaggtactttttttccgtaatggcttcttcttccatagctattccggacctgacttttctctcaccacaattgacgcatactcataggcggtctgtatatctctctaaaaattctctgtttaggctctctctctcaaagcatagcggctgcaattttcgaacacggatcaaagctgttaaagaagacggcgttgtggtcgatgagaagaggagcgaattcataaaggaagtgaatggagcgggattgaacggtaatggagctgctagtacgaatgggaatggttatgcgtataatggttcggtggagaggtattccaatggtggtgtgagtgtgttggagagtgggaatggggcggctactaatgggaccttggctaagtatgtaaatggaaatggtgtggctgctgaagtggcgaccgaggtcaaggacgcggaggtggcggaggaagggagaaagaagaggatagaggagattgggaaagaagacgcctggtttaagcaaagtggtagtgggcaacaaaaagttgaggtatggggtccttcattctcagctataatcaatgtttactgtctaattttattacataaatctgaattaagaagtgagttgcgaaattttgccttttgtttcatttgattagtgttgatatgcgcgaaaaagttagtgaaggattcaatgcttcatgttattaaacaagtcagtagttaggcacactctgggggcatctatatattaatccttattgaaaagagtcctaatggaggaaatcagtaggcaagaattgtcaattctctttccggtttctccaaatatgtgatgcttgcaaaaattgtcctcctcacaggaatggattggaaatgagttttttttttcagtaatctttgccttggaattatagggatatttttgttccacaattaggaataagatcacgagataaagaatcaggtgtaactactaactaatactttacatgatctcaacgaatactttgaacggcatattatacttgctcatatattaagtattggagtttttcttaagttgaaaaggcatagattttatcatttagtccttaaacttcactcttcttgtgataattaacttataaatatattgaaaaacaattttacagttaccatctttcttttgttgctcttaaataatttgatgttaatctatatatgttttcggacattttctgtgcatacactttgcaatacctcactagcatggcaatatattgttttttcaggtttctgttactcctggtggtcgttggagtagatttaaaacttactcaacaatccagagaaccttggaaatatggggatttgttctaaaatttctctttaaggcttggttgaacaatcagaagttcacttatagaggttagtgactttaatagaaaaaatagataataaagtttaaaatccatggcaggctttggtttgttgttgagttgttgctttgtttcatttcattctttgtcattgaaaactaaataaactagtaaattggctgctgccattagaaaggagtagccattgagattccatcatgagtagtggtttgttcttgttgcacagctcttttggttctttgaattattacttatccgcacacacatatatatgtaacttctctgttagcaacttcacatataattaataataatatatatatgttcacttgttcaggaggaatgacagaggggaaaaaagtcttgaggcggaaggctcttgcaaagtggcttaaagaaagtattttaagattaggtccgacattcatcaaaattggccagcagttctctacaagggttgacattcttgcacaagaatatgtagaccaattggctgaacttcaggttggaaattagcttttggtgctgtttattatgtgtatacaactatacatatatattttgcacttgttcatttgtccctttacatataattttatggtaaatttgtcattgcttggtttttagttggtgttggttttactgggaatataaatccttgcattgcatggaagatgtttgcaatctcttttcagggtgacatttagaaataggataagagatattgtctggtgtataaaaaatattttcttgtgttttacgtattctgcttggtctgagatcaatgcaacaacaattagctagtggactgtcatccttttactagtggctagccatattgtttacttaaacttaactgcagaaaacacgagtccacatgcactacacttatttttctcagcacatgcactacactttttgaatcaacgcttcttcagtaaatgaaaaacacacacaaaaaaaaatgaaaatgatttgatgattttgcagaaacctagcatagaaatttattatttagctttcaatttgttaagccagttgatgtaggatagtgtgacaacaatgataaaagaagacgactgagaacagacagaatcgaatttttctgctctgcatttcaatta

SEQ ID NO: 225157 - DNA, 7968 bp, Cannabis indica
aaaaaacaaaaaacagtttttagttatgatgccaaacaaacacttatactctgttgtttccaaaaattttcacattgcagcaacatgttattcaactacaattcaacctccatatacttcaacacagacacaagatcacaacctcttttccaacgacgcacttcccctttgcaatctcgaattctctgtttaaaattattagagtaatccttttcccaatcttacaaaatctcactacaatatttaattttttccataatagtgcaacccaaataaagataccaagccttctcaacaactttgaaacacaaaggttgtttcaacctcaaatttttttattttgtatcaccatcacctcattctcaataaccaaataaagggacaatggtcagatgtaaaaatctccagattaaaaagtatattattagtaatagagaaaataatttatatatataaatttagtgacgattctaaattttattaaaattcgataacattttaaaaatattattaaattctaaggataaaaattatggtacaatttttagatttgaattattattatttttttaaaagaaaattttcactaggcaacatttaaatatagtatttacttaatgttatttaaatataatttttgtaacatttttttagcaaatgtcaataaatcaaatgccacctttctgtaattttgttgtagtggccctttggtcttcaagtagtcttcttcaaaggttgcatctttgggagtcgtggctaaaagaatcatcaaacgaatcgaaaaaatctaactttggaagacaagaagagtgggagagaattcgatttgtgaaagctttatgggctaaataaggaagaatgagagttgtgagccaaataacaaagtagaaaaattattggaattagtctcacattgttaatatgtataaataaattatcatatataagatgaatgggctactcgtcccattgccaattagttttgatatgaaccctattcacctcatcccaaattctaacatgctatcagagtcgattgtgaactagtatgagcccaaagtgtcaccgatccaaaaaggcaagccataaaatagctaaattaacgtaaaaacttttgttgtctctcatttaacctctatttgggacctttcggccaatgtgtgccagtttctagtgttggggtctttgacctgttacgaatttcctgacgtgtacacccacgaattttttaatatttggccttgtgggattctttcaaatatcatgttcgaccctatagttctttaaaggttgttcgttatagtcacactttttaagcccaaacgtgtagaaacaaaatatcatatataagatgaatatagactacttctcctattgccaattagttttgagatagaacttcattcatcttatcccaaattctaataaaaatgtagctgcaaaaaaactatagaacttttaaagcacataggatagtccgctttagagtagagaagaaattaatttgtagttattaagaaaagtaaaacctacaaaggcccaagattgaaatagtacccccaacccaacccattaaaaatcgaaggaatatgactggaggctgtgagtgaacatggagtcagatcgactaacaaagcctagttctactgaaatcatcgatccacgtgaacaagaaaaaggccctattgacgccatcgatttgagcaatcaaattaaatgggttcaagcgagaaattcaggctcaaagccgttaagcatatcaagtcaataaagctaattgattacgattatttccctccaaattcacatggtattaataaaataaaataataaaaaaaaaagtaaaaggaaaaggggtctatatatgtatctaaaattctcactaattccctaatgatctgattaactttaagtatagaatatttttttgcaagaaatcctcagaatacttgcaagattctataccttggaaaacgatcgaagtaagaaagacacgatggctttgtggagagagagttgcagctcttcaatttttagcaactcaatagtgagcaattttttggcatcaacactttggtatctcaattagttgagttatgatcattaccaatatcaaaaaaaccatgtagagtagagtagcctatacaaagcactctctcttgtatttactagcttagctcattacttgaaatcattttcaatatactttgtgtttcaataactattattatgtaaccatctttctttctttctttctttttttaattttatttatatagaattaagatgtagtactgtcttactgaaatatgtgatgaaattatagccaaagaagaaagatataaagttttccaaattaagacccttctattttagcaggctatatatatttcagctctttcagataaaaaaataatcaagaagttgtattaacaaattaagcatacccaaaaaagaaaaaaagaggtaatatttgttctcgttggagctgtggagttgtggttttcacttatttttttgaagccattcaagaattcccttctcagcttctgaaatttccccatctttccctctcatagttccttcaactaactcaaagtaatctttgtaattgcgtttgtaataactatccattctctgaaaacaaaaaacaaaaaaccaaaataaaattataatatacataatttgttcattattttttgtttttggccataacataatttggagtaacaatgaaatttggccattcatatggaattcgaaaacccaccctgcattattaacaagagtactagctagtaggaggttgggggtgttaaggcaagaatttcacctccttgtcatttttggctttgttttcctcactcttctttaaatactctgtatacatataaatatttaaaattagcaaatattaagtgattgggaactaaaaatgagtaaagaaaatatatataattattagattagttactttgaagaagttgagttttggagtctgtgacttgaagagcagcaacaacagtggataagagaagacctcttcttccatgaatgatgtggtgatgagtaggagtagtggtggtttgtgaattgttggtgttatttctatgaactgcttgaatatttgaagaagcgtatttgttcatggtgacagtgaatgccatcaatatgctttggcctatggaactcataactgcagccactcgtttctgtctcactctcagcttcaagattgaacaacttatttcactgccactgatgatgatattatcatgttgccaaagtggatatgcttttccttttatcatttcttcagctaaattaccaaataccccttttcaaaacttcattttaaccacaacaagtaatttcaaaaatactttattgctctttgatttacattttatagtcaattttataggttatatctctattatatatgttataggaattctaattttcataagttatgaagttattttttggtactttgattataaaagagagtatttattaattaaaattattttgcagctatattttgttaatgtgtattacaaaaaagtagttctcaactaatcccaatttgatctattcaaaaatattttaattaaattaggtgtattaatctaatctaatccgcattattttactcatagtgcattcgatattttggatctaatccaatctgtaaaagtacatatttgatcttttattttggattagttatctttttaatactgaattgtttaatatttattaaaaaaaaatcatataactaacaacaaaagaaaacaaattattgttgtttaatgtctctataaaacaacaattcaaaacaataaaataaaagataacaaattcaaagaaagaagaaaaaaaatgtgttttatttaattattattattttatgtataaagaaatgtttaatgttgtttaagattatattttctatatacataagaattaaatatacatttgatctactaatttttaaaatatttgaatcatgtgtattagatttttaaattattattttttacattcaaatatatataaatatgtgtgatttgatttgcttttatatgtaaatcaatatctaatttacactttccaaattaaattgcatcgtgtaaaatagagtgagtattttataaacatttctaaattaaacactagaataagtattgctattgggcaccagtggtactccacgattagttaacaatattttttaaaaattattttcttaaattatatgaaactcgagacataattataccaatagcggtagggctgagcatgaaatccagacaactgaaccattcaaactgacctgccgaacactgctggaaccaaaaccggtggaaccaaaagctaaaaaaaccgctaacgattacaatggccattgaatgatcgatttttttgataataaatcgatctaaaaaactaaaaccgatcattatacatacattaatttatcattttattaatattaaagttaaaagaataagacaattaatttttgaacaatttatttatatagttgtagaatgtaaactaatgtgcttatagaataaattgaatcatattttaaaagaaaaaaaaatcagtttggccgatttaaaccgactaaaccgaaattcaaaacgatcgattttaatataagttctaaattggtcggtcaattttcgaattacagcaattcagactaaaaaccaaattctaaatttttatctaaaaaaaccgaccaaattaaccgatgctcaaccctaatagtagccacaaccactagggtagagctatatggtagccaagggtggccttggccccacccaagatttaggaaaaagaaaaaccacataatattatttataatgtagtccttacttttatagaagttatatatgtttggccctctcaacttttttttacattttggccccccttgaaattttatttttcccctccaccctggccacaaaactcaggaatatataatgtcaagcgtatatttggtctctacaaaacctgtagaaccattatatgaccaacttctattgcttgcccttcactcactccagcaatcgtttatgcttacaccaagcaatagcaagaacatataagaatatacatccagtagtaccgccaccaatggtccacaagaactccggcatacctgcttttttatcgtcaaacagctcgatagtgatattcatgccaaagaccccagccacaacaacaaaggcactcaccaccagggttgcagttgttaacatcactcccatttgtagaaggtggttctgtttgtcatccagcataatgttgatataatcctctgtgtcatctacgtattctctcagcttcaaaaggacaaaccgaattcaaaatcaatgcaatggttgggtgagtgtgtcagtagaggattgaatttaataaacacaactccttctctatttttcaatacaaaagtacaacaaacaatttttctagcacataatgtagcaagaatgaatttcacttaaaatattaggagaaaggctaaaagtgtcgtcactattagtagaattaaatatcaaactccatgaattaaataccgctaaccattcgcaaaatgctacctcatgatggtgctagctaggtaccactaatgcctaatagctaacagtcagatattagatgtcaagtggagttgcataccgtggatagtttgtttaatgtaccatcaatttgaacaaagtatgcttctaaaagcatttccagctcctctacgtcaaggttcttgcttatggcactacgagtagtactagtatgagttccgtggctgtccctatgtgctccaaacaattgatcctgggcattatcagtgttttcaaggtcgccttcataagttctgaaactcgccccagcttccaatgcaatttcatttggaatcctgtaaatgtagcgggacattgtgggagggcatcagagtgagctcaagcgaagacaagcttacaacagaattatagttagatgttacaagcctgtcatccatgtctgatcgacgaagatcatcatctctctcatttattgaagcagtagaggaattctcaagctgttgctcaattaacttttcagttagatacatctcagccatatcttcatcatcgtctagcaagtgctccagctcatccctcacctaaatatcaacatgtacgcacccatgaacatatcatgtgaaaaatgatgcatgaccagaaactttagtagctataaaagtaaaaagcatgaaacaactggagtctatcaagttataccaatgtcttaaagatcagactaattggcaaaagaaagagtttcaaatttcaaatcatccaaccttctgaacacgtcctgttattgcaactaaacgactcttaatttgacggactcgttccaagttgagagtactaatcttcgaagttagcttatctaaggcaggatgagcctctagctccagtgtccttgcctggtagaattcagaaagaaagaaacaataaagatcggaaaaagcattgtaagtgacttaaacaaatcacatggtagtttataaaccagagtcaggtcaaacttacttcactctctaagcaactacaggctgcctcaaggcatgcctccagtgccacaaactcgaaaggtaaaatcttcagtccatcttgattttgaagaccatctttcctttctccttcaccttcaccatcctgatcctgaaacttaggaaaccctccaccagaattttgaggactatgatctcttgattgtgggtcttccatatcatacagatttgtccagtttgaatcatcaccatttccttcctatattatcaagagagattaacagtttgacagtttactaagaaacctaaagaagaaaagcaagaacctcaaaaatgtgctagactatagtaaaaccagatcattaaaatcaaacataacgatatggatatgatctaaactacatggtgaattaaggacatgaacaactgagtccaatttcaaggcattgattttataaataaacaaatatatgggagaaaaggcataagctaattttggtcaatccacatacgtctcaaatacagttcaataatcacaattgcatatagttccattataattataaattcaaaatactccaaatacacacaattcagatacttttagggaacaaaaaatacttagatgaaatttcataattcgaaccaaaattatagaaaaaaaaaagcaaaaacaacatgaactggtatcaatagcaccaaaatctataaacaatttagcaaattaatatatctttaatcaaagtaagaaaaacccaaaattcaggttatacgaaagaaaaaaacagaggataaatttaaaaagaaagagaggaaaaaaaaaacctgggctttggtagcttggtagtgacgcgtgagtcgtcgttgaagctcttcaacaaaaggcgttaccgatgggtccctagagttgagcaaaagaacttcctgcgctgtgattatagccttgatgtgctccaagtttatcactatagctctctctcgtcccagtacagtcgaagggtatgaaagcaacggatcaagaatccgaagatcacgggcaggaaggcccgtccggcgcatgatggcgtgctttccggcctccaccacctgggcttgccccgttgagtccaccaggagccatggccggactccggttcctttcttacggagaccaccgcccaccgccaagcccaaagcaccggaaatgggccggtttaggtcgggatcgtcttctggtgggccgaggcccgatttgggcggctgaggaagatgacccctcatcacgttcgatggctggccacctgtttctgcttcacttgttttattccctctctcacttgctaaataataatattgttattctattttgaaaaatatttttaaaccattttttattttcttttaaaaaa

SEQ ID NO: 225158 - DNA, 5314 bp, Cannabis indica
tattgaactggtgaattttttttttttatagttcgtaaccttgatccacctatatattcagatatatacttttcttgcaatccactctgtgattcacaaccacattgaataaattttcacatcacctagatatagcattcactagtgagcagcagccattgctggtgcccagcctgattgtttattctgaatctgattaatttagaatattttcttatgattttgtcaacagcacattacaattatttctactcttttttttttttaaatttctcatacacaccaaccaaaaaacaactactagaagaaaatgaaacaacaaataaagaaagaaatagccagagttaatctcagttaaaacaaatgacttcgaacccaatatctcagagcatactatcagcacgagaggcagtcttctgaagaaattgcttgggactgaaggcaacttactcctaaatctaggatgacgaagccaaaatatcccagcaaccagagcaacaatctgaaatggtgtcacataaagacaatggctgtaatcaaacagaagattatgtatagactggtggcccttggatctctccaactgagcagagactgaaacctttctccttgagttgcaatgtctcccaccacagtctgaatcctcccagccacacttcttagcctgtcgtatctcatccgagccacgtcttgttgctttgaagttgggaaggtatcaaactcctcatctaactcatctggatgaacagcttcagcccatgaaagctttgtatccatgtgagaaggatgccttggtcgacagcgaaaattccatattccaatcagaaacatgtagagaaacatggtggggagaatcaattctgggtaacaaatcaatatgaagaacaagatatgaaccagaatagttgtcactgggttacgccattgacagacctctcctagccatttactcatggagatagcaccagagaaaagggaaacaattctgaagaaattggccttgcttcttctcatactccacatgtgtgaatccacatctaacatgtactccaccacctctttcctcaatggcggctcagctcggccaagtctcactgccactatggtcatggcctgatacctcagactatccaattggttcactgtaaatggatgaaggtaatgcatttttggcagtaaagggtgcccgtataaatagattatgttggctagtgagagacaggtgaatctaactgctagttgaagctcccccattttcttcaaaccagatggttgcagaaccaaaagtggatatgagttggtataaattcgatccatttcgagagttgaaagtcgaattcttactttcccaattcttgcatcggctggtttatcgtttccaccaagatggcagttgtcgaagaccccaatggtgatgacagtacaaggatcataaacctcccaagtgtattgttcgttccatttgggatttgaactttcagtgattgttctggtacgtacccatttttggccgtatttggctacgcaataagcatccgtagctcctttaccgtctctagttttcatttggagaagtccttgagcactcaaaatgcccacttcgagaatcccaattggttgcttccatagctgccgagctgttggtctaacatcacttatgtacattgttgactcgtctagcacatggtaagctccttctaggcaaactctgagatgaagtctacttgagaatttaagctcatgcctcttatctgcttcaattactccaaagccaaacctttcgaggttgaaccaacgagaatggactggccggtgatctagtcttcgctcgaagctgtctagagttatagtagtttgtcccattacttcgtctttagcagaggtgactttgttttctactgtgagtaccaagtgttcttcaaatggctcagctgcaacaaagagcaaatcttcattccacattgggttggttgttctggtttggcataactttgtcttcagtatttggtttcccacttgagctttaacaaatgcttggggtggctgacttctgtctcttggctcaacatcctgagcctcaatgatgttgactcttaggtaccatagttttggtgagacataaacttttgatcggatgttgtaaactccttcaccgtgaactgaggctgcgtctgagtgccatgactcaggaaaagcttcatcagcctgtgtgcccatccatactgctaacatcacctcccctctaactttgatctctctatggcggtgctctagtctgtaccactgaggagccaaagggctgtctggtgggactctggtgggtacttcatgcatgtcaaagaccaccttccctatgtaatcatctctagccaccatttctttgtctcgaacataaacttctacagcagaggattgaattttctctttcgagaaagcaaaaacttggttccataaagggtttgttttcttctcaaagtgtcttgttttgcccttgtagtttccaaccttgacctcaacgtagggatcacagtttcctgttacagggtttgtgggaagatctttggctttcaccactcgaacatagagatagtacatctgctctacgagatcatacgtgctagtagctctctcgctgcttatccacccgcctcctccacgcactcctccatgaggccatcgttccccaagttgtggcttcgtgtcctttagcttatagtcctcagcatgacttgcagcagcttgtgaactcattttcccaaggaagaaaaagctttccttctcaatgagttagctactggaaaagcaatgagggttcaagcttagaagaacactattacttgatgagagaaaaacaaatttagtggtaatgttagtagaggaaatatgaaagaagaagcgagtacatatatttgattcccctcagtacacaacaaaagcttactttacttgtagaaactgttgtttatcttcactttcattgagctttttttgcttttgttatataatctttatagtgatttcgaggaactttggacctttgaggttggaaaaagggaaatgctagagttgagtacacagactattatgaagggtctggtttccaatgctaaacctttacagccaaagttaaaggatgcttctcttttttcatttgaggttgcactgtaagcttctccttttaccactttcactacaagcttcatattaccttttcagtcggtttatcattaaccaaagatatcaatatgttttggcaatattacaacccatattatattaccataataaacaagaaatgttgtttataatgtgtagaagattagtggtggaaaaaggaatctgctttaattaaaaaaaaatgcattagtttgtttaggctttgacaataatatagagcacaaagtataaagaacacaagggtgtgtagttgtcgaaattccacaattctgtaaaaagaactatattgatgcctgcccccccacttgaaaagacaaagagagtcttttgagacttaaaaaaacactctggtttactttcatagattctttttgcttttgcatttgtgttaatttgtttataatgtatttgtaagaatgtagtgcccattttgccccttcctatgccttcctagttttgaagagtgaagaagtcattcagtgcattctggtaattttcttttttgaacaccattaattttgttatgagtatggccaagcagagttataagaatagtaaaggatatatcttaagagctataaaagcattgtagtgagcttaaaagaaacgcaaaagtgttttagaaaagttttaagggtaggtgaccttgctcataaaaatgcctttgtcctttattctcctcctttattccctcttggatatgaatttttttccttttctttatgtgaatgttactttcttttttccataaaaacttcacaaatttcatccttttaagtgtttgaaaatttgttggtacaaaaaacagacatagtcgagcacaagacaaatcttagcaataatagcttcttaagtttaaatgagttagacacactcatttctttagagagatatatgtatttatacatttaacaagaaagaaaagaaaaaaattaataaatacatgacttttccttcctgtttaccaggttccatgttttgttctgttgagtaaagaaatggtgtaggttatctttttggcttcactatatgaagatagtgcttaaagttagaaagatacagtatgactaaattatattattgggttaatggtgagtgctctcattatttgtttttgggcatttaataaaaattagttccaacatgctcaaatgtcagatcagaccagttggtgtaatcatgaacatcataattggcccccatttacttcatttttgtcataaaataacatcataaacatatgattggctaatcaagaaatggtctgagactctgaaacgctgacaagctgtttgtcaaaaacttcattgctttttttatgctttcttcatgctattatgtactttcatgtatataattgtgaacttacatttcatcatgtctcttcattgaatacccttaaaaaatttctggtttttttttgttaatgcttaaatagaagatgtattttcaagtactttctcctcgtgcttattagttcaaggtagtttttttttcttttaaattttttatttaagcgtttatatatttctaacacatgcctcatgccatttgagttagcctcaagtgatttagttcaagtagtttcaatgtgttggtttcattgctttagacaaggctgtattttattttttatttttttttttttgctgaaagatacaaagttgtatatatttaggtttttcaaatgagttcatcacagtataacaactttttttttctcaagtttgcagtttttacattaaaaaacaatgttttaattatttgttgagtcagtacactttttgttttaaaactatccattatccaatgtaggaatttattactatcacttagtacccattttaacgaagtttgataagtatcagagagcattattgcacaagtatctgatgttttaagtatcagttgatttggtacgtactcagttttactttttttctttttacagcaaatgtaaccaatatatttttgagaaatttgcggtaaaatttccttatgttttaatttttctacttttaacccttttatttatttttactttttttggcaaaagccccttaagtttatttttcttgtgcagattagattagattgaaaaatttaaaattcgtacttgtgctgattggatgttgat

SEQ ID NO: 225159 - DNA, 5563 bp, Cannabis indica
tatacaaaagattcacataaatgaattaattcttcttatttcataacgagcccattattatttaataatctataaatatttaaaattgttgttttttttgcagactgttgttgggctatagcagcagcaaattctgtatcatgctgttacaacttgttgcagccacagccacaacaacaaacgatactatcctgccaacaactcatagatttcagttggccgactgccaaaatcaaaagcgggcaccaggcttcgatagctctgcactacatacaagaacacgggatcacaacggaacaagaatatccgttcgtaggaatcaaggagaacatgatcgacagtctacaagcaccacaggtaggtgctatactttacagttattttaatttattttacttaattgtaagtctaatatgttttctttttatatttttttcagtttcaggacttgttttacattgatggatatgagcgggtgaaaagtgagaaacggatgagcgagcttcttagatttcatccgctcatcattgcagggaaattcgaatccaactttggggagaaaatgggcgattggagtatatacatgccatcgaatgaaaaaagatggagtttagaaaagaatgactgggaatacattgctagaaggcatggaatgttgctagtaggagaaggaacggagactataaccatatattaccccaaaaagggcaatcgcaagacaaaaccggagaaaaaagaaatccattactggattgtacagaatagctggggtactgaatggggtttacaaggattcgggagaattttgaaggatgaaaatagattgaagcttagtgcctggtctcctatcttataggtacatactagtgattggcttgtgtgcatccttagttgctaactaaatgtttgttctgttccttttcatagttgctaactaaaaattgtacattttgcttttgcttgcaattgtgctatacactcacatagcaaacataaacaatgggatgtggggtttggctcagtatttgaattcatataaacattcagttcaggccataaataaaagtagtaatactctcacaacacatactcgttagttaatgtacaaaaacaatctatatagagccaaatttgctcataaaatagagcaatatgaaaatacacagtctgaaaacagaactaatattaataataatatcagtacacaaagaacaaaaaaagaatatatcctaatttgaatcaaacataatgaactcagatgggcatggaacaaaacaagaatcaaacttaattatgatcaaagttgaacagtagataaaaaaacacaagagttaaatcccaatttcaaacaaaagttaccattggtgatcaattgaacaaagcagcgtagacacacatatgtgtacagacctctgcacatggttttcttttcttgcacctccatttgtcagtctctggtaacccatggagttcgtcggagaagaagatgatttcgagctgccgctgactgaatgcgaaggggtcgagtgcgatgaagacagacagatgaaaagagaaatgtacctctgttgggctcgggcaccactaaattagttgggcctgacttattgggcctatggcccataattgtaacttggatgaggcctgattggcttccactatctcaaccaactccatcatatggatcagcggcccaacattctcagagcagcttggatctcatttttcaggggataagttgataaatagaagaggttatttcacaaatacacaaaaacaacaaaaaaaattacaaaaatacggttttacggaatttaaatatttttacgatttttttgattttatttacataaaatacgatctttgatctttttatgagtactcttgttgattttttgttaattgcatgttatttttgttgttgttttgatgttatttagatgttattttcacattattttatgtagttttcttgttattttcgtgttatttctatagaaaactgtagagggcaaaacctacaatgatcggaatggaaggatcgcgggcaccgacaacctgtagaacaaaggaaaaatgaccgttgagaccttgggacaccgggatggtgccagccgaagggactctgacgattaagtcagtaaagaattcaaataaagaataatcgaatataaataaagaagatagaaaacatatatttccactgtagagcgatggagaaggactagtactaataatagtaatgtattttgtaaatgtttgaataagtgttcagtgagtgaagatgagatgatcctttaggactcctgggttctccatttatagagcctttaacggttggattctcctattctgaagaacgaacgtgggaagtggtcttccctttttccaggataaaagatcgattcttctacttcggttatatgagttacactattaaaaaaaaaagtcaaactcaaaatgtaagcaaaataaatattcccaactaattttataagttactaaaaaaattattttgtaatttaataattaaaagtaactaaattgtattttacatacacttattatgtttaataattttgataaatttttaaaataacttttaaatttcttttatatttagttaacaaaataaatatcaatgatttgagtttaaatttgtagaaagaaaaaattgttctcaaagtgaataaagcaaggaataaaaatataatacttaaagagaaaattaataaaataataagagggaaattggttttttagagttcggaattttttagtaattttacaaaattaatggatatgtaataaatatcttaagctagaatgcacgaggtttggggaacccgacgtgcattcagacacctccgacttgcttgtgaaacaacaattgccccatgttttgtttcttatggaaacgaaactttctgttgattccatttcccgtcttcaacagtcattacatttcagcaatggtcttgaatcacctcgcattagttttagcatgatagtgtggatgttactcttcttaattatggacataacttctttgattgttttatgaaggctgatggtgaagcaagcttccatttcattgccttttacggagctccaaatgtccgaaacagagcagattgttggacacttttaaaacaatttgcggatgtttctcctcttcaaccatggttagtgactggggactttaatgaaatactttctaataacaataaatctcatggatgccttcgaaatgagcaacaaatggaaggttttaggaagactcttgaccattgctcgcttcatgcaaccccttatgatggggacaatttcacttggattaaaatcgatcaagtgtggatacgattaaggaacgcttggattggtattttgtgaacaatttttgggttaatcactttgatatatccaacactcaccatcttgactactaccattctgatcatagagccattcttgccacttttgcactagtaagaattcagcaacagtagtataaaagacggagtcgattccagttcaaaaaaatctagttatccgatcttaaaagtactgaaatcattgccagcagttggaacacttctccacattcagaccccatcaacttggtcctacaaaatttgaccacatgtgcattgaatctacaaagatggcatgttggaaaatatgggcaaatgaagaaaaaaaattgcaaaaaactcaatcaaaagtggaagctttgacaatctctcttctcaaactgatgatatgatgaatacattgaagcaatctgaatcaaaactggatgatctattggaacaagaagatgtctattggcagcatcgatcacgtattaattggctgaactcaggagatcgaaacacaaaaaattttcatgctaaagcttcagcaagaaaatcaaacaacagaataaagtttctttacaatgaagtaggggtgcaggttacttcaaaagtagacatagcagcgacgatagaagactattttgctgccatcttcacagcctcggccattgacgaagatgccctttctgctactttgaatgccattccttccatggttacaccatcaatgaattccaatcttactcaaccatttactacaactgaaattcaacatgctttgcattcgatggctcctgacaaaagcccaggaatagatggaatgtccacgatgttttaccaacaaaattggcctattgtgagggatctggtcactaaggcaattttgagtgttttgaatgagggtgttgatccaacttatttaaataagacacttatcactctaattctgaagattaaaaagcctcagggactccaagactactttccaatcagtctatgtaatgtcatttccaagctaatcaccaaggtcctgtcaatcgatttaaagaagttctcccaatagttatctcagacacacaaagtagcttcttgccaaattcttgccaaatcgtttgatcactgacaatgtctctttgcctttaagttgatcaatgccatcaaaaacaaaacagcatgccgaaaaagaattgcttctttaaagttagatatgagcaaagctttcgatcgcgttgaatggcatttcattgaaaaagtcatgcaaaaaatgggtttcgatgatagatggatatctcttattatgggttgcttgactacgaacagtttctcatttctcttgaatggagaggtcacgacctcactaattccaactagaggtcttcgacagggttgcccattatctccatacttatttcttatttactctgaaggattatcaagaatgttgcagctagaacagaataatggtcatctgagtgggttcaaacttactagacatgctccaccgatttcccatctattttttgttgatgatagtcttctattctatcaagaaaatgagagttcttatcttgcaattaagaaagtcttggatatctaccatcggcttcaggtcaagtccgttatgtcattttcgcctaacaccacgctagccgctcaagttttctttcacagacaattgcaaatgcccatatgtgagtgtcatgagaagtatctcagtttaccttcatactttgggatggataaaaagaaacttttcagcgatattaaagagaaaatatggagactaatgcacacttggagtgaaaaaaaatgtctcggctggtggatgtgaagtgctactcaaagcggttgtccaatcaattttaacctatgccatgagttgctttctcttgccaatttattttgtaatcaacttgagtcaatgatgtctaacttctggcggggcctcaatgagaatggaacaaaaatatattggcgttcatggaatttattgtgcaagagaaaggatagcaaaggtatggggtttcgcttgtttgaacactttaattaagcgctactcacaaaacaagcttggagaattcttactcaacctgattctcttcttgccaagcttctaaaatatcgatatttttcccatggctccttcctcgaggctaatcttaggcactctccttcattaatgtggcaaggcatccattggggta

SEQ ID NO: 225160 - DNA, 2956 bp, Cannabis indica
aaaaaaaaaaaaaaacttggtttgcagttcctaattttagctttatatatacctaattaaagaccaaaaaaaaaatattagtacatgacaagacacaacaatgcttatagcaaacccactatactatggaaaaatcataaactagtaagaataatctatcctattgtatgtgaaagacttcatattaaaagttaccaacaacagcacaataacaatatgcatttcccttttattttgcttcattggaatttggattgctccaaaagcacgtcacataattgtactatttgtggaccaaattgttgggacacctgtgaacctgccaactaagaatttttgtggggaaagtgaccaaaacatttctgaaacatagggccgtttagtcccactattgttcaaatttggattaatatcagcctcatcaaaattataatggtaacagatattagatgataagtttttaacataaactccataattatggggtatttcctcaaaaaaaaaaaagaaaaagaaaaaaagaagctccataagggtataattgtaactttcttgtagttcaatgggggaggtagtactgtgactttgccaaagctgcatatttgtgtacaaagaaacttatggacttttttaaggcttgagagttgaaggtgggcctatcttttttatttatctcaaaaaggagattccatttgagttttctacgccaaattcttcttcaattccaggtagacaaaagaaaatttggtggtctacaaaacaaaaataaaataataactgaaatattttggcctcggctgtaatatttatacttctttaagtttttaatacaatatacagattttaatacttttttttagcatttgctaataaaattgttttaaacagcttacaaaatacttcttttgtcaaattaaacaaactataatttttgtatttaattcatttgtggtctaagtataactttatagtgggcatataacttttttcttattcaattttatataacattctataaataatagtttagtaatatttaaatttaataaataatggtttaataatattaaatattaattatataacacaaaaataaatttttggtagtaaggggtagaaatttggtagagtaaaaataatattaaaaaaaatttgtaagccatgtcattttcaccactacgatttattattggtagaatctccaccattatctactaataagtaaataaaaataaaaataaaacaatgattaaagaaactgatggaaaaagaagaataaaaagacaaaggagattaataataatttcatatgcaagattatattagtagttaaaacagtgaacaaaaaaattgatggagaaaaatgtaaaagaacaaggaaataagattagtataattatttattttttttttaaaaaaaaaagatagtgcacagaagactaaaaaaaagcagaaaaaatcactaaaaaaagtggagaaattgatgaaaaaaaaaatgaagaaaagattaatataaaaatagaaatgaaaaaatgaattagtacatagaaaatacaaatttaagctgtagacaatatttatacattttaagtgcttttaattatcaaaatacctcttacactatcacttatacaatcagacgatagttgctaggtggttggccgaaggttgcattgtttcaattagacgaaggttgctaggtggttggccgaatgttgcatcagacgaaagtttcaatcagacgaaggttgcttggtggttcctgagtggttggccgaaggttgcatcaaacgaaagtttcaatcagacgaaattactattagcaaaatgtttgtgcaactttaatacagcttttatgaaatattaaaaatcataacagtgtttcaacctacgtaactctatctacatgtctcttcaagatttaatatgaacaaatttactattagaaatttggaaaacaacgaaaatacaccaagataaatattttactatagtattgatgtaatttttttagattatacttgagtttgattgtttgggaactccacttcaactttttcagatatgcatttcatggatctgaaaattgaagtcaagacattagttttatgcaaattaaacttgatttttggttgaattttaatgttttgattgattatggtcgtcttctcaggtgaagtcgccggaatcaatgttggttctctttcaagttgaatttttgttttggttgtattgggttgctgcgtggttgcgcaatggttgtccgagaagcatggatcctgggttgaaggtgtgtgtaagtggtatttgtgtaattttttttatttgggctgtatatttgtttatttggccacctagaagtatttttctaatgttgttactttttttggttaaaactgaaagatcccatgaaaaaaataagatgcacaaaagactaaaaacaatagaataggttattattattattcattattcagaaaagagagagattcttaatgttatatccgaaattcggctacacttgagagggtgacatgtctcaattaagtggcatgtgaaccacttaatataataatgttgtatcatttaatgtaaaaaaggaataactcactaaatatagaattaatagagtatattcataatatgttgactgtgtagtcttaggtgagataagaataccaaactattaatgcctatatcgacgagacaccatcctacctcagaatacacagatccagggacaagattcacttatctcaaataataagtgaagttactcgaaatatccacggatagtatatagtgagacaaatacgtcgctatacataagaaactattgacgagacagatcagttgatatacacttagcatattttataccttacaataactaagtgtaacaacttgggagtatgcgggacatgattgtccagttgttggaatttattttatcagg

SEQ ID NO: 225161 - DNA, 6706 bp, Cannabis indica
aataaactactttttaggagtgctacagaagtatacatataatattttgtagaatatcttaaataactataataatagaatagacaatttaataaaaaataattaaaactaaaaaattatctcagatttacgaaataaaagtttttttttttaataaactacttttaagagtgctgcagaagtatcatataatattttataaatttttaaaaaattggtaaattttgatagtgcccaaatcataattcaaatagtacatttggtacattgttttacaaaggagtgtgtgtttgtgtgttaaggtagggaagccacgttgagaggtgcactaacacaaacaaaccccttatccataaaataagctactttttgaaaaagtgattggtttattgtgtgtggtggtccaattccaaacaaacaaacaagcatttccaaatcaaatcatatcaaaacaaataataccccacttcctttttatcctctattctttctttttagtttttcaaatttttgaaatatccaaatttcaaaggcaaataacttatatagtatagtgacaatgtaaacaacttacaaacaaaccacaagacatttcttgaagcttctttttaggccttattctctcctttgccattaatttctcaatgtggatggatggctactatgccaagatttgacaagtcatttgtttgtttttgtaaacaaaaggttgaaactttcaaattacattagtaaaatatctatactcattcaaaggattattgttgattgcataacaaaaactcacaatttagtgtttttttttttttttaattttaaaaaagaccctcttcgtatcactatttgtatatagttattctgtatttcgaattgagtatagttcaaaaaagttgttaaaatttgtgtgcttgtttaattattgaaatgtcattattacattctttaattttcataattgataattacaccatattattatttttaataattagttattaatgtaatttaaattactaattttgttgttgaacataaaataataattatttaattactaatttttgtaatttataagatatttttgggtttccacccattttcccttctgtcaataatatttatttttcactcaatttcactttgtcaataattatgtgtcacttatagtcgtttagtataaattcacaatcaataaattactttaaaaatagaatattttgaaaagttagtttaccattaaaacttatatagcctaaaacctttttttagtaaatgtcctaaggggcactctaaagctttttttttttttagactttgtcattttctttggaaaacaatgttattttcatccccatgaaaaataaacaactaaatgtgggaggttgtatatattttatgtctaattttatgttactagtttaaggcaaaataaaccctaatagagctcatctctttttagtataattagaatgcctaaaaatatatatctcaatatgtttataataaaatcttgtgaatgaggataattatctcttggacatggatttcacctaccaaatctttctttttaaaaaaagccaaatctttgacactaactaactatagcaactttgtagccctaaacagtacatattttggagaaaatagcttaaatctccctatttttgttgaaagttttaaactttatcttcacattcacaccatttaaattttgtccacacccccacaattttttgaaattataatgtgattttagaacatactaacttttacaattatgatgctaattcaattaattagttgataaagttagtgttttatctactaaatagaatgatgtattattattttgaacaacctaatttaaaaccacacaattacacattaaaagaaatagttagagcattcatatcagcttttttacttaattttttttaaatacttcatccaaattctacttttttttttaattatatcaatttctttattttttaaatgaattgtgtttctctatataaaaagaatcactataactttttctaaaatatacaaaatttcatcattacaaatatttatgataaatttaccaaactaattatgtaaaatattaaaatttacaaactaatctcacttaatttacttcatttgtatgtcactttgactaatgcaccattattttaaacactatcaaagtctacatatagctgtacacatgtcccatggagtatggtttttccaacaacaaacaacacataatttcaactctatatataatgcactctcaccaaactttatgaaaataaaataaaaaaatagaatacaattattgttatgtatttataatatatcttctacatgagaagagatgaagaactaaagctttttacaatcacaaaaacagaatgtgagtgagtttttttccctccacaaacatgaaagagcaaaccaacaaaaaacaaaacatcatttgctttgctcttcttaaatattaccaaataataataataaatagaaaaaaaaactactaaggccttgccttggatccaaaaaaataaatccaaaggcctaaaaaaaccataaacaacttcttggggttgggacattattcaagtacagttgatttctttggctgtcaaaattttttgacatatctaaaatggatggttggtggataataatacatgatggtaatgaaaaaaagtataaaccaaactgtacatcatcatctcccggggacggcgaaaaattagtgcatcatctcccggcggtggcaccagccaatgttgttgttttctcctcagcaatagaatcttgagcaaggattgatgttcttggaagaacatgttctttgctcgaagatgatgaggttgcttcttctgttacaacaactaggtgtttttcggtatgaattggtgtgtagttgaatgaaagatctttgttagcagcaagagctaagagctctttctcttctagcccttttactggcccgatgctgcatcgatcggtggtgtgttttgctaatgcatctttgaatttcttgatctgttatacacaataaccaattgccatattagatgatatagctcttggaaaatttaagacatttttctaaatagagatcaatcaaaaaactaacataaaagagcaatactaactcaaatcaaatatgtatttatcagactcttcaacattcagaatttcaaacatatattgtgatgataattctcttgaaccaatcacattttcatttcagaatcacaaaccaatcagatcaattgagacaattgagagactaagctaacacaaaaagcaatactatgaaaactcaacaaatcaaaatattcaatacagttatgaaaaatattcaaacaaacaagatgggattaagagactaacagtggcattagtacaactaaagctgcataaacggccatgagctcctctgtaaaacctaaagtaagggtaaaacatgaacattaagactataacacatggatttgtgttcttcataattgatctgaagaaattgaacatctgggttcatctcagccatttgacatatctgttatcacacatacacaaaaatcaaacaatagtaagaaaaagatcaaagattccatttttataaaaaatagtcaaaaacaaatttattgttaccaccttgggatgaagagctctgcaaccaccacaaccaggagaaaagaaatcaacaataacaagcttatccccagcttttgaaagggattcaaccaagtcttcagcagattcaacctccttcatgtttggctgaacccctttctcccaccatttctgagctttcccaattctaagagtctgtaaaaacatgtcaatcaaagattatgattattataaaattaaaattgaaaattgaataaattaataccagaaaatcaaaattaagaactaacctgggcttttatagttaatgattgggactgaaaagttgttcctcttctgggaaaggttgcacttttctgaagagaaattctttttccatgaaaatcactggttgaattgagtttcagagaacaaaaagttgctaatttcttctcatgatgatggtggtggtggtggtgattctgatgccatgatgaaaccagatttgttttgctcagaacctcagccatggaaaaaataaaaattgaatctttcaccaaatttcaagctaaacaaacaaaatccctcaaacccagaaattgaaaatgaagaaaaagttttcttgttaagagagaaaagtggttctcaatttgcttttagctaaaaagcttcgtcattcagaagaaaaatggattagggaagaagaaaacagaatatatacaatacaatataatgtaggggtaatttcgtaatttcgtcattaagatgttgatgttgaacattttgggccgttggattaaaaagttattaattaatgggtttaaatcaaacggtgataaaattgtcaaattttgtggttttggacttgacctcttttttattttatctaaaaattattatttattttattttatccacaatcagatttgggaggaccattttatacggttggatagtaatacaggtgtaattattgacacgtggcactatgttggagttttatttgttttttgaggtgagaaaaatagttactttttttattaaaaaaataaaaagaaaataaataattttttttggaaagaacaagtcaatctatcccacattttaattttatagacaatatgttatccacaagtttttcactaaactctctacatctaaaattataataatagtaaatatataattaaaaaaatgtagatataataataaaccaaatagaaaatataacatttttatgataattatatattattggtatttttaaaaaaatatatattttctaaaaacaaaaattttcaaatattaagtttatattttgaattagtttctaaaaaactctaatagggatttacatccaacaaatgttactgatcagaataaaaatatgttgacgtggaataattttgacggttattaaaaagttactagttaaataaatttgaattcaacggtaatcggaatcttacaaaggcaaatttttaagttaagataatatttttttataaatatttcactacactatctccacctaaaattataaaattactagtaagtaaatcaaatagaataattatatacatttcaacattattagatgtctaacactacatcgatgtgggatgtaaatttttaatttgataactataggtcaaaatagtagtgaagtccccacaaaattaaataaatctagtaaaagtaattataatgtaaatataaacatttttttataataaataagtcatcgcaaagtaacagttctaaatttatcactgctgaaagtacaatttttttttttatgttaggtctcaaggtacaaatttaactcatctatattggtgaaatacttctaatcagaaatttttttccctgaatttggacatgcatcaaattatatccccgaactttctatatcgttaaaaattctttttaaatttttgaggttgtttgatttaagaatttatctcaaattctattcaattttactaaagtaatgaggatatttgttcatgcacgaaatccgtatacccccgaactttaacatctactaaattgctactcccaaactttgacatgtactcgttcaaaaaaaaaaaaactttgacatgtactaaattatctcacttgaactgtaatcgacataagtgactttcattagtaaaattgaacaaaaatttttaaatctaacaatcttaatagtttggggtaaacttttaacggtctgaaaaattcaaaaaatataatttgatacatattaaagttccagagaaacaaaaaatcattagtcttccttttctgttgttcacaaatccttttttaggttcttgaatgtggtgttcaataattgtttggactgcatttatttacaattcaataattttttcttgtaacaacaagtgagaaacttgattgtaagaaagaagtgcctccataattattagaaattagtaaagattatgttatattgcatattggtcttttagaagttgtttgtgattttgttgggtccatagggtcacaaaataatattgcctcattttgctaatgcaatagaatattccaacattgatcaaagaagattcggttacctatcacttcctaattagatattttggtcaaaataataataataataataataataatatttagaatttttctcccctaaattatcatatatattattatatttttagatttttcaactcattaaaaactccaaactattcacttatgttaaattttatcacacgtaagagtaataagtaaaatgatgatacaaatttatactattatcacatcattaccacatgtgtaatataaaaattaaaagaaacaacataaaattatggataaatactattttggatcctgtgttttgcaaaaattaccgattggaccctgtattttgttaaatgataaaatggaccctatatttttcaaaatagtaaaaatagaaccctgaacttaatttttgacaactttttttttaatataatcaacttaaaaacaatttctaatacgaacagatacaaaaaatataaatatttttgtcataacacttttaaatcggattataattaaattt

SEQ ID NO: 225162 - DNA, 2099 bp, Cannabis indica
gctatacaataattctttatagtacattaatataattaagagtatatagtattttggaaaaattattaattagatttttcattttgttaaataataatttaaatttatatttttcaaaaaataacatataataatatttttgtaggaaaattttagcaaaaatagaatataataatagagtttttggcggtcaaatcatttcaaactatcatttaacttgcatttaatcctctaagctcaaattttagtagtaaattttttgaactactaaaccgttagcaaatttaagatatcatcgatttaccaaacaattaattactaacatgaaggactatgtgtacactcttgtatacgtgatcacatacttatttatattggtacacatattataattattttaaaattaaaataaattattttttctttgatacattcttttcttttcacttctttgtcaatcacaactcttatttgttatttttttatgctaaagtcaattatatttatatttttttattacataacaagacgcaatatttcataatcgtggttagtttagtcatttttaagtttttccctgttgatgtgtcattaacaatttttaacaactctctttatagggttagttagttgctattctgactgtcccattactataaattagactttgtaaacatattttattcttatgattgagattagaaatccaagtgtaagagcgagatgaatacaatgtgttttgaggcttgtaagggatcaagtgtgtatgatcttgatccctcagagtgagtttttgtgtaatttcagattagcaactcttcttgttcagtcctctcatgtactagtttcaatcatcaaataagagtctctttgctgttaatgtcgattgcaattcaattctagttttgcatttaatttgtatttgttctcatcacaatttagattacaaactgttttttttattgtcctctaaatccgtaatttgtttggtgttatgtttcctagatcttgttcttgagagtaattacattcactacaagtgatatcaaagccaagggatattaaaaaaaaatcaagaacttgttctttaaagatcaagaaacacgacaatgtcatctgaacgatgcgaggtggacaagttcattggagaaaataattttgatttgtggagaatcaaaatgaaagctctttttgttcatgaaggaatctctgaagctttgagtgtagctaaattgaacaacatataagatgaaaagacaaagaaagatacaaagagcaaagcatatagtgcaattcttttgagccttggtgatgaagttttgagagaagtctctcatgaagaaactattgctacactgtgggacaaattggcctcgatctaccttaagaaatctttagcaaacaagctatatctaaggaaaaagttagactgactctgaatagatgagatagaggagatgaggaagcacttggacgatttcaatagaattatcctagaaatgtccaacattggagtgaaaattgatgaggaagatcaaagtataattcttgtcatttctctccttaaatcttatgagcattttgttaacaatatactgtatggaaaggatacactaattaaccatggcagaagtgaaaactgctctcaactctaaagaaactcaaaagaagtcggaagagaagggtgagactagtggagaaggtttgatggttcaaggaagaaatgacaagaaagattttaagaattccaagaattcttatggtcataagaacaaattgttgaaatttattttaccaggatcgtatcctttctgtcgcaaagtatcaccaagatctgagtctgaatgtccttctcttcaagttggattcttcacgattttccagactatgattgaggtaccacttgctgtgtgtgggcactactctatcactcaagggtatttcaaaatttggaagaagaaaagagagaataagagagtcggctatagagagaaagtggatggctcaattatctgaaaggtaatcttttgaattactaaataactcttattttggtgtgagccatcactttctatttataggcaaccactaggtttagg

SEQ ID NO: 225163 - DNA, 4567 bp, Cannabis indica
tataaaaaaatatatatatacaagtgtccattttaccaatcgcatatgctaactcgatctctcttatatattaaagttactcaaaatataaaaatatacatatatataataatatatttggattcaaggtgttaccccacaagttcccacatttatgtgattctctcttgttgatgatgatcatcatcatcatgatcaatcacacatataaatgtgtctttgccacgttccgagctcaatatatcacatgggttttattcactttttattaatgagaccatgacagagagaaataataaagaaaaagatttatatatatattgaaagagagagagaaagaggtgtgagctaaacggagccctaaagccatgcaacctttcacacgatgttaaggagaaatagaataaagaaaagcattatatttatagtataaaatgagtaggtgatcgatctatactatatatatatgggcttgtggaatactgtatattgtagagtatatataaatattgatgacctaagctatatagctatacaatatacagtagagggtttatgtataatgaataattacatgacatgaaagcattagattctcacattgtcggctgtgtgttctatatatatatatataaatatataaatgttttgtagtacatattagtttgtgcagagaaaagacaaaaaaatcatgttctgtggagattcttgcttttgctacgttgtttgatttgtcactttcatgtggggggttctgttagcaactgatatcctccttgggggcacatctgtcattttgtggtaccaactgttctcaaccaaaaaagtttcaccaaattgatataagctagagatatatgtcaggatcagcaatgatgatcaattaataaaatattatcttatatatattatttataaattcttattactgtgttaactagtgaaaatttgaaaggtatagctaggtagagatggatagaggggaccaataatgatcatcaatatggaaagattttttaatttttcatgtgtttattttattattttgaaaaattcatattttagatgttagtttatagaattataatcaacatacatgttagtaaatctagatcctagtaagacaagttctaacagatgagcaatgacttgcttctttaattgggtattaaatttgttggataaatctccatattaactgtcccataagaaaataccttaaacaagttacaagaaaaataaagtaagattttttacaagcctcaacagactattataactcttggagtagtcggttctgtttcataggcttaaatcttttagctctctacaatacaagaaaataaataacaatattcaagactccaacaaactttcaacaactcaaggaaaaacaaataacagtttgttataactgtttctcaactatttttttctcagctcaacacaacagcaacaatataaaagagagagcaacctatccatattttttagagtgaatttttccaacccagtacagaaaatgacagcagtcattttatggaggaataacctcagtttcaagagagaaaaatatagagagagttaaaaacatacattgtaaccaaacaaaaaaataagaattacctgctggtttgtggcatggaatctccataaccttgtaactcgattttgacattgatagtggagattcaagcaactattcgagggtcgcttgactgagacgtacctctgatatagagggaactccgaaatcaattcttgtgttcttcatttttatttttctgctgatttttttttattttttttctgtggtttcgggttgcttatttgtgtgtgcaaggtcggccatagaagggttgtaggaggaagaaaattgcagcagtggttcgggttttgaagagctcttacaaagcttgaagaggaagccaacaaagaggaagaaggaaggagaaatgggggactaagatgctgtttggagagttgaaggaggctagggttcagctgcaaggttttcagcaagaagaagagaagaagagagggagtggctgctagctagggttttcaaaggagaagaggttttgttggctactagggtttcagtcgaaaataagaggcttttaaagcctgcaaaacagttgtgttttggggaaagacactcttgatccgcacaagagggaaaggtcaagtttgaccttggttttttgtactttggggtgttggtgtaggggcattttgggcatgcttaatttcctacaaaattgattgattgtcacactaaatatttttggagatgtcgtatatgttgggagaaggaaaaaggtaaaagaaagtgtttgagatgatccggagtaagttcaaaacaagctccgtggttggaaggtgagcctcttctctcaagtggagcgcgaggtgcttcttaagaatgtgattcaagccatcccttgctacatcatgagtttttcgagttcctaaagaaacgattcaaagatattcactccatgatggctcaattttaatggggctccttgaccgcaaaaaaaaaaaacgattcattgggaattgagagcatttgtgcaaacccaaaatggctggcgggatggggtttcagggcctctctaagtttaatcaagctctccttattaaacaaaggtagaaaatcttgtcccatcctcaatcaatgcttgcctgggtcttaaaaaagtgttactttatcaactattctttcttggaggccaaagtggtggttactgctcctccatttggaggagtattttgtggggtcctgatcttattgtgaaaggggtatgttggagggttaaatttgggcgtagtgtgagcaaggacaagttatattagccatacaatgaatatgaattagagatgccttaataaattaaattggacaataaattagcaatattctctagcaaatatcctaattctttataaaaaaaaaaagtactcactaataatagtcggctcttcgatggttaattgaggaggctgaatcagttagcttggccaatgggccatacccacatcccaaccaacccaaattcagtctattatcttagttagttatttatttgacatcatatttgtaatgaattgatgcattgggtttatgtttagttgattggaaaacatttttgaggttttatttgtgctgtttttaagttttttctatgttgaggcaacctaataatgttgtttatttgttcgttaatgtggggttgttgttcttttttattttttgtttctttagttttctaaacaaaagaaaaggtatttatatatgtgtttagtttttgtagtattggttatattatttaataatataatatgtagattaaaatgtgataatatatattattatgtgaataatatactttaagtgtttgataaataaattatgtaatatatgatatattttacttaaaaattgtaacttgcactttgtacgtaacatggagttacaagatcaattgatttcgtaacttcttttggttgatcgcataataaaagagatattacataaaattgataataggattcaaaagttataaaatattattgttacaaaataaattaatactcatttatatgagagaaataaggtattgtgtgtgaatcctaagtgtgatgatcacctaaaatactatagaaatgagtctaatgtgttcatttgagtgactaatttttatcaacaaagtattttgttagaaaccctaaaaggcttgataatttctaaagttattttcatgagagttccctaagtgcttagagatatgggataaataagcttttggaagttttggacaaaagtataatacttaagtcattataattcttactaatttaaactcaaagttatgagtgggtatatatatttatatacatatcttcttcttcattatattacatgtgtgttgtatttcatctcttctacttttttatatataatatatatatatatatagtatatatgtattgtatatgtgttgtaatatttttgtaatcaatctcttattttagtctttgtattatttttacaattaaattgtaatttatcttgatttatcttccattgatatataaaatctgtaacagtaataattttgagttaataacatgatcgcaaatgagcatgggaatgtgaaatcttctgcatatcctaacggtcgttacaagatagttaccacctatcatatacggctctaatttcacttatttttccagttgttccactctatcgatcaatggtagtataagagatgacagagtattttttctctttccgtaactaagaattgaattagattactcgtcctactatccaatctatttccagactcaatcaatcgatactccattatatctaaatttatgctttattattattgagtatatttttggttaatgcaaggagttggagtaatgtatttgtgtgtacttgtaattgcctttttttttaatcgtattacaaatttacaattaattaatatcaaattgatttttggttatttttcagttaatttttggtcattattttagttaattttgg

SEQ ID NO: 225164 - DNA, 3091 bp, Cannabis indica
cccatgttttaattgttcttccatgttcatatgattaacaaagctctcatttttatttcttttttcttatcagaacttggatacacattaaagattgatgaaaaggttgacatatacagttatggagtggttctattagagcttctaaccggtaaacgaccgttagattcagagtttggcgaatcagtcgacatagctgaatggacaagaagaaagattagggacaacaaatctttagaagaggcattagatcctaatgtaggtaactgcaaacatgttcaagaagagatgcttttagtccttagaatagctcttctttgcactgccaagctcccaaaagatagaccctcaatgagagatgtcataacaatgcttggtgaggctaaaccaagaagaaagagcaatagcaacaacaatgacaaagacaaaaccatctataatttttcacctgtcaatggccttgttgtctaagaaaaaggaacataaaattgagtttctttttattcttaatttgtatgtagaattgttaattgtaatttgatttgtctacacatatttgagggtattttgttgttgtaccccttttgtattagaataacaaggaaattgctttgtaagtatggaaaagaaagaaaggctcaataaaattcttaatgggaattattgtagcctaattatgtattggcttgacttgacttgttctaaataatatcactttgtatatttctgtctttcttcttttaacatttttttttcaataaaagtgtctgaaacagtctagtcatggtgatgagagcctattagaaattcagattcaattgtctcttttggggaccctataatttactccatatttgactaagttttgggtaaagtcaaagttctaaaaatgaatgacaatgtcatttattatattatttgttttatagtaccaaggattagaatcctgtcttgtaacagcaatcaatggcattcttttgagaaattctaccttttaaaatgggtaactcatgcaaatttaaaagtataatttaaggtaattactattttaaccttatgtttaataaaaattactaattagaccatctattttgttaaatgataaaatatattttatattttttaaaatagtataaataagatcctaaattaatttaataataacccgatctaaaaatattatgataaaattagtaatatgttttttcatctattcgtgttaaaaattgtcttcaagttggttatattaaaaaatatatcgaaaattaaagtcaagagtcctacttgtaccattttaaaaaacacagtccattttatcatttaacaaaacaaataaagttcaatcagtaacttttaaaaaacacaagattcaaaataacatttactctataatttaagacatttgatgtcttaacgaattacaacataaaaaagagagattataatttcacagatatcaaaataggaaaagggtgttacgaagagagtgtgtatcaatacaaccatttttgggtgcaacctagaagcaccccattgttctttatctccattcagggtgtaaatgagaataacagtagtagtaaagcaagaaaagtactagtgtcaattgtcaaagcatgcaaaacttgatcccttgaaaggtattaagtaataatatcacttttttatgagtagtagtagtagagaggagaagctcatctggtgtgtgtgcagagaatacaaaatcaaatgtgcatatccccatatttacaacttacagaataaacaaacaaacaagcattcatcaaagtatgctaaagtgtttttagtatgacatctccaaaaaaaaaaaaaacaacttaatcattggcttttcaggccaaaacagataactctagtaagaatttaatataatgatatatatatagataataaacatgaaccaaaccagagcatagcagaaaaagccggaaagccgcaagaccaatcattacttgtccaaaatcttcacttctaaggtatcttttcatcttctccttcttattattataatatgatatgacttgaaagcatcatcttgagttgagatatgagtaaagtgtgtgttgtttgtttagaaaggttagcatctttgcctcccattcctttctctttcttgttctggtctaggagctcctgtaatagaactcaatagaattagtatattcaaatattggatagtttgcttcaagtaacaaagactacatcaaggtccgtttggtatactgtattacatcgtattgtattgttacaatactatataatctaatacagcgtaccaaaccgacccttgagtaggataaattatcaagtatgttgctaacaacataccgagtccatttgcttcagatgtcctcataattctgagcctcttcaccgagttgaagaacatcctgaatgtaaaatttagtaattaattaataaccaattctatcaaacaataaagaatgactagtataacatagaaaaggcatatagcattttttttctttttttagaaggaaagatacctgcgaattcgaacatataattcataacatagaaaagtgtacattaatcataattagattctttcttttctccttttgttattaagggatatcaaagaagcaagaattactaaaggtcattatatagaggtcagcatcaaaactagcacaatcttaagtttaaaggttctgcagcttctttttcggtttcttctacaccacttctacttgatggttagtgtttaacacatcacaatgacaagaaatttacccttttgcaatacttttcaacacagtttcatgtatatttatataagtgcaaataatcataatagtttagcatataacttaaggcttaaggtacccatgttttaatattacaatcatattgattattggatgttaaaagcatacccccaaggaacatctccaacaagcatccaatccccgtctttgtcttcgtatgtaagagcatactcggatgatgcatccaacagctttgaaagtccagctcctcctactcgtttatcgtggtccttcccacttgatcctaattcaagataacaccaccataagatcaaaaa

SEQ ID NO: 225165 - DNA, 5948 bp, Cannabis indica
gtaagtgcgactttctttttataaaaaagaaagtcttgctttggttttcttcacaagaaatctgatcaaacatattagaaaactcacacaagatcaaatatacacgctggatagatagaataaggatgagtcataaacttaccctttataccttattttctataaatagaaaaactagacaatattccttcaatatataaatcaatcaatacacaaaatatgaaaattaaataaacaactcagccgaaaaataaataaattataaaatatttttgtcaaattaaaaatgctaaaaatacaattaatagagtttttttcttttttgttgtaaataatattgaatatttcttttatttcttaaaataaaaaggtttttgttaggggtgttcatcctatccaatccgcactattttactgcatccgatccgcactaggtgcgaattttaatttttgatttagtccaatccgcataataacttaaattcaatccaatccaatccaatctgtaaaagtgtagattggatcagttactttgaattggttactttttaatatcaaattatttcatatttatttaaaaaaaaaatttttcttcacataactaacaacaaaataaaaaaaattattgttattttatgtctacaacaataaattaaaataaatgaaatagaaaaacaacaaattcaaaacaagaagaaaaaaatttttacgtataaaaaaaagtttaattttattttaaattatatttttcttataaataagaataaaatataaatttgatctattatgttttgaaatatatttttattgttttgcattaaattttctaaatgtattaaaatatatctaaatatatgtaaattagatttgatcgattacttttacatatcaattaatatctaatctgcacaagtacagatttagattttccaatctaatctaatttgcaaaagtacagatattgtattttatgacttagattagattattgaattggacattttatgaacaccttggttccccaataaaagaaaaaactccaaaaaatatataattgcatgagtaaaggtggattacttaagagagccaatcaaattgcaaagaaatattttaaaaaaaatgaaaatgaaaatatggttgagaacctaatcgtggccaacttccatggaaagagaatcaaaatcacaattagttttctgtttgaagtttcaaagaaagaaaacccacctactaacgctacaacattttcattccaaaatcccaaaacaatattcaatcaatggacgaggttatcacggccgctgatgcctcatcaagtttccgatccagtacttatcagcccaccaccatcccctcaaaccttcctctcctctctgctttccttgccttcgctcttgcccagtttctgaagctcttcactacctggtaacttagctctcccctttcctaattatggatgttttgatatggtttaaagcttcagattttttcattttctgcgtttctttgggttccaaacagataaaaacttaattttgcatgatgggtgttaaagtgcttctatgaagttctttgattaggcagttgtttgtttgaaacttgccccccattttaatttaatttttgtttagagctaaactgttctttgggtttcagatggattatttgtttgtgagaataggcaacttatggttttgtgttcttttgaggctaaaaggagtttttgtaatgcttatagaaatggcatacctgcacaatatatacaatttgtcgtaacaacatgttctagttagaagaagagattggtgtttttttctcccttcctttctctttattacttttgatactagtcctgaaccctacaatcttcaggaggcaggaatctctagcatattgctaggtaggtctttaaagtaatgatgggtttaatctcatggagctattgctctctgaccttaaatctcttggttatttgtaagtttttgtttgtcttttagtatattactcatagaagtgcaggtacaaggagaagagatgggattcgagaaggatgctcgggtctggaggaatgccatcgtcgcattcagctactgtgacatcacttgcagttacaattggtttacatgaaggaactggaggaccagcatttgccatcgctgtggttttggcatgtgttgtatgtaactcttaaccaggtcttgttcattcttttaagttagcatggtcattctgttcaatcattctgcatcaaattaggaagctatccagctgatatatgaatgtcttctatttctaatgtcagcatgtaagttggtggggttcagttattatcaaatatggtgctgtttattcaagattttaacaacgaaaatttttgatgcttgtatatatttgttagttcagtcaagcatctggtttttgttacacttgtttgtttcggtggttcaagggcaaacaatattaaatttaaaagctggatccctaagatgtgttcatgcacattccaccgatggatggatattttttagtttataagaaactttcatttaaccgaagaaggtagctcaaatgggtcaaacatgtggtcctctcccacaaagtctgtggttctagccctcctacattctacttagcaattgctatagtttttttatacctagaaattgtagggcatgcctgaatggttctggtataactttgtcatttgtattggaaatccttttctaatcatgatattgttttcataaataattactgtacacgaattcaattaaaaatagttggtttatttatttaatatttttattgcaggtaatgtatgatgcttctggtgtaagactccatgctggccagcaagccgaagtaagatctattcttttgtagatgctcatttcatttcaaaataactcaacggtttcttgaatcaagaattgaataatatttggtgcatgatagtgtttcctagttttccagctcactaattgttgttttgtttcgttagttcctttagctaaaatatgctctctatttcttgcggctattcttcttcttttcttagggttcgtgtgacatcttatttcttaacatttcatttttaagttgttggtttattcttaatagtattcaagagaataattcctgcaaattgttaatgtgaatgttaatgaaattgctgatatgttgcatattgcagttattaaaccagatagtatgcgagctacctccagaacatcctgtctctaatgttagacccttacgagattcactcggccatacacctctccaggttactttactattccccttctaccatgaaaacttgcattgctggtaaaaccattttactgggtctattaaaatgtttgatcttggtgttcattatcttgttagtaagtgaatcaaaaaaacttttcctgaaaatgaaacttctaccttatttttgtttgtatgtttggtaagtgacgatatagaaaatgctattgtcagtaatatcgttttgccaaacagaaagtcacatgtgttacaccttaacattattctaacaattaaaagtaattaggattataaatctgagttgtcaaactcttactggctgagattgaatgtgtttaagtgagttatgttgatagtcctaaagggtgagctaaagaaacagttaaggcttagttattatagctagtggggctgattgatcgtaagaaggaaaataaatttgtattatttatagtaaaatttactttgggagatattcaagtgtctcgaaatgtttggaaagatttgtaatacttcctttcatatcagcaagattcctagtttctaattccttcaatattggaatggaacgttagtgtataaacatgtttgcgtgaacagtacatacattgatacatgaatggagtctgatatgcgtatgaagtaatttgttggaacctcaatttcacttgtttatcttgttacatacatgggttaggattcaagtcagggtgtgtacgtatcatagctacatgtttgtgcgaatggggggcatcatattgaaacctttgtttcaatgaaaaaaaaaattgagatggtgttgaacgtcttatatagaaagttaattttggttgtaattggaatcttttgctgcaggttgttgcaggtgctattttgggatgtgtggtagctttgctcatgcaataggatagggctaccttctcatcttaccaacaatggataatactaccaatgaagaattgaaaaaagaaaatttgttctgaacaaaccaaactctgaaaaaagaagaaaaaataagtagaagttagtgttaatttctttgatgtacttggcgaagctcttataaattaatgtataaatgtttccccgtaatttgatatctttggattcaaggtcccaatagattttataaacaaactctttttttactaaaggccaaaatattgcactcttgcatttgcgagtgtaaatgtttatgattttaccaaatattaagaaaaaatgtatttatgtttttccatcacgaaccaacaactcttgtaggaacagtcaggaacaataaacaaatctaaaatagatgtaagttgtgaaagtcgttgacttgcaaataaactataaaaagacatttacttgtggaattttccgatcacttggcctgtagcactgaattattaataaatccagcccaactaaaagatgagacaactcaaaatatagtatgcctatcttttcacagcaggctccaaaaattcatctcctgaaggttcagcaagagatcatccgtgttcagataagccttattggaagattttgaaattgtgcgagcgatctctcccagcttcaatcttccttagggtgataaatgtcgggattgttcgcaatagttttgcccatcagttgtgtagcctcaccttgatgatcacatgaaaattgtatgcagaatgagagcctagccttttgttttccttcttacctgagctctgataatagcacttgtcttgtttagccttttcaacaacgaatttagcccactcagcttcttgtacaacaacttgtttggcctcaattgcatttgtaaattccctcccaaatgttacagcaatgattgacacattatccagagcgatgttgaaattggcagccttctcagtcaaaatcttccttatttccctactcacatcctacaaagtataaaaaatgaggcaatcaacagttaatggcaagtgaaattaactatctcatggatcttgttctgttctatagaaagtagagactcttttagctccatgttaagtgagaagacaaagcagggaccctttaataatggtatggttgcatatgagtgaataaaagggaaattgtttctacataagtgaggataaagtaacaatcgaaatttgtagacaacagagctttgaaatgatagtaataacaaagatatccccaagggataaaatttaactaaattgtaggaacatagggctttaaaatgttatcccaaggcataaactttaacttcaaaagcattactttcggtgttgttcgttaagaagaatgacgaatcacttcgtatgtgtatcgactaccggtaactaaacaagttgaaaattaaagataaataccctctacctaggatcgatgatgtcgatcagcttcaaggaaaaacaatcttctttaagattggtcttcgctcaggctatcatcagttgcgaatccgagaggaggacattctaaagattgccttttgcattaggtatggccactatgaattcctagttatgttttttcgactaaccaatgctccatcagcttttatagatatgatgaatagggaatttaaagattttcttgataattgtgttatattatttattgacgacatctttctgtactctcagtcaaatgggaatcatgaacaacatttacagatgattttacaaagattgcgggaacac

SEQ ID NO: 225166 - DNA, 2586 bp, Cannabis indica
ctctctctctctctctcctattctaacagctaataagctcaattccattttctttatggtccttttcacagtcaagacggtagtaccttttcatgcattctttccctcaatgtacgctttcggttatatttcgaaatatcaatattctatacgtacatgatcattattttgttttgaaaagccacgtacgtacctcctcccttactgctttttttttcttctttcattcattcatttaaattatgaacgcagtcctgataacattattactaagcctaacctttccttattgtaaatattcattacttaaaaacaaaaaagtaaaagtaatattgggaaattccattgtgatcgagcccaaatgtcaattggtagtttgcaaaatttggtaagaattaagatatgcgtccattacttttctatatagtacgtagaggtgtgtctcttggtgaaattggaaaatgcgaagaggtatttttattgattatgaaatgtattactatatattaataataagatgaagaatatatagcaattttgttaagaagcatgggttaaaaactcacacaactcattcttaaattttaaagctatatacatttatgtaaataaaataaattagaaaaggttcgttgaaaagatgcaacgtttggtttggtaaccattcaaataaaactatattgtaatatttggattgtgcctaaaatgaatcttcaatattgacttgtcgatgagtacgtaataaaacaagtcctataaagagtaatcaaaacatttataatctcaaaaaaaaaacaaatcatttataatctcttatactctattttatattattctattcttgcatattattagtatctataaatatcaagtagtgtatcagttgggagaaatagaaatgaaacaggggttcttgcttggtaatttttacactataatggtttatgcttccttaagtgcactacataataagcaattaattaatttttacattcattaatgctaattaaaaccgtgtgtgtgttgttacaccctgaattgatgacaccaaataacatcttcgtgaaaataattttgaaaacattgtttgaagcatccaaaatttataggtcgactaaaccacaattgatcagttaacaaaaacaataataatttttatgtattactttccaaaatgaattgctggttgaatgtaaatgggggaatggcacgcaaacttgcaaagccagctgtatggggtgtcatttaacaaaatcgtacaagttccccaaatgggttgattacctaccatcataaaaaggtaaaatggcatcacttgacactaaacaaaaatcatatgatcctttaatttaattattaaaaaatatttgaagaaaaacaaaaacaaaaccataagcatttctttttagttaattcgatctaccacaagttagtggtgaggaattttaattaacgctatataccagaggagagatatttcagcgaaaaaaaaaacatagaggagagataagtggatagagaagggtagagggggagagacttgaaaggaagaggtcttagaaaatgtcttaatttaacactattttaagtcacattttatggaatgattttattatgatatatttgtaattagtgaaatgccttttgaaatgtgttctccagcacgactacacaaaataattataatttatatgataaattagatatttttatcactttaattcgtaacacgacactaataattccatagatatttttttgagacttctaataattccatatatattgaattttatatacgacatgattgtgggtgtttatacgtcgtacaatctcaaaaattctaatttactgcgtaaagcttcttttacaatttcgaaatgaatctttttttctcttctagaatattctagaacactctagaaacgaatatggaagatcatgtcaccatctaaatatataatttgtgattaattgattttcttgttcttgtttttttttttttttttttccttttttctgaacactgtaattagttgctttatattctcaaacatttagcttaaattaacctattgattttttattatttttcgaatgataaacttaattgcttattctcaagtagcagtaacttgaaatttaatataatatcaaggtcacaattaaatgttctattcaaattgctacaaatagagagttcctctcttcattgttcaactcaccaaaaatatgaaattcactagttactagtctctctctttgaattttatcttttctgcctttgttagtagttgaagctaattataagttcaattccttcggtatcgaatagctttggatctattcttcaatctgatcttggtagtgatttgaggccttgtttaatgtgttgggtgtataacaaggatgggtttttttttttttgatattatctactattttacaaatttttatcaaggagaagtaagtatttgaactataataattttcattaatttaccttaaagttttactttttttttaactagggaattaagccgcgcttcgcgcggtgttgtcaaattttataattttttttaattg

SEQ ID NO: 225167 - DNA, 4109 bp, Cannabis indica
agtgtattcttggaagatcaaaaccttctctgcaatctccaacaatggcttcaggttagtgcttccgctcatattttatcatcttcttcttctttaatttagcaaaggctttatagatttatatgatttaaggttttctatattaaagcactttaggaatatgtttagatctatgatttatatatttctttaagtgttttataaccctaacaacactatgctatgttgttgcaaggtggaaacaatattattttatgtaaaaatgtaactataaaaatttatataaaaaatctgtaaaaatgtataaaaaatgtcgtattttgtgtagaaatcacaacatgatatttttcactcttgtacatgtctttatcaataaatgcacttttgttttttctaacatttggagaaattataattagattaacaaaaaaataaaactatatatactctcattttttatgctatgaagcatatacatattctcactgattatttgatttacattaattttgttataagttctcatatttctctatttggtttctactcaatactcatgatacatgatcaaggtactatacacatatatagggacaatatatttaaacaatattaaaatagatatacaaatacaatttatagtattatggaaaatcaaaatgaaattaaaattcaaagcttattattataattataaaccaatatgaccatccatattgttaaaagcaagagaaaccacagtgtgttgaaagaataaattattctctttacttatagggcaaacttcaccttgtgcctcattgaagccatcttcacaagtggaaggagcatccactgcagagctaatttcgacactagctttcttgaagtctttgattcgaatagcgcgtttcgcctctcgtaaaactgaaatagcgtcagagtagatattcaagcagtctttaagacaggcgttgccataagaagttttcaatacttttgacctcataaccttggaaatagtggaaacaactttggtagcattacatattgttaggtcaatagtggctaaggctagctcttcaatggttttagccttgttggatttaggattttcccctaagattttgatgcaaaaatcataggtggaatttggatcatcatttgtagcattcttgcatgattgtttgattaagtcagaacaaccaagaattgaattttgaagagatgagaaaataatgcatattgtgaaaagagaaaatgaaaagaagggaaataatcccattattgtgatgatcaatattttccctttttttttttttttttttttcttctttttgtgatgatcaatgaaattaatatgtaagagtatatatagggtctttttataatgttgtacactgtttttctttatggaaattttattagtcgacttctggtaattccaactaagttttattttaattatcttttatctttaatatatgcatataaatattctttattgttagagatgtttcattattgttaaaaccctataaatatagaagaaaaagaaaaacaaagtattgggtattgaaactttttgtacctgtaacttgtgatgtgtgattataaacctcataactttcaaaaataacaaaaaaaggtttattttcttgagaaattagttgtgcctgtaacttgtgatgtgtgattataaacttgccagatatatataaatattaaatatatatttatagaatttaggaatgttttattttagtgcaataatgaaatgaaatttcactagggtggttaatggttattgtgtgagtttgagttgttgtgagtagagttgaaagagttaaattaatattactatcattttaatttgaaaaataagattaattttaaaatacgaacttttttgctattaaaatttaatttactaaacatgagttaagtttgatattctctttatatttgctacaaatacaagtgaaatgaaataaatattaattgaaaattgtttgtatgctagagtaaaaatagaaaatcaacttttatttactttgtatgccaaaaataaaaggaatgaaattgttcattctacttcaatatttattatttcacactattactgaaaagtattcgtgacagtttttattggagacgtaggtggttagtcggttagttagtttatactgttcataactaactatttttctattagttagttagttatctttttactgttgcttttgtacagctggtttggatatcattgtaactaacctcttgtattaatccatctatataaataaagagatcaacaaggccaatcgattgattgagcttcacttttcattccatctgttttgcacttctttctatttccatctcacctttctctcagctcaagaactctggttttcagagttccttcctggtatcagagccatgtctgataatggcgatcaaccagcaagaagagccccaccagctaatgaaagaatggctcagcaaaatccactagtcgaaatacaacctgctcttcccaacaacaatcttttacccctaaatatcatattagatcggtcaaattacaccatctggagatcccttgctcttgctgctgttcgagcttatgacttagatcgattcatccttggcctaaatccaccaccaccgactcttcttgcaggtaatgttcttaatcccgctcatcaacaatggcttcgatttgaccagtttttaatgcactggctaatgaattcagtttctgaaaacatgcttggacatgttgtcaattgtcaaacctcggctgagatcaccttctcccaactattcgcactcgatctagagccagattactacaacttcgtaatctccttcagaccaccaagaaaagctcacaatccattggagaatacacactcaatatgaaacaatacgcagattccttgtcaactgctggacaacccctttctgatgacgatcttgttctgtatattcttggaggactcggatccgagtacgaagctgttgtggtgaatcttacctctcgaacaaagcctctcacccttcaagaagttcaatttatgcttcaaagccaagagatgcatatacaacaactcacctctgattcttttgtcaatattcaagccaatacaacttccacaaatttcaacaatggaggtagaggctcctataataatcgtggctttaaaggaccatacaaaggtggcaggggaaattacaacaataaaggaggcagaggaaatcagcccatacgtcaattatgtgggagagctgggcatgttgctattaaatgttatcacaggttcgatattgcttttactagccctccctaaaattcgaataccacatatcagccctccaccagtgaacccaaggcctatctcactgaaacgagtccatcctctaccacaccagatctcactaatgcctggtttcttgatactggtgccacgcaccacatgacaaacgatactcaaacctgtccacagcagttgattacaaggaaaaagctaaggttgttgtaggtaatggctcatctttatcaattcatcatataggtcatagtttagtctcaacaaaaaatcccttctaaacacttagtcttgcaagatattcttcatgtcccatctgttacaaaaaatttacttagcatatctcaattcaccaaagacaataatgtcattcttgaatttgatagtttgtgttgtctcattaaggacaagattaccggccaagcaggtcctcttcagggccatctcagtgaagacctatacaaacttgaagtgtcatctccaaagcaaaaagactcacctcaaactagtgatacttcactcaagtcaaatcccagggcttacaattttactacaacaagcaaccctgtccatgacccatctcagattgcttctacttggcattcaagacttggtcacccctctcaagctattttaaataaagtcttgtccattgttgttccaaaccagaaatgtaaacaactacttcctttttgtgatgcctgtcaattaggcaaattacaccatttttcctttaaaccttctatgaataatactacaatgccttttgaatgtgaaggctacaaatattactta

SEQ ID NO: 225168 - DNA, 3408 bp, Cannabis indica
gccctattatttacttaacataataaaaatgtattatgtaaccattactcatatgttataaaatatatttatttatgtaaccgtatgtggaaaattgatccaagttaggctcaaaatcttacataccatattcatataatatattaacaataatattttcaaagtctaagatagagacgtcacatatatccatccacattactaatgataataattataaataataaataaaaaatggagaaggatatttgagaaagagataagccatgcttatacattgaattgtgatttgtataataagaccatactagctaggcggccaataaaaaatcaagttgatttacaataataataataataatcaagttaattaattataacatctctatataaagacctgaaatataacatctaagtactcaatttggttacctataaacacatctctaatggctactactacaatgcttcttttgggtttattcatagttgcaattaatcttggcatttcaggtacaataattaatctctttatattcttgagcttcatatgtaccttaactcaagagggtcttatatatatatggtaatttgatgtgtatatatatttgtgtttatacaggtgcacaatcagtaggtgtttgttatggaatgatgggtaataatttaccatcaaaatcagaagttgtggctctgtacaaggcaaacaacataaacagaatgagactttatgatccaaatcatgaagctttaaatgctcttagaggctcaaacatagaggtaattcttggttttccaaactcagatcttcaaaagcttgcagacccttcacaagcaacatcatgggtccaacaaaatgtggtcaatttctggccaagtgtgagattcaagtacattgcagttggaaatgaagtgagtccaattagtggaaatacagcttggcttgctcagtttgttttaccagctttggtaaatgtgttcaatgcagttagatcagctggtctccaagaccaaattaaggtctccacagcaattgacacaacattaataggcaaatcttttccaccatctgaaggtgcttttagaggtgacattagaggttttattgagccaattgttggtcatttggtttgggctaaaacacctcttttggctaatatatatccttattttagccatagggataaccctggtgctatctcactccaatatgctcttttcacttctccaaatgtggttgtttgggacaaaggattgggatatcaaaacctctttgatgcaatattagatgcattgtactcttctcttgagggtgtttggggtggctcactagatgttgtggtgtccgaaagtggttggccctcggccggtggtttcgccacctcggatgacaacgcaaggacttacctctcaaatcttattaggcatgtcaagaaaggttcccctaagaggcctaacaagcctattgagacctatatttttgctatgtttaatgagaaccaaaaacaaccagagttggagaagcattttggggtttttttccctgataaaagaccaaaatacaacctcaattttggtggagaaagaatatgggatttctcagctgaacataatgctacactccctcttgtgagtgatatgtaagagtaatctttatctattaagaggtaaggtaagagagaagaatgtgttattgttcaataatagaatctacaatgcttgctttactcttcataggtaagcatagtatgtgagattttgagagtacaagatttaatgtcatcttatgtactttttatttctctgaagttatgaaggaaaaaaatggtttgtattttaccttacactaagtagtgtgattagaatatatagcactttctataatgtcatactgttattgatataattaagtattagttttacatagtttaatttaataactgtaatataatatcactaaacattcacaaagtgtcacctcatatgcttaataacaatactctattaaattatataaaaaataattttgttacgtaaaaaatgagacttgcttaactaaatcatgggttacgagtattttgcgattgccatgagaaagaaaaagatgttctagaaagctagatataataaaacgttaatattataaaaataacccctaattttctatctcacaaaaaaaaaaaaatctacaaaataataaaagaaaagtgaaattagtatcaaatatttaaaaatttatgatatttttattgtgccaaacaaaaataattagcgacttacgatatagtatacttgaccaataaatacacaatacaatcaagaacaacattaataactcttcataaaacgtgaacaattcccacattttatttgatttaatgcatgtgggataaatcgatttactactagaaatcgctagttatccttatctgaaacgattacttcaccgacatgatgtatttgttatgtgtctcacaaatcactttagataaaattttatgccgatttacctccatctatctcgcagtatacatgttctttttaatgactcatttcgtcttcgcatttttgcatttcttattaggatgcacttatcctgtatcgtctcgcattgtacggtgccaagacgacacatatgagatatatatttggacattcttctcgcattgatcatttatgatgacattttgaataattcttttatgagcttataagtatgctcttcaaattgtaccatttatgctcctcaggtcaaatttctttatactgccttgctcgaccaacaaagtctctgtcttatttttcttgtgctctgttattttcaagatggttgttattgatctcgatagtctactagtgagctattattatgacttatccttagtcagctaaggtaacacttgaatttataacagtgactaatattttttgaggcaatatacaacatatttaattctttaatattcaagctagttcattttccacctcttgtatacattgttgtaccatattgcttcctaaaatatgagcataacaagatatttgcaactatttacatagttcggtgaaatttttgcaactaaaaaaaaatcaagaagaaattttttacaaaagtcatagtttagaagataaaaatcatatttcaaaccaaaaaaaaaaaaaaaagataaaaatcatatttattcaagaaaaaaaaaaaatgatacataatattattaaagattactcatggtacccaatatcagatagggttaagttaaaattactactttattaatcaataatcaatttactctaatttatacttaattgaacatatctcttttatatatatagtacacaaaataatcatcatataaaaggagccacatggagagtatcttgaagtgacaagggcaaaattggtat

SEQ ID NO: 225169 - DNA, 2059 bp, Cannabis indica
atagctataagtgattgagattttttttttcttgagaaaataagtgattgagattcaagcatggttttcttctttttttttttttttttttttaggctaaatggtacattttttctcatcatttattacctaaaaaggacagtagtactatatggacatggtggcctaataaaagcaaaccgacatgtaattaggtcaaataactcatgctcaccacaaatctctattctgcaattttgtattttattgatagtacatgtgatattaattacttgaatatatatctcttctttttggtatgccctaattattgtatcttcagcaaaagaatgtaaacacatcgatggattgaccataatatttttcatcctattattagttttgaaatcgaatttcattgtgtacatatcatttgtaatggttcagtatattttctcatttaatttatattaacaaacaattatgatcttcaatgtgaattttctcttaaatttctcagatatgctatatttttatttttggatttgaagcttttcgtactttatttatgtgatttggatgtatttgaatactcaatcctaatatgcaactgatcttttgctaatacaagtttaaggtgattctaaatttcgttgccctacctttaatagtttcagaataaaattgtatggagttttatctcaaaattaattaacaatgagaaaagtaacacatgctttttacacatggccaacattatctttcccaacattaataatgcgagattatttctaatacatttgagcttagtcagaatatgagacttttgacaattaatgtatttgtaataaataatgtaaagatattgattatagattatagacaaaaaatttttttacgtgattttatagttaaaatctacatatatactccacgagtagttatttttatttataggttttttgtgtatagaatgtattaagtttgaaaattagtcgttccctttttctcttgtgttattgctatttataggaattaaacaacaattgtttgatcttatcttagcaacggtttatgaaacttgaacattccccatattttatttatctacaaataggtagaaacggtttacaaccaacatttgaaatgaatatctgttgttttatgacctagatctttatcacagtttcactgaacagcttgatcttaatattgtactcctcgaaaaatacactgaatgattgatgtatactaaatatgtactgcctcgcgaatcactcaaatagattaaacctttctccctgatcgctaggggaaggggagtgaagtgtggatgaaggagttttctcctcagatttctcaagttgtatcttttgtgcaaactaagtcaaatatattcagctcgcgataagtttgggtttttttttctctacattggtcacatacgccttctttcttttgacatgggaaatgctcgtttttttatactgtatgcggcaaggcgcatcaattaccgtatgaagattcaaagttcaaagccaaagcaccattggagttggtccattttgacgtgtttgggtgagtcaaacaaccatcaatcagcggtatgcggtacatggttacattcatcgacgacttctcaaggtaggtatggagtttctttatgaaagaaaaatctaaaacttttttagaatttaaagagtttaaggaaatagtggaaggagaagtcgggaagaaaatttgatgcctctgaacaaacaatggtggtgaatatacctcagatgaattttttgagtatcttcgagaatgacgcatacaccatcaattcacatgtacaaataaaccacaacagaatggagtagctgagaggaagaattgccaccttgcagagacatgttgaagcatgctacatgtaaagaacgttcaagggaggttttgggcagaggaatgaaaacagcagctcatgtcatcagtagacttcctcaggcaaagttagggttcatttgaccctttgaaaaattatggggatgtaaactgtagtaagtcactttcgagtatttggttgtgtgtgctacgtatt

SEQ ID NO: 225170 - DNA, 6275 bp, Cannabis indica
  modified_base (2634)..(2634): a, c, t, g, unknown or other
tacaaaaattttagaattataacttaggtattattatcgtaaaaaattaaagtgcacatattactttaaaatataaaagttgtatatatggtattgtatagtaataaggaaatagttcatatattatcctacaaaataaaaaacagtaacatttccttacattatacctgattaatggccattttctccaatcatgaagttacatgtaaaaatacccatacaataaaggtagaacattagttattgagaaagcaatgatttatttccagataagcagagtacaaacacaaagatatttgcttattttaactacaattctttggaacaaacaagtaccttttccctttacataaacccaattgacttctttcgtcattatcctctatacttgcacctacttctgttgagacttgagttccttcaccctctcttcagttgccttcagtgctttcccatagatgcttattaactgaaattttgtcaaagataaaataatgtcatgctcttgtaatcaacacttcattcaagttataaccaccattggagtaaacaatggtaataatggaggccactaaacatcaactctcaacgatattcgtattaccaaacagtactagccaattatgcaaaactattggtactagcttttaacagttgttttatgttttcaaatcatcgtccacctatccgattcacttaaaataatccccttgaaaccaatgatcaaacctgtgtttccagtaatggtttttctactttactcaaactcgttaagagtgactcactaattctgttttgagggttcagtgtagtgattcttttaccatacctgctcaagttcttcaggagacataataaatggaggagacatcataatgttatcccctgaaacacgtactaacatgccgtgcttctcgcattgtgctccaaaatatgcagccactcctgtgatatcacacaggcaaggagtgtcaatcaatgcaagggaaatgaaagatgaccaaaacaacaatatcataccatgcttacgagaaaaccaaacatgcaccactaactgcaataatttgccaaactaaaggccttatttcaaataaaaaaatcatcagaagataaaagatatgagtaaacttgccccattcaggaggaaatggatcgtttggtgacttgttatctgtaaattctgtaccaatgatcaaacctgtgcccctgatctgcaaaaccacaatgtaaaatgtcataatattcctgtattattgccaaaataactaaacttgaagacaccaaaatgtacctcccctatgattggactgtcagcaaaggcttttagaccatcttgaaatcttggcgaaaggctgtttactttacccactatgtctctttccctaaaatgaaatgaaaatgtttatgtgttctctttctacatataaactgaaccaaactcagggaaaagggaaggaaaaagaggaacatataaatttcatgctgaagatgctcaaacaggagcaaaacttaatattgtccctgacaaaaccaaagcctagaatctttaaatatgtgaagaccagagaacctcaattctgaaatttacccaagaatatccagttacactttcacagatgcataagaactactgttttctatgcatccattgaaccacgtttgatctataagaacacatatgttatcaaatgtgtttaccactggtcagccgatgaaaagtgcaacttaaacatgagattattggcttgaccaactcctctgtgatctaaattatttaaagtccatattgaaataaaagacaaagtttattaaataggatagatgatctaaacccattttctcacatcactccttttctttattcatctaatgagactaaggaaaaaggacatacacctagcataatagtgttagaatttgggataagatgaataaagttccatctaaaaccaattgacaatgagaggagtagcccatttatttccacacattagtaatgtgggattaactctaatagataaatatactatgatgaaagttgaattcttaaatagggttgaatcactggaatctaggttaatttacaagttggaatatactagggatactcagaaaagaaacttacttgtagatctttaatgcttcaagtgcaaccgcacatgcaacagggtgcccagaataagtaaatccatgagagaaaatgcctgatgtaaagaacagaaggaaaaacatgtgataaggatatcagatagactagattacatgctaatgaaaatatacttaataacaatggaatctttgtcagcataccaagcttgttactttgtgagtatatgacttctgaaactttagggctcaccataacagctcctatgggcatatatgcagaagaaagggcctgagacatgcaacaccaataccagaataaataattttacaatgcaattacgcacaccgctctactaattttgaatcgacctcactttaccttagctacagatacaagatctggttttatgttgtatttgtcacaaccatacattgtcccaatccttccaaatgcacagatgaccttaacattgaacctcatcagcaatagaaagaatgtcatatttcttcaaacagttgtaaccngcacatcataacacatacagatcacatgaaataaagttgtaatttgttatgctgttgtgtagaaaaaagaaaaaaaaaaaaccttgagataattaaagttaccctaacactaatgaaggaaaagacacagctacttcatagaatcttttgatcaaagatgaaaaagagaaaaatgacaatatagaaatagagggcaaacattagaagaaagaaagaaagaatgacaacaactaaaagacaaggaaaagtgaaaagaacaagaacatttgaatatggtgttgcatcataaaatcacagaacatgtaaaaccatgcaaaaacaacaagaacaaccaaacatcaaaaaaagaaaaaagaagccagctagttcttacaaaataagtctagttagcagtaacatactttttcaaaataagtcttggggggaagtatcactcctcctgctcccataacgggttcagcaatgaatgctgctatctgtataagtgaaatggtccattttttatttggtctaaaaaaaatgaaattcgcactaaataatttattcttgtatgctgagacaatatatttctactaccgtatctggtccctcattgagtatgagactctccaagttattggctagtctagtggagtactcttcctctgtctcatctataatgaagatttcattaccaaatgaagagaaatgaagatgttgttaagtttagcacacaaacaaactcacacctggaaggtgaaagcgccaataatgagggcaatcaatgtgcaatacaaatggagctggaagatcaaatttttgatgcaaagctggaagcctgtgataatgtaaccagtcagttaagatagtaaaaggcttgtttggttgtaatgtttcttcaatattatgcctacccagaaagactagctgctatcaaagtcgatccatggtacctatcaaaatgcaaaatcttaagttacttgagcttgttacaagacaaaaaaaaaaacatcaattgagtatgccagtattacgatttttctcgagctatgatcttttttttattcggccttccaagtgcattattgtagtaccaaaccagcttcacctacaaagcaagaagttaagaagttattcataacaattgcattataatatgctcacaagatcttgtttcatctctcaatatgttggagcagaaaattgtttccaactacttcaaggctactgaagactaaggttgaatgcaatatcattgacacattacagggaaactaagtgtaacaaagaaaattttctatcattggctaacctgagtatcattggcatctgacccactattggtaaagaaaactttagccatttttctagctgtaaagacttctagaagctcctttgccaggtcctgtagataaaaggaaaatgtcagttccaaccctgagtctgagtcttgaggaatcttctgaaaggttctcctaacaagttcatcacttggtatgtttaatacttcttatttcagagaaagtagcacaacttttattagtatccaattaaatgaagatgctttaagaagaaatgtatatgaacatgatgaaattaagatactgcaatgtataccaaggacggtttcgtagtacgattccaaaaggagtggtaaaatggcaaagtattcatttgttcagttgcagctgccacaagtctaggttcatttcctcctacagtttttcatcattacagaagtaagagaagctaaatctagattgtagtaactttcaaatgcaaacgttttgatgaatatgtaaataaatgcatcagttttaacagtttgcatttcctttgaaaatattctccaaatgttaacatttaagagggttctaaagtgtagcaccatattgaaagatttatctcaaaaacattagaaatatgcagcaacaaattgaagatagacaaaaccataacttaaagaaacatagatttagagtacctaatactgtgcaccaaagaccagctaaagcatcaaggtattttttgccattgatgtcgtaaacataggaaccctgaaatgttacatcttcaagtaagagatatatactttaaatctcccttaggaaacctaaaaacccatataatacctcagatttttcaataaccaaaggttctgtttcagtggactgccagccagcagtaaatggtgctaacataccatgtcccttgtatctgtgattatcaagatatgcagaaatataaacacataaaaaattgaactcttcaagtttatgaacattagattcttgcatatacatgatagtgtcacttaagatacatgaattaaaaaattgatgcataccctttactttgtttaacctcagcagttgatgatgaaactctttcatttaatctgaacagcaaacgtttccggggaagatgtctctacaggtaagacaagcatgtttcaaatgcaagtcaaaggtgaaatattctagggaaaaaaaaaatcaaaatgggtggttgattttccactgctttggagagattaataaattggttgattttattggcacttttttctttggttaaataaatttcgagaaaagccatatatactttctaaagattaatatgaaaggaactcaaaaaagatatacatacatataactattatttttaaatgagaaagggtagtgggaaatatgagtacctgggctctgaacaaaatggattgaattaggtggttgatagtcataattttttttgtgtgtcgtttttacagtaagcagagtgttgaagatgatgagtgaggctttattttgtgtttgtataggttataagttacagaagtagtgcggatgaaaaagacccgcatttcagtccaagtacatccatgaataataccaacactgaatgactgtatttaattcttaaatgttgggggtcttatcttatttgtctctctctatatatacatatataaatcatttgtatataataaattaatttaatgttaagtgaacgaacagtcactaattatgttattggattatgccaattactttatacacaaaacatcagctataagacgaacttttctacatctgcccagaaaaccaagatgacttaattaaggccaaatacaaaatgagacaacttataaagtataaattattgtcatatatttacaaggtgagctgtatattagtatatattatgtaaaacatagcattattagcattattaagtgtaaattattattattattattaagcgtaaattattagcaagtgttaaatttaatgctcttgggcaagttcggtgttcaggataattattatttttgatttttttttttcaaaggattggacaaaaggctaattagtaattttttctcttgaactttggcatgtactaaatcgtatccactgaacttttttagccgtcagaaattccctctgaactattgagattgttaaatttaaggacttttgtctaatttcattcaattttactgttttagtgattgtttatgtactaaatcattctccccagactttgatatctaccaaatcatgcccctcaaactttgatatgtactaaatcatgccctttgaactttcatccatgtcagaatttttttactaaaattagacaaaagtccttaaatttaa

SEQ ID NO: 225171 - DNA, 7310 bp, Cannabis indica
taaagttagagggtggtttttgtttttttttttttttgtgaagggggtcaaaaagtaagttctaaatattacaaaataagggtattcttcctgtgtttgaacccttgacctttaagttaatttaaccattatacaaaagctagtgctatgtttatatgtatcgtctttaattttaaatatatgtgagtctgcccttgtgtacaagatagtgaaatcatatcttctatggtctattcataggaccgaatcactcatgccatcgagtggcgtcttagagaaagcattatcaaaacaagtgcaatattggacaagagcagcatcaaaatcaaaattaaaacctctgaagagcaatgcaagagttcaaaatcagttattcaaacccgccacatcaaaagggttcaaaatgcaagaaattagaattggtacacaatacgaaacaaaacaagtctaaactaaataaattagaccaacttacatatctccagcccagaatctgttggcaggaactgcaatagatgtcattcacagtatgcaaaccactaatgagacttcgctcttcggtaggcccaagtgatatgtttaccctggaaatgtttagtaatgaacacttagacttgcaggccttggtcaatgcctggatcacatcatttcaatgcatatagagtctcacctagattcttacatggacacccaaaaagcaatgctgtcaataaatgagaggtgttgaatgatgccaatccaagaactcaccattgaaaacagaaacacccttttaatatgacacagttaaaagctcaaaacaaagtatagccaaattaaaatacagagcttgcaatacaacatgttatgtgtttgtgatttcatacaacaagaaatgcggtcatacatgttcggtaacaacattgttaagcatcctaaacaaaaggaacgaaaaaccacaggcaactaacgaagatgaagaaattacacaatgaaacagtcacagaacaatacatggtgtacaattaaaaaacgatgataaaaaaaatcccaattcccaaaatcaaaacttgctgtatcaggtaattgaaagaaaaaaaaacgaggggcaaaaggggcttacgcatgcctaaagaggtaggctctgccaaaacgaccttgaaaatccttggaaacgatgtcttcgtgggaggcagagtcaaccttgcaaaacttacacttgaagatcttgtgcccactcagcgattcaatatatagtctccccatgattgataaataactctctcctcacctttgccctaatactaaaactaaaagtaaaagggatcacgacgagctttggtaatggtttggttcccctctttttctaatctaaaagactaaaacagtcaatatcccttttagaatatcttatttaaattttttatatataaaattaaatgtccctctattgatttttgattgtgctggaaagggattatgccttttcggtcaggtcagacagagagtattagctttgggaagttcactgaatccgtgacttgactgtgccatgaaagagttaagaaccactaatacagcgacatgtccagatcaaaaagagggtatttctgtcatttcagctttatgtgtgagccaaatatactttaccttaacccccattgtcattcctttcgtacagtttggttcccactttattatttggtttccaagcaatcttcccccattggctggaacgagatctaattattcattactcttttattcaagtgcttttctttttcatctccaagaagatatttcacaccaaacttccaggtcaaagagaaaataagaaataatttcaacaacaaatttgaagtttcagctaggaaaaaagaaaaagaaaaatccatactatatttgactttgtctttataatatctgtaaatagtgaaaaattgatacaccctttgaattgttctatttccatagaatcacttcaaagcaaagcaaagcaaagaaaataaatagtatgttctttcctcacattacaagcaatcctacctaagacacatttaagaaacggacttttgtactccaacacaagcgagatatcttattatgcaagaaatgaaaaaaaaaaaacatgagaggtgaaacacaagaacctagtaatgacataagcaaaaaaagaaaaacttgtattgtatagcatagccttcttaatacccccttcacttcatttacattttctactttaattctcttctacaagcatcaatcacccacgggaaaaagaaaaaaaaaaaggtgagaatgaattaaatttgaattaacatttccatgaactccgagaaatctggtcccgtggagaagaaggaatgtggaatagattaagtggaaagagactagttagaaccagcaaaagattgttcagaaaattccatggtgcatagctttaagaagagcagcaccaaccctttttaagttcgggccctgtttctggagttccttctgcctgtaaaaccacagtctttccattccctgtccatgtaggatcctgtttcttaagctcttgagaaatcataactttacggcttaatatgtggtagatctctttcacaaccgtctgaaaggcagcaacaacattagatgaatcaagagccgatgtctccatgaaaaacaaaccctgtgcttcagccaaggctttgccttcagcggtggatacctccctagcatctttgagatcagacttgttaccgacaagtattgtgactacattcatgtcggagtgagctgttgaaatattacaccacaccataccaattaatacttttttcatcacgttataaaatggatgcactgggtgttaaaaccaaaaaattaagctatatatacatcaatagagaagtacaaggcaagaaaatcacagttatggatccattttctaaccttctcaagttgagaacaaaatttcatagttttcaaaaatatgactagcatcaaaagaaaccacaatgtgagctatagagaaagaggagaataaaagagaatttgtgtgtatgcaggtgagcatatgatgtaaagccagaacaaagacaagtcaagaaagatttccaggaatcttactatgaagttcattaagccatcttccaatgctatcaaatgtttggcgtctacttatatcgtacaccacaagagctccgaccgcacctctataatatgcagatgtaacagctctgaaccgctcttgaccagccgtatcccatatctgtgctttaatttcctttccattgatgtcaatcttctgtgtttggaactctactcctatagttgattttgaattcgggtagaactcatccctagcaaatcttgcaagcaaatttgattttccaacagctgaatcaccaataagaacaatcttgaaaagataatcttcagttttttcctcagaataaaaagccattgtcagccttcacagaattgtcactctataaaaactaataaagagtagccatctgtagtttgggtctttaaggactcatatttaccctacgagacatcaagctttaccatgttcaagaagaggagggaatcactcatacaagaagaaaacagctgacacaagaaacttggatgccaaggcaggtatataaagaaacataagctgccactcagtaatcactccagcgaaagaaaaaagggcacagagcacaattataaaagagatggggaattccctggctccactttcagcttcctgcacagattttagtctagcagatcacttcctcttcagttaaaggatagccctccataaaagtgacacaggtctaagatccctgttttgtggtaagggcatcaagacttacataataacaatacataacaacgatgcaacttttaataaactaattctataggatggctgagggacagtgcattttgtgaattgaccaaagttgcatacatgtgcatactgcaataactataaaacataaatttctacagaaataggtaatacctcaattctttgtttgacttgaactttggcctctttctagttcctactccagcttaatgcttcaatggtcaatcctgaggaggaatgatgtttaatagactatttcttgaaacaacatatttcaatacgcatgtgagtgatgtcacaacatccgaccatcaaatcagaagcttcttgcttcattgaaatactaccaaacccttaacatgatatttcacgtattcaaatatgttgccagcattattacatgacctgactagctgtgttgaattatatacatgcaatatgatgagaatgcagggaccagatgaaaattaacttgtaaatctgcattcttacgttataaaaattgagtgatccccttcatatagcttctttgaaatcttgctttgatgaaggtttaacaaaaaatcaatttaagtctcaaattcagcttattctaaatatgctgagataatatgttaagatgtaagttgatgagtcaatttcttccattattctattattgaatttttttaaatagatttgcaataattgaggtcctacatgaatgattatatggcagtggctagataagtataacaaagtagcagaggttactttcaatatcaccagtgaccccaaactattcaccctcacagaaagaaaagccctcccttttcaaaataaataaataaataaaaataataattaaagaaagaaagaaagaacagcccttctactgtaagaagtaataatagcattatgacaaatggcataagttctaggaaccaatttacaaacatattcataccataccccaaccgctagtaattttcacatgtcttgtctacttcatattgtaaaactccattaacgagtattaatcttcaaaaaccagagtcagaaagtataacactgtaaaccattatataaatcttcaaaacaatgaagagaatagattctaattaaaaccaagtaaactagcttatgttctggttactcaaaagatattctccttagaagccgggaaaaaagcaaggtcatgaaagttcttattccatcttaaactaatagacaccaagactcaagagcgtcaaccagcacccccctctgacagtcacccaaaagtctaattgtattatactccactttaacacatgaaagaccattttaaaaagtaacacgcctttaatttcctatcaccagaatacccttacagatgaagaatttcccttcttccaactcttcgaagaacaaaaaatcaaataacaaattctgaagtttctaaatttctattgggaaataaataaatagcaccgttaaaaggacagaatgctcataaaaaaaaaaaaaaaaaaaaaaaaaaaaaaaaaaaaaaaaaaaagccatgaattctaagaattacctgattatggacccaatactagaataccagatcattaacttgaacttgtcccaacctaccacaacccaatccactcagaattgttacataaatctataataatcaataagccttccacatcccaaaagagaataatactaaataaaatcgatttttggtaacgtacgtatgagcgtaagcaccaagagaacattgaaaatttcaagatccaaagaaatcacaaaaattattggtctaactaaaattgcaatgactaaaaactatcaaagaacacaatcaaatgaaaatgaaggttaaatttcataagggcatttcgaattttgtgataggatccggtgagagaactgaaaacgctaaacgcgggcgtgcgtgtatattatatatatagaaatggataaagaaagagttaccgtagaaatgtgatgggtagatcggaggtcaacgggcggagacggtgtggagagtaaacggcgaaagtatgaggataagagaaccccaccggacaaatgaagaggatggagaaacgtacaaaagggctgtttgggtaatatattcaaaatggtgagggcatttatgtctcattattatgttctttcagtaaaatatgaatgaaagtgataaacgaacaaaaacaagacagaaatactaaagtactaaactaacacacctagcctatattatatatacaccaaaaacacacccataccaattttcacatatttattatttagattatgacatcatatttatatttacatatctatagttatctcccaaaaggttattttggtccaatattgttatgtgtttccaaggttaagaaaaaaatttattgttttttcttttataatattatctaaatttttaaaaaaatttaaattatttatagtttcgataaataaaatttaaatattttgttgtgctattttttttatacatagtaaataattatttaaatattattttcattactataaattattttaatattaaagataatcttaaagaagtacaacatatatgatttatttatttttttaggaaaacaacatatatgattataaataaaaaaaatttaaaaaattgttatagataccaaaacaaataaaaaatctagtactttacattatttcaaacaatatatgttatctcctctaaaatattggacaataggcaccatgtgtcttagcaatgctccaaaggatagaagtatataaggcaccatgccataaaaaaaaacatgttattgaaatattattttgataacgtcttacaaatttataataatttgataaagtcttcaatcaagggatctccatttgaattttatgctcatttcttgaaaaaaaaaatgcatatttggttgataaaattttataattaaataccattaaatgtctgaaaaaaatccaaaatgaaagcaaataatttaagaaataattgaaagagagtaaccaaaaactaacatatgtcctcatagcttgtattataggttgcctgtgataagtgtgtaaaatacatattgttaggtgtatttgagtaaataaatataaataaagtattcattgtaatttgttataatttaaatgcaaaattatttaagttgaaaaagttaatttaaatctacttttgtgtttcaatttcgatttaaagcaaaagatggtaataatgaaaatgtataatgaaatccaatcaaaagcccacgtcgccttcaatgatattgggccttcatttccaatgtggacacatgacccaactgcaaatccttttcaacaattcactttcccatgccaccccaaagttcactatttcattttcaagcacgtaacatgaagtaaaatgctagatttcttttctttcttttttttttttttttataagtaagaaaaatcttagattgattaaatgcatctaaatctaatggaccccacaattgtg

SEQ ID NO: 225172 - DNA, 3230 bp, Cannabis indica
aggaaaattgaaaagtaaaaagtcggggaatgtacctagagttgcgaagtcaagatggggtattggaactctcttcagcggggagtcagtactaaagaactaataatcccgaaagttgggacgtgttttgtaatgctaaaggaatgtgtcctcaaatacttttcaagcttgtaaaacttgatcttgatggtattagttcgcattggttgaggcttcatcgggtaataatacaacatttcttttggtcctggaatctctatcctctgcatcttacacaatacgtaccatcctaccaaaagcttatacgcctacagggtaagttggaagggtgcaatcccaatttctacccagatttttacaaattatgtctgtagaagcaagtgagctctgtaagagatgtgggcccagctctaagcaccaaacacatctatgctcttagatgatgactcatctaaaacagaaagtgaattttaacacagaccaaggacgtttcggactctgctcgtgttcaagagtcgttggagcatgtcaaacctcaaaacttattttgaatttggtacatttccaaatggatgaattgtatacaattggaatgtttttctttttaggcttcctctttcagactacttctaggaccacgtcctgcattggctcctcgactggaggttgtatctcgacttcctcaagacctatagcctcgaggtgaaactcatcaccaggagtagccactagaagaaaagaaaagatccaagtagttaaatacccgaaaccacgaggacatgaagggtatcggggaaggcctcccctgaaactacttagaaaggtcccctctagacctgttactcaaagggccactcttacaagagaaatgccttcgagaaccagatcgagaacttagagaaatctaggggaaaacttaaaaagacccatcctaagccctaatgggcttagatgagaagacctaggggccaatctaattcaaaacttacttacacagtcaaaacttaccaagctactatacccaaaaaaaaataacatgaattggaagttcaacatgtttataatcaccataccaccccaaaatagctattctatcatcctagcattcgcgtacaaaaaaaaattatcaaatcaatactccaatctaaattcctatcgaatcacagagtaatttgaaaaagagggtcaaaaattaggaaaaaattacttatggtacgacatgaggataaaggaggatgagagtagttggccttaaaatcaagagcccagcaaagaacttgattacagcctgcttgaaagtcgatggtcttagtcaaatggggatgtctcacaactgggttcagacgtggcacttttgaaaactccctcacccaaatttgtagcaaaaggaggatgagaacgttgcatagctcactcattcatcaaagaataaaacttgggatttctagcatttttctttacaatttttcttctttgctaaaaagaaggctgatgctcaaagtttgaagatgaaaactcaaaagtttgaaaatacaaaaatggtgaacataggtccctcacgcctatatataggtgaagatggaaatccctgtactttgagatcaagggccaagatcccttcgtaagaaactcacattgcaatccaacaaccatggaactgaaaggacaactttaaatgccttaaattcctttatgggaattgaggcattttagcatcattaacactttccttggggccctcataaacagtaaataatcatcatcccatcattttgcacaaaccattccttgttggggtgcgtgatggtcatgaacccaataagtgtaacacatgggtaatgccaactgttttgcaagctagtctttaactcttcaactgtcaagtaccagaaggagaaactacttccaccactttcaaaattgtccatgtgtctaaaatggacaaggtcgttcgggcgaaaggctgcaagcttccaccactctcaagtctcggtaagctttagggggtaaatactatcaatattttaaaagagacatgtagcacaactagaaaataatcaccatttaaaagtatgacaaagtcggatccagaacgggcccaggcctaacaaagatttaggactttgcctccgagacatgtcactttcccaaaatctggaagcctcccctataccaacagtggtcccagtcatacgaaaccttcgccccgacgagaggagaccttctaaggggcccaacaatcatgtatataatgtattttaccctaatagtgggtgggtttttgacaagaaccctaaacgggtcacaagtatgtctagacaagtactttagcctatataaactccttcatttctttatgagggatcaggaatgaaggagaatataggtttagagaatgaggcatggtggtttcaccacctaggtgcctaggtgaaatgttatcattgtgattgttatttttgtaaaattagggtataacacttgcccctcaaaagtatgctcgtaagttaacgagtaatacttttgaacttcttctaagacttgtaaaataggtttagaattaactctccaatttttattttaaatgagagaagtggccatcaaatcttgtcatgtggacaaggtgatggcacctcttggtcacaaataaagtggcgtaacccactcgttgtggtacaaagattatttaaccatgtggaggatgacatggaataggtgaggtggtgacatctcatggtgacgtgggcgatgaggtaatgtcaaattaaaaattatatcaaatttaatacatgctcaaaaattataccatacaatatagcacaaagtatattttttttaacaaagcacgaaacatatttgtatcagcataaatattacttttttaaatttatttttaaaataattattttattatattattattatctttagttatcacattaattattatttttattaactattgctaataaaatatatttttatattaaacataatattaaatattgtgctaaataaatcaaatattaacttttataatcaatatagcacaatcgatatgataaggatggatgtattatttaatatttcactatctgttataaatattaataattatgtggatatctaaatcttttatttattaccattaattgtaatcaacattcctctttttcttagttttcctttttcttagtttcttaatatttgactcttgtatttgtataaat

SEQ ID NO: 225173 - DNA, 3858 bp, Cannabis indica
aaaaaaaaaaaaaaaaccttcctttactgagaacttacaatgaggccttcatggcgtctgttacttctccgatctcgcgttggcccggggtctcgtgtctccgtacaccgctcgtactctcaggtaccatcttttacccaaccacgagtcctttcgatctctcacttcactcattcacactggttcgctttctccttcaaaatccattttttgtcctaattcgtcaatcacttaaaccctggaatctcttcgtttcggaatttctcgtccgaaccgaagcttgaatttaaggattcggatcacgcggttgtattagaaattttctccaaaccgatgagtttggaggagattaagaatgatttagaatcaaataacattgtgcttagtcatgacttcatattatggaatttggaaaagcttgagtctagtcctgatgttgcaaggaggttttttgattgggtatctgagagtgaagaaaagaaattgagttctaagtcttataattcgatgttgcgcattctgggtctgaatgggtttgtgagtgagttctggggcttggttgagattatgaagaaaaaggggtatggtatgtcaaagggcgtacgtgatatagctttggagaaatgtgagggggaaggattggatggggacgttgagaaattgaaagaggtgttttcttcagggtcggtggacaactcggatgaaaagatctgtgtgaggatttgtaggattatcagaaatgaggtatggggggacgatgttgaaaaacaattgaaggatttgaatgtaaccttttctagtgatatggttaaaatgattctagataagcttagcaccgagccaatgaaagcgcttatactttttaggtggcttgatgagagtgaattgttcaagcatgatcaacaaacttataatgctatggcaagagttcttggaagggaagattgcattgataggttttggaaagtacttgatgagatgaggagctttcaatttgaattagaggggataacgtttgccactgttctagggcggttttgtaagagaaaaatgtttgcggaagctgtgaccttttatgaatatgcaatggctggttcggataagccttcatcacattgtgaaaaatttctgttgaggaagatagtctcggctaagcagttggatatgagtttgttttctagggttgtgaaggtttttacagacaatgggaatgtgttgacagattctactctagatgccgttctcaagtctttagctagtgttagtagagttggagagtatactaaggttttgaaagcaatggaggaatgtggatacgtacctagtggtcatctgcagagtaaaattgtattccagctaaattgtattggcaaaaaggatgaagcacatgcctttttggataacattgaagacagctataaaccagatgagaagacatggaaaacaataattcagggactttgtgcagtcggagatcttaagaaagcttctgattgtttccggaagatgattgtaatcgaagatgttatgtccattggttccactcttgatgtgattgtggttgcacattgcaaaaggaacaaggcaaaacaggcttacaagcttcttaatgatctgatcactgaaaatcaggtgatgccatggcataccacttaccaaacattgataacaaatctattagtccaagatggatttggtgaggctctgaatattttggagttgatgagaaataacggatttccaccttttattgatccacttatcgagtttgttgcaaaacatggaactggagatgatgctatagcttttctgaaggcaatgacttcaaaaagtttcccatctacctctgcagtgcttcgtttatttgaagccttcttcaaggccagaaggcacaatgaagcacatactttcctttctaaatgccctggtttcatccgtaatgaccctgatgttttggaactatttttgtccgcaaagtctaagaaagatgctcctaccactcctgtggctgcttaaacttttataggtatctcattgtatttttgagttaatgtagcaagaaatttttgttaaaaaaatttggcatggctatttatgtttcttcctgcatccatatttactgtctgagaataaagctaatactgtgttttcaatggaaaaagattgaaaacgaagagaagctctgctcaagtattttcattataatgccatgcattgatataagcctttgacctttcaatcgtttggtgaacaatctcattgttaattaaggtgcatgtctctccaatggtgttggattcaaacttaatatgatttcacagctacgtttattttctgtgtttattgcactttttctctgttgatatggacgaagatgatgttcttttgaaggcatttctttctgcttttgtaatatgaaaatgagtatgtttcttttttattttgttatgttttaggacataatatataactcctatgccttgtaaataatttagttatagtttacttttttgttcctagttttgaattcttttactttaccatttgtatttataactgtagttcctttcgattcttaattttcttagaccatttaaaaaagaaaattactagccttgtacaatgaatgaagagactttaacaattgaattaaaaaaaataattaacatgaataagactttatgaagttgatttaagtttatcatatgttatgatatgaattttaatttttattgttaaatggattttgtataaatattttaattcatatgggtcattattatatatatatattacataattacataaaatgtttttgtcgaatgtctagccatatcaataatcttaaatctagattatttgtatcaacatgatgcttaattaatcgcacttacaaccctaattaaagaattctagaagtgtaattagttgttaactattttattcataattcatgtgaccttaattctcttgtactaatacaaaatcatgttatatttacattaattaattaattaataatttaacaatttaaatataataataataataataaactaatacatttatttattcaatttaaaaaataattaatatgtttagatgcttttaagacacattcctaacatataaaaaggtaaaaaaatccgatttcatattttcatattcgaaaatttcacctggactctatgatcttaacgagtattaggaagatttcaacattaattttttttattattattattttttgttgttttcaaagtattagttttgtatttttatcaattatcagctgcttacatggtttattcatcatgatacttaataatttgggtatttttctttgtttgcactttctgttccaaatggtaatttattagtgaccaaatgacatgtttctttgtctagttaaaacaacaaacgacatgttattttcggaaacaaataataaacaacatcaaaagaaatctagcattataaccattttttttttgtaatgggtggggaaactaataataaataacaatcataacgaatatgtaatatataaatatagcacacgcagaaagttctttacatggcagcattataattacatcatttaaattcaaatttaaaagaagaatctgtccttttttttttccttatattaacaaaatgaatgtagacaataagcacagattaatagttatattaatgaaaccacaatgtatattaattttggtggctaagggaaaacctctaatacatatgggctacacagaagagaagaacccaaaagaaaaagagtaaaataacaaatgatgggcttaagcaacttctgggtatgggctctggtgttgaatgtgcatattcttc

SEQ ID NO: 225174 - DNA, 2397 bp, Cannabis indica
acatttttcttgaatcgtcttttctttgggaaaatcatcagttaagtgatcatctttgttaatactttttagataattcgaatcatcttaaaccattccaaataattcaaactaatcaatttatggcccgttattttaaatatcacaggaattacatcagaaacaacgtccactgattttgggtctgattttgtctctaccatgatcttgaaagcaaaaacaattaaaaaagaaaaggaagaaagtgaacaacaaagaaagaacacctaaacacgaagaattaaaaaattctcaaaccacaatatgagaagaaccaccagagacaaatgcaaggaggacatagataattcagaaaaggagcataagtaaatcgctgtcgaattcaaggtcccagccgcccccatgcaccgacgtgtagggaagttctccgcgaattagggtagcacgtgagcctcacacgtggtatttctagtggttgaacttttgggttttgatgatcgacgattgggaagttttcctgtgtgggctatgagaatagaaacacactccaaatagggctttcgtaaaaaaccctaaattttttaatagcctaaattttgaattcctaatctagaggagctactatgccatgtaaataatggtatgtatttatacacaacttagaaaaattatactataaaactaaataatagaggaaactaattagcctaatttctaccaaatttttttgctaatataaatctctaacacttactcgtaaagatggtttggttggccagaattttaaagctcggtactttctaaatggtaattatttgtcgggtcaattgggaacaatccgagttttatttggcgaagtgttgttgaggttagagatctgatgtgtattgggactgaaagatgtgttgggagcggcagggagattagtattcttcgtgatcattggttcttgataacagtaatcattttgttactttttaacatcctgccttggtagacaaaactatagattattcattcttcaagatggagcgtaaagagtggaattcaaatgttatttcagatgtgcttaatgagagggatagggctctggtatgtttctttaagtgataacatagatggtaatttttggtattggataagggaaaaattaggaagtactctgttagtagtgcttataagatgattcaggagaatattggagatcgaaaacaagatgataatgtcgagttttggaggaagttgtggcaactaaaaatcctaccaaaggtacaataaaactttttgtggagagcttgttctaattgtttgccaactcaattttagttatctcttaagaaagtacaacgatgtaagatgtcctaattgtttagggacccctgaaactgctctacacttattggttcgttgtccatttgcccaaagctgatggaacatcataagagtgccaagtctggtgctgctgcaatgacctttgcagcgtggttccaggaaggattacaagtctggaatggggaagaatcagtggaagttgcaatggtatgttgggccatttggaaatttagaaatgatctaatttgggatggaaagatctcttctaatatggacatagttacaacagctaaactcaattttgattaatggagtaatgcttcgatatagaataacacctctaaatcaaaataaaaatagagatgagattaagcatattggaccaaaccaatttttcctaacatcaaagttaatgttgatagtgctttatctattgagaagggtcattttaggtgcaggtttgtggcttgagctgctactggtatggtgctagaagcgaaaaaagaagcattagctagattctttacagttgctcatgggggaggctatgactcaaagaggcattgacttggataaataataaagcttaggctaatgaggagattgaatttgattgccttacattagttcaagacttaaataatttttaatttatagcttctccttatagctatgtgcttaatgattgtaaggttttacttgactctacaatttcagtttctatttcttttgtaaaacgatcagcaaattaggtagcacatatattggcgcaattctctcttatagaggttgataatattttttttctaagaattttctcttgtgattcattaatggttttggatggcttgagttaataaagttgtgctttattcaaaaaaaaatctaataattaatttaaagcatttatatttatcttgttattttggtcggaggttcttactggtataagcgtctctgtttgtggcatgtgtattatacttagttttttaaaattttaaataatttatgatattgagagggaaattttgaatttctatgcttacattaccttaaaaaaaaatt

SEQ ID NO: 225175 - DNA, 8480 bp, Cannabis indica
aggattatacaagtatataacttttttagctgtattcacatttttctacagccatatcttcacgagtctcgacatcagcacgcgatgagaagggcaagaggctgtggaggccgctttctaaacactaaaaaggcagatgacaatgctgtgagttccacttcggaaaatggctcaaattctaatggaaaccaatcaacacaatcaacccgtgatcgaaatgtggattcttctagtatccagaagggcaggccgggatccatggttgaagatatggggaaaatgcagactcactccaatggaaacggcaaaagcaacaacaacaacggccatggcttgtcatcagcatatgatttacgattcactgatgaccaggaagttgattgcttgggccgggagaggaaaagcatgaggttgaatggctcctctcatggggcaatctccatcaaatgaaagatcctcaaggggatgtagttctcccccaacatcagtaaactggtatagtactacaaaaccccacttcttaatatcgaacctatcgtcgtctatttttgatgctaaccaaatcgaactatggttttcaggtgatgctgaggggagacacagacaccccatttcagctcaaagggaaacctttcttgtgtgtgtgtctatatcaggcaattcattcttggctttggttacttcaaacaactttgtataactatgttaggtgaaatgaagaatctcaactctaaaacaaatccttaatcaagtttacattttgctcactaccccttttgtgaaattttagcagaaaaacaattagtataggaaatggtttgctaaatgagttgattagagaagttatgtgaatctttaatgtttcaaaagcttgtagacatttttatatacatatggaacaaagggtttgcttgtttctaattactttgttaaatgagtaatctttttctttatttattaatgagaaaacaatgatgtaaaaaaatgctcactttttttttctctctctaatgaaaatgacaaaagcaacagtcatggcttgacattaacatttgatttcatggagaatttgttctgtgtgatcatttttcttaagattcaccattaatagtgatattgtctatttttctattgggccataaatgggcctaaatgactccttttttgggccctatacaactccaagtcattttattataaaccctcttaactcctataaattctaaaagattgaaaggaagaaagagaagggaagagaagaaccctagctatggaggatgcaagcctttttcttttctttttttggaaaaaattgtgaatagagttagtcccaatgatgaaaagtttagtaatcagaggatggttaaaaaggtatgctatgtttggaattgaaattccatgcctttggtgctccctttcactgtaaatataacagagaggttttgaggaaccattgctgttctttttcaatttcatggctaccttcccccatttccaaggctgatatctggcttaactgagggattttattaatatttcttttttattgtttttaaatttgatgggtgggttttgattcttctgatgaaaaagatgagatttttggtatgaaattaggtcaaacctacttaacccataaatgtttaaaggttgtttattacaatggtggaatcttttttggtgtagaagtacattattaggtccagatatagaaattaggtgagaacattacataaggggatttaaagttcagagcttttccaattcaaacaaagtcaatcattcattattaattaaattatttagtccaaaaacatgggagcaagtgaaacaagatttaaagttcagagcttttttacttattcacacaaagtcaaaccattcatgatttttacatagcaattgaaaacccagatttaaagttcagagctttgcttgttcttgaagctgttcctgcaaaaatttatcaaaatcataattataacactaaccatttctttggtattgtttttgagattaaagatggcatggaatactgacctcagtgacaaacaaggcatggaatccatatggaactctactaggtaattcaacaacagccactggatcatttgacattgtttttgcatcaattacatgaactgttgattttctgcatagcaaatttaactttgtttatacagtgagagaccgaaatagttatatagtcaagatgttttcaacaatggaggcagtacccggagttttcatcgtgtacaaagaatatcaggtaaccatcatcttcctcttgtgatgaaactccattcaccttaggaacaaatactgcctcggaaccaaaccgattaggtcccatgtcgtataggccttgaacatttccaccaacttcaaggcttgttttactgttatctggttcggcctctagatcgaatttgactatgcctgttactctaggatggctgtctagtctagttccatacacataacgttgcttcctgatttcacatgcacacacaagaaaattttgttaagtggaagaacatcataaatagtgcaatgaagtatgtacttttggtatgagtttcgattccagttcaagctaggtgactttttcttatcaggccaaacaacttgtaaactttattatgaccgtctagcattggttgtctgtggattgcactcgaattgataacttccaccacatcaatgtggtactctattgcttagttatattccttcctttgttacctaattgtcgaattaggtagcaatagtttggatttgtatagtaaacttactagaaattagaaagtttcgaaaatgaaggaggtccatacctgccggtgtagctttcgttcaccctaggaaaatctacagctggtgctgagagttttctttgtgatgctagaccagtttcatgttaaatctcatctcatacctaaagtaataacattccactttagaaaaatctaaagagatcaagctttttgtaccattaaataggaatcaaaaccatcttacaattcatttgggatgctataaggctttttgtttatagttccattgagcatgtccaaatcgagattctcaattcgggaagtgattagaacaacttcgtcttcctcctcccacgcattagctaatgaaatttagttgtgaaacaatgtcgaaaactcatgccaatgacaaagactgattaatttggaactaagatttgtaccattgtggaaaatgttgcaattcggaagctcaaaccatttgattagaagctcgtcctttgcataccgtggaagcacaccaaatcgcgcttttttggtagtgtcaaatgagattataagcttgttttttgtaaccatttcctgacattgaacaataaacgaaataaactttctacatctaattcaaacctcaaatcttgtgagagcaaactatataccttcggactaaaaatgagaggaagatccatgaaaatagcatagttttcagtaatggcaaagtcatggatcatgatagggtttggtatagtaatcggtactggatcgtgcatgaaaccttccttcgaaataactcgataagtaatataaggcggagtttgcgagtaaccaaacgtaaacatctcacctacataatcaagacctttgcatcaaaaccgaaattcattatgttttgactccaaaacttttctatcttaccggtacatggatcaatttttggatgagcagtgaatggatgtgtcaatctcttgtcatagtcaagcatgcctagtgtttgtaaatctccatcttccaacactttaagtacatctgaaaatgaaacatggataataatagtttagtcatgcaagaagggctaatagtttagtcatgcaagaagggctaaaaattccattaccatagcaattcaaaatctataatgcttacaaggtttgtctccctcatgaagtgctagaagttttccatggtgatatacaagagctgtattagctgaaagaaaacaatgagaggatcctgttttgtaaattcgagacaaaatggtttcgatgatcaattttattacgaataaactagaattttacaaaattcatcaattgggtttgatcctactatgaggtgacattctatgaatggttagcgatttttctatactcattattaaagtaaaataagtaggatctgatattgaattgtatagtagagatacagcttataatggtactagtcatcatgagtgtcctttagtatttctcgtcaagttttgtcaattttcagcctaaattatggaatagtaagttgattagcctctctaatacattttctaattacataacaaaatataagttcataaagtatacctgttccaaatccatatgaaaggtctaatactttgaatttttgtctaagcatataaaggctgagcatgagtagtccaaatatccccttaagatctccaaactgaaaattacaactttaaaatacatatataattaacacacaaaaacattttaattaatattcttcaagttcataccttcaaaattttagcacctccaaaatattcttcttgtttaagacgcgaagtttttacaaaacgagaaacgtacgttgcttttccatctttaattctcacgccatgaaccatactgcaaattaaattatttcaaaatgtatttataactaaagaaaatgttggtgttttaaaaatttgaattgagattatatcatttaattggtgaaaaaaaaattagtgagagagcataagatgacacacccatctccatcaaacctacacaaagagaaattaattaaagaacataagtaaaattatagttgaagtgatttcaatattatgataaaagatgtaattaaatgtaaagaatgtaaataaaatgaatgaaattattatgtaccaatgatatccagaaactggattaaacttgggattaggtcccactttaacaaattctccatttaaacattcctgcataacaaaaatgcacataaaaaattgtggattatggaacaatgagtaatatattaatcattcttaaagataataattattatgttttctacatataaaatttagttgagccaaaaaaaaaaatcatattatttcgatgaagccactctaaatttagactaatcaaccagaagagtgatttttaaacgattttattaaatcaaaaatcaactattatagaagaataaaaaaatcggtgagcatctatccaaatcttattaataaggttattttggtaattttaaacataatatgagtttttattttttaaaatttgttggtgttcgttcaattcaataaacatttagtgtcaattttatattttgtatcaaattataagaggaaattataattttataggcttttatattttttgttcaaaaatataactttttttcccttttgaaaaaggttattttatggaaaaattgaagaaagcttaaatatatagaaaaatcaagtaaagataaccaactacccttatggtaaccagaggggtaaccaagtaccttatgttatttttttctatgtttttaattttcccataaaataacttttttttaaaaaaaaaccatatttttaaaacttatactttaaaaaccataaaattaaaaattccccaatttaaatttagtttgcaaaagtgtggaatgaattgattaatttagatatattttttttttcatatttaattataattcactattttttttttcacatcatcaaaatcaataaatcactaattaaatattgggtaaatactattttggaccacgtgttttgttaaatgacaatatggaccctatgttttctaacattatacaaataagatcatgaactgattttttgtcaaaataaaacttaataataatttaatctagaaatgttatgacaaaattagttgcactttctgtatctgttcgtgttagaaattgtaaagttggttatattaaaaaataaagttgttgaaaattgaactcagggttctatatttactattttggaaaatataaggttctgtcatttaacaaacagagggtctaattaataacttttgtaaaatacagggttcaaaatggtatttacccttaaatatttaaaactaaataattatttttttaaaattcaaacaacaaaataaaatcaacctccaactccttcctcaagttccaatccctaataaaaaaacatatacatatactagtatagttttttccccttagtaattatatatagttataatttataaatacacaagttgatttagtacatttttgaacatgaacaaattaaagaatatatatagtaaaagaggtactaacaggaaggtaaccaagcacatggagatccttagttggaggtgtttcatggcgattcggggcgaaattgcttgagagaaaatgaagagatgaagaagaagaagaagaagagttgttatagtacataagcttcacaacaagcttttcaaaccaatcaatgagcttagaagccaatccattgttgggttttggattcacttcacttatttctttctctcttttcccattagagtagttcctatacttctcaatctcctcctcacttactcccatgatttttttttgcttaattattattgaagaaatgtttataaatgagatgagatatgtgtgtttgatatagttaatttggatggttgcaattcttccacatgtctatatagatcacatattatgtaacacaataatagtctctagtagtctctatttctattggcctacataatgttgaagtactcaatcatatttggaatttctttcataaccaaaatggaatcacatgttcctcattattttttgtaagggcatgtccctcacttaataattgggaattattgtatatcatgaacaagatgaaagtcacatgttgtgtggtgcagtgatagagatatctttaattagtagggtcggtcttaaggtatgtggggtttaaggtaaaatcaaattttagagcctctacatatagttttattatcaaaatgatagttttagtgttttaacgaaatgataaagtttttaaaaactacacattaaatattttttaaaaaatgaaaaagtaaaggttgagaattggagagagcccgactcgcctaatctcagggtcaacttgcttttagtggcttctttctttactatggtcaagggttcgaatctcagcataactccttattaaaagggagtatgcatgagcttttagatggttagtttactatggtggtgccattcttaataagatgggaactctcgaggtgcataccattgacctaattaaaggaggatgaggtatacgggctctatagttgcaccatgtaatctcttaacaaaaaaagaacaagatgaaagtgtgtgtaagagagctcaaaaccaatcacttgctatgatttgatagatactccatcgaatcagattgtgctaatgcaattttttggaattcatcttaaacatcaaaaagtttgtcacgtcttacagttttgctaatttttgattcacttttaggaatgttaatagtgtagctcattgtttagcgaagaacactcttgattactgagttagtgctagttataatagcgaagaaatcctcttagataagcttattcctatgtaatttgttttctccttttgtaaagatcacccttttcaaaaaaaaaaaaatcattctttttcttttgttcttagacaattttaactataaatacttaactacactaataacaatatgatatttcgaagtactattaggcaccactttactggtatgctttagcatttctatgttgttacaccattcatattttaaagtcgatttaaatcatccattttgatactctattggtatgctccagcatttctatcttgttacaccatccatactttagagtcaattttaatcatccacattttgatactccactcatatgctttagctatttttattttgttacaccatctatattttagagtcgatttaattcattcacattttaattttattgaggtgaaaattggatattgcagccccacattattgagtcataatggaatcgattttacattactaatgaaaaataaatgagacacaacattgatgaatcataatggagtaattttactagtacgtaatatttccattatttattgcaagttaattaaaattaagtacaagaaataattaccattacgaagatatgattatcttctcttaattaagattagtgtgaaagctcattaattattataacatagtttttatgggatcttggtcaaattttttaaaatgtggacttttatttaataaataaaatgattttaaatatatttttttcaaaagccatatgaacaaatgttaattaaaaatttgtaaaagaaaaagatgttgggagacctctaagagtcttgagtaatttacaactcgattcgccccacttt

SEQ ID NO: 225176 - DNA, 1922 bp, Cannabis indica
ttttttttttttttgagttggatttttttatgattctgtgatcatgaaagtaatgatagacactcttttatatatgtggtggaaggcttatatttttttaaagggtactttacttgtgtgttggatatttccaatgcaagagcatgtgattagttgtgtttgaaagggggtcttggtttgcatggtcaacatagttattatatataactattttaattaatgcatttttcatggccgccaagccaaacctccctatcataaaaattggatatcatttcaatataatcttaggcgtcttgtggggaaacgacacagtaggcccacacagcttcttgctaattcggtggatttcacaacaacaagggccccaattcatgtacaaccacttgaaatataaaagtatatatatagtactgtacttgatttaattaattagttaactaacagttctgatttaaatgtcaaaacttggatactaagaaccaatattaatgcatagtacatatcccttaaaaatatggatctatttaatctcacagcctgtacggattttattcaccgtagtttatttcttttttatttttcgaagaaaaattcaccctaatttcaatcggtagtacatataatgccgttaaaattattttaaatgtgtccttttcaccaaaaaaaatgttcattaaaaaagtgatgatatctaaaacgaagtaattacatagagcaacatttttttattcctataaattataattacaagtattattcagtaacaatatgcttcactcgatcttaccaaaaaaataaactagtgcttgatatgattaaattaaaacatgatgtaggttaattaatccagtaatttaagcagagctttctattctcgagctctctgatgagggagattatagaatttaaagagaaagaatcacaaggcaaaacaataggtccacaaattggcagtccaaactcttcttcggatatctttaatagctcttgaaagatttcatgtctcagatatgttaagggaagcataaaacgcctcttatcactgctgtaaatcacaaagtgacctctatcagcaataaaggttgtacgacaacagcctgcattaaacgacatccttttgtgcccttctaaaactagcttatgtagtcttcttcccatgattaacttcttggggcttatcatcatgttttcctttgagcaaaaaaggtataacaatgtatggattgcatggaaattgataataagattagtagttgtttatgtaaatatataataataagtaaataggaatagttgtccattctcgtgtagttacaatcattaatttctcatgcatgtaacataatattatttattaggtatttattgattatacaaacactaatgtttgatagtaggcataattagctttgtttggcaagtaaacaattatatatatatgcacaagcacacaaaataatttcttggaaatattttatattaatatttttcaattctgtgtggttggatgattattattaaagacagaaatagtcagtcccatacgtttgtcaacatatgtcataggaaacagagttgtgttaaccataaaagtatgaatattatttaagattatttgtttggcatatcatgttattttgagaaattttctatgttcattttacttattaataaatagtttgttaatacagaaatttttcggatgtatgttttgccaatttaggaagtgttttgttctaattaaacttctaagattagtataatagttacacgtgttgaaatatacttgatacttcctaagattggattttgattttatatataagtgttcctttttgctttttgtttttttcagtaaagtttatatgttatttatatttggttcacacatataccaaaacttaaaacaattataaata

SEQ ID NO: 225177 - DNA, 2053 bp, Cannabis indica
cattcacacttaactttgtcagatgaaattgagcctcctattctctatagctgaaatcaccttctctcttcttttcttctcaacaagaaggagaatcgacatcaaaggaaggagagacagagatccaggttcagatgatgttaatgaaacatacttgttagtaaatccagatcctggtaaaatatatccaacagcttctacaatacatcttccaaaattgagtccttcatcttggcaacgaaaattgtattcagtggtattgcaactacctgaggctttgctcgtaactagcagttccaacttcgatttgaaaaggttatgatcactgttctcactaacatttgtaaagttttgaagtcttcaaaggttgctccttctgttccctctagtgaacgtgtttgcagttcgtctaaagatgatggtgtctcttctaaacttccattagaatcatctcagcctcatgttaatttatctgaacatgactctatgttagctagtgtctagggagtatgagtcttttcctgctacaactcttgtccagggggagtttgagttccttcctgctactactcatgtctagggggagtctcagtttcttcctactgtagctcctgtctagggggagtctgaggtcaatcctacggcctcttttatctcaaatgaagttaaattggttactgatcagggagttgatcctcatactcaagaggagtctcttattgctgatgttcaagggatgattcattctgttaatgatacttcttccctatgtccttctacttctgatcctatgatatcatctctaattccttaggttgttgattctgatgctgcctccatcaatgcatttggtgctgctatagtaaactattctagtagtgaatgattatgatcatcgagggagagatctagtattattccaaaccttgttaatattttgagtttggcttgtgtaatagtgacaatttacagtataccctggtttagttttgtatgtttgaactctgttatggtttattcttagtttggtctttttgtttcttttgtctcactgtttttgttcgttgatcatcattttccaagggagagattgtaagtgctatgttttctctggaaaagtatgcttgttattagttcatctgttgcttgtctagttacatttgtgttgttcttattagtgttgcttctttatctttgttagttgcatctattttatcttctcattttgttttaaccatgtcagcatttaatttgtttatttgttgttcgtttcttgccagtgcaacaaagttgttgagggttgttgtgtttagtcattattcagctttgttagtaaaaaaaaaaaaagctaagctagatttttctacccaactctcatctttgatagaattattcttagattcttgctctgctagggaaaaattaatctgtatatattctgtggttttgaggttgtaaatcattggatcttcaaggttgaagaaggaatgttgatctgcgatgtctgatgggagttcagactaatctgctgaagggagttcagcttactagaagaaaggggtgttttccaagatctaagtggtcttagatccttatgcttgaagtgtctttggtatcatctgtatgaaatcattaagttaacattatttgatgtgtatatcaaaactggaaaatgtatgtttgaatgatttcttattggaggttatcttactcgattcttgggaacccaagcactacccgattggaatgagtttccaatgtaggggaagtttgtaatttaggtttgcaattgatttattgtttttatacttgtgatagagtacctaattgtgatttagtagctttcgacatatcttgaacttttagtaagatataacttaaaggacaaaattatcattatatatattcaattttaaaagataaaataaatattaatagaagtcattacccttaatggcattccttagaaaattagtgagagaagtattccatttcttttatccattctctatttcctaattataataaaataatggcacgtttactacacagt

SEQ ID NO: 225178 - DNA, 3043 bp, Cannabis indica
gcattttaaaatattagaatgactttttcactagttttgtgaaatgacttctattttaaaacgagaaatactaaatgacaccaataatgtagtgtgatttgttctcattcacaatcttacttttttttttcttttgaatgatgaagaaaagcctatttaaaacagtaaaaataaattaaatctcaaaaaagccattttagcttctctacattcccattccctaccaaaatggccctagatagatagtaatttctttgggtaagctcatccctagtttcatctcatagtttacttttgtcaagaaaacaaggtaaaaaaagatgaagtttacttgttggagtggatggttatttacaaggcaataactatttcatcaagaacccaagtcaatgattttaattagttaaaattaagatcaaagccatagaagccttcatcctcttcatcctcaaaatcaatatcatcctcctcaaaatcaccttcctcaaaatcatcttcctcaaattcatcttcgtgtatataaccccgatacaaaagatgattctcttcaaaaagtgggcatgaacaagttgctctcctgttcttccactcggctccacacttgtaacaaaactcatagccacatctgccatagtgatgaaagaaacatgatgagaatttaagataacactaaaaatatcataatgaagtttaatcagtggatataactgcaatgcacatatgtttttgattgggaaatttgataaaatatgacctaaattaaaattaaatcactattggcaatgtaagtctatttttcatatatttctaaattatcgcttttatatcaaaaacttcacccactctctcttttttctatggcataaattttaagcacctatcaaactactatcagaccacatcaaaccacatcgtgctttatcaaccatcgtaccactatcgaaccttcatccctaacctttaggtactcaccatcgtaccctatcgcaccactatcgaatcatataacaaaaaatcacaaaaaaagcgaatttcaccaaaacttgattttttaccaaaaaatacaaaaaaaaaaaccacaaatcgttcatctgtccgttcgacagtggaggttgtgggtcgtcggtcacgcactagagagaaccagagagagcgagggtcgtgggcggtggtgtgattggtgaattttggggtagtttgtggtggttgattggatgagaaggaaactgacagaacgagagggaaagagctgagagtgggctttttgaaatgagaggggtaacttgaagctatacggaaaagttggcacacaaaacctatatattttaactttagtttaggtaattaattttaatctaatagaagcatatttaatcaaattttcccttttgatttgattctaatgcaaggtaagtttaaaaactatagataaaattatccaaagcactagatagagtcatatatacctgcaagtgatgtgatggcatccatgaaaaagttcaaccatgtggttacacttgctacactggcgccaaagattctttgatgcgaggtccttaagctttgcatcctcattgcttgaaattatatttcttacttttgtaatcagaacaagtcaaattatgatgccaaagaactctgcagttaatgcagaagaggctgctgcatttcaagcacttcctagctcccgatagatgaatgcgttctttctttgcaagatcgaaaacttcacttttcgacattaaaaatgagcaccatttattaggacaatatactctctctgtaacaggagttgctgcttcttttatgtgctgacgcaaaagctcaaaaagttcaggtgtcaagaaatcttcgcagctttcactatcaatttcagttttgcagcccagatgaggacatttaggcatttgggcttcgcgcaacttcacttcaacatgttgtttcatacatgaaaagcagtatctgtgtaagcaattcttaactgaaaacatctgatttacatctgtatcctccatacaaataacacaagtctcgtacaaagttaaccgacagttagattcaatggcatcctttgcaagtttaaaagcatgcttaacgtcactacgcaggacatacttcgaattgcaataggcaaactttccttgaagggttttcacctgattcattaggtctttcatcttgcgctgccttacacgccatctaccagaaacctacaaacatgaaataaactcaatatgtcatcatctaaaaaaacaatctaatggtatataagatacaattttatgaattgcattttcttttgatcattatcaaaattcttgataaatggtagaagtacaagaacacataattggagagtataaaatgcctagacttaacataaaagagtaaataagctactgaacctaagaagagaaaaatgtattcccaaaggaatgtacaatcttcaaacttaactcttcctagtggctaaaaccacaattgcatcaacagctacctaaaattagggtcactatccacaagtaatggattccctaaaagtctgtaatgcctaaaattcccaattcagtaaaaaacattaagaaacctttccaaatgatgggatttggtcatttgtacataaatatataccattgttgtgcaattaagctatttatccaaacaaaattcaaacaattataaacaatttcaaaatcaacaagtaaaaaatccaaaactaaaattgagaaactaccataattaagaaagaaaaaaaactcacgaatcgataaaaagtaaagttgtcgcagtaaagagtgatcctttccaagttcatactaatagcagcattgagagcttcaattaaagccttagcttccgccccaagcttactaaaaccattccctaagaaaggtttcctcatctcgaaaatcaaattacctttgggatcacacaaagcaactccaattccagccataatcatattccgaatctcacatttttctttactaaccaaacccttaaaatacactctatacccaatatcaccatcaccatcaccatc

SEQ ID NO: 225179 - DNA, 3209 bp, Cannabis indica
ttttttttcctgacttttagtcactggtccaaattaattgctgtaccttttcctttctcattggtccatttatctttaatagatctttaggccatattatttcttgaaaccaataaaatgtaatgcaatctgattaggctgattagtaaaatttgcatttcctggtgcaatgtgttacgtcctgttcttctgaatattttagtatgcagcattatacatggttaataatcagtacgcatccgcacaataaagattacatgaggatagaatggtacgcaggcatttctctttaggaagtgatagataattagataggatgtgctgctgcagcatgatttaagatttaaaagaaaagttaagaggatgatgaaatcgtagctggcactaaaattgatgaggatgtgctctgtcacaatgtttcattgtgattcgaaagtttgtatttcatattgtgggttcatgccacatttttcttgtattagcttgacgattaatacaagtttgtttcttaaagtaaatatataattgcaaattaagaaattacttcagctgctctagtgagttttttcggcatctagatatatgacttgggcagagtaaacaaaaaggggaaaacaacgaatgtaacttgtgtgttgatggaaaccttgattatatcactggttgataaatgtggcctcttttcttgcacaggtgggaggatagcctcaataatggttctgtaggaagaagtggccagcgttcaaccataagagcctcggcatctaattcaaggcagggcagtggtcggggcaggggtggccgtggagcagcacgtggtgctggtgtaacttttgtgtcagcaactggtgatccagtttctggtagaaggtgttttgtttgcggtgatccttcacattttgcaaataactgccccaatcgtggtaactgaaaagcattatgcatgagcctcatccttatactaatctcaggatattgtctaatggcttgactagaagtgcttggaacttttctgttttggctgttgctagttagaaagatattgtaagtgtttgaagataaactggaatattggataggtgaaattctgggttgctctttggacatttattactaaagagctcaattctccagtgtggtagagaaatagaatagagatttgattttgtagcctaatcgtttttatcatttagcttgtacttgtagaaagtttaatttaatggagggaaaggaaggtatggagacctcatagctggttgatgcaagtgaaatttgatcaaatattgttatagggtaattttataaatacacacaaataataataaaaaagtcatataaaaaatacggccctgctgaattttatttatttttacaatttttaagattttatttatagataatagtctattgatgtatttttatgttgtgttattttgattgttttttgttttgtttttatgttattttcatgtaattttttgtgtttttatagaatattgtaaaattataaaaaataaattttgaacgtaaagtgtaaaattttctattattatatgatttgtattggccttaacgttgtagctcaaactaggttgtaaaaagcccaaatgcgttgcattgacttggcattattcattgctatttgctaacatcatccattaatacagtaataataacatatacataaattaatttatggtgactacttaataatatattaaaaaatgtaactttttttttttcaacatattgaaaagtgtaactatacttacatttttcaacacctttcatattatgttgcgattattaaaaagaaatttattttttgaattgatttaattataattaattatatataaaactttgtttagtaatttgttacaattaatagtagttataattaaatttaattttgaattaaaattaatttttattaatattttatataaaaaaaatatgtatatatattaataaatgaaataaggttaaattagtattaaactacatttaatttattaattaattttagttaatttttttatattaatcacgttaaaacaatgtaataatgatggtcacatcatatttgtatatgtattatgtattgtatgatatgtggggcccttggttacggtcatgttgtaaatatccactatctaagcatattgcacatgcaaaaacagttttaaggatagtgtgtatgtatggaggggaggctggagccttagccttcacaagctaagctatagtataagaaagaaacacatgaattgattcttaaatcgtccaaatgagaaggttggtcatactttattgtttatacctttccacacgatatgagacacttccccacatgtatgctaacttctcttgttctgtcttctcagatttgctaacagaccatctctccccacattttctatgatataaaaatgcctttattgttattattatagtaccactagtgtgaacttttccattttatagggattggtataatacctgacaaaactataacctaatctaatatgattcaatacttcccttatcatgcccaagggttgcaaaaacttctaaagttcgagagattgatgctatatattctcattcaaaatttagagttgattctctaacccattattaaacaggttctcaagcaagaaattcactttcttactctctatttgggctccaaaacaatacaaggttctcctcaaacattgcaagaaataagtcttaaaaacatgtatgactaaactttaatataaataggtcttcggttcttgaatcaaatgaggttgaagtgcggagtacgttatactttgatacaaatttgggattgttgctccaaataattgagtttccttccacaaattcatctatgacattgatcttacattaaagaatgtactataaaaaatctatagtacattttttaatagggtgtttctagtgatgaacactcttaaaagtatcaatccccaatatagaaaaaattacattaaaaactatcaaatattttttttatttgataattatagtacaaaaaaataaaaagaaaaaagtcttcacaaaattaaataaagtagacctagagatttttttataacaattaaggcttcacataatgaaaattctaagttcttcattgggtgtttcgatagacctcttaattcgacatttaagaaaatattttagtctttttttat

SEQ ID NO: 225180 - DNA, 5646 bp, Cannabis indica
tcacacaccccttgaggaaaatagcctagacttccacccaaaaagcttgttccaaatcttatccttgatggattgaaataggccattattactttttcccgcaaaataagggagaccgagatatttatcataacagggaacaggagggactcctaaaatatgagctagataatcaaaaaaatctgatggcatattggaagagaagaacaccgctgacttatgtaaattgacaagctggcctgaagcattttcatactggaaaagtatttctttgaaacgaatgcaactagccacataagcttcaatgcaaaaaaaattgtcatccgcaaataatagatgagaaatcataggacccctcctcctgcaagtgggacctaaaatagtgcccagaccaatctcatgtttaataagcgatgcaaaaccatcaacacaaattagaaacatgaaaggggaaagagggtccccttgtctgagacctcgagatgacccggtgtgaccaattatctccccattaacattaatagaataagtcacagaggtaatgcaacacataatcaaaccaatctagccaggatgaagcccaaacttagacaccatacctttgaggaaggcctaatcaactctatcataaggtttagccatatctggcttataagcaagaaaaccctcgcaccctttcttgtatcgtttaattgcattaagacactcaaagccaatgataaccttatttaaaatcaactgtcctggaataaacgcgctttgctcttcaaagataatttcatccaaaatttctcttaagtgattggtgatcatcttagtaatgatttataaagcacattgcatagattaatgggctgaaattcactagtaagagaaggagacttcaccttaagaatcaaagttgttatccgtattttcggatggaggacacttgtaattctaagatagtttcagctcagttgtgctaggccctatcgcaggcccaaccaagataatggactggatccattagcaaagtcaagccttctggatgctggacagatgactcgtccacacaagatacacctccagcatagcgtatctcctaatggcatcgaacaaatcttctagatgagtaattaatgagcatctagattcatatcttctgattaagaaaataaagtaattatcaatcaagaatttatgtgtctttattatcaataaaagcaggacacagtttgacaactatcaacgtgatgtggcctctacgtcagaagaaaatcaatgcctcatggattaagcctcaccaaatcagcccaaatgtcataatataatatttgtatttaccctatcagtgggaaagaaccctagcactataaatataagaaaactcattcatgcaaagggttggaatctcattccttgagtgcttaggaaaattctaggattcaaacacttgggtaaatcataaggcttttatagtcttaccataataatattgactcgtggattagagtactttaatccttgaaccacgtgaaaaccttggtcttattccttgcctataatatatttctttcagctttattatattttatcagtttctaaaattctcaataaaaattttggtgctttcattgagagttgaagaaagaagtaataccaacgaaattgtatattgcaacaatggtaatcacccaaaccactgtcgacaaatctggtagtcgtgatggagatactcccatgaacgatatgaatcctgctactcggatgaaagcaggagttgatggagatccgacagaagcgaacatttgtcctacttagaagactcattatactaaaagtatgttggcgaaaatcccattaatgaagagaacccaaaagatctagaggatgatcctgaggatgaagatcctgaagatggtagaaaaggcaaagaagatgagtattactatgagctagatcctacaatcattcaaatggttgaagaactcgctaaaactaagaagaagttagcaagattaaaaaccagaattgaatcaagaggagtggctcacgatgaaaatattcttgataaccctgctccttaggaaaataatgctacgaagaaaacaaacccaaaagtccctagaactaatgatcccacgagggacaaaggaatagttgtcatgggagagcctacagaaaagactactctaactgatccatgaaataacacgaatgttgccaaccaacctttacagaaaaagaaggtggccaatgctctagagtaatgtcgctcgatcaatctgtaaggcagagttgtgcggggcgataggtcgagtactcatgtataaaggcctaccgcttagggaaggaaaaattgctctagtgatttggttaactagagtgttggagtagaggaggttcacctagctttagagggtagttattcaacagtggacctctgagcacgtttagatgcaaaaaaagaacgagccagaggtgagaaggcaagaccttatggaaacaacctcataaatcatatcaatgatagagttcatgggcgtgagttctaggatgacagtataaagcgtctggaagatcaaatagctgaattggccaacaaagcgtcttacccataagcaaagtggggctatatcttattcgaaagaagaagatatgtaaccatatacaaaaagaataatagagacacccttgccgaaactttttagagtgcctcagattgagttgtacgaaggtaggacggacctagggtccacctgtctaaatatattcgattgattcatgtagcgaaggcaagtgatgatgcaaagtgcctataatttttgttaactttatcaaagtttggcaaagattggtggaagagattatctcctagatccattcgtaactggaaatatctacaaacgatgttcaaaaaatagttcatagccgcgaaggattatgacatggaggtcagctcgttgaccaatataaaacagcaactaggagagagcctcaagaagtatatccaaagaatgatggatgcagcagcaaaaactaaggtcaacaatgacatgagatggtggcctcaactttagggatatctactggatccctgttaaagggagatttgcaaagaaagaggtctgatacatttcagatttcttatccagagcttaaggcttcataaattcggaagaggcttatgtccatgcttatggagtacctctggcaccatcaataaccatcagtagttcaacactggctccccaattttctgctccaactattgctcctcccagaagtgtattcacgactttgacagtgtatggacctgacgtctcaagaaaaacttctgcatagaccagtttttccagcttcaggatggcataaactgaatgtagtgttgcccccagacagacgcatcaacaaacgtaagatttggaattaaatgtgagtcattcatagaacaaaagaagtgctaagaatctgagttagagtgaagctccaaaaaatgagaggactcatgagcgaagatattttgagtatactagtttggtgaatactcaagaaaatgtttactgggaaacttgccacaaggtccattacaagaaccatcgcctatgtacaatggtgaaaggcataaaagggaccaaagaaaaataatgtgaataccacaacgatgttgggcatggtcatccaattgggtatggatctaatcatctatcccagataggatgtggctcatatgcaactgtttgttcctgaacaacaggataccttaaatcctcctcaaggagtaatttatcctcaagctttaggaatacatgcactaggaattcaaaaaccatgtcttactaggcccccccaccaatccccaagtacctaagcccattcaggctcgtagactatgtaatctttatcagccatgctttgcttcacctacggttgatggccatgtatcaacccatatctgaggccccacacattgccccatagtacccataaatgctcagaaaagatacctcaatgagctatataggggaaatatgtgttcttgtccaaacttctgcccaacatctaagattgatgaacatccccaaatcactttcaccgaagaaggtgccaagcatgtgcatttgcctcacaatgatcttgttatggattttccaacatgcaagtatacgtatcattcacaagtcatggattcataagagttaagtcgatcccacaaagactatagttaattaccaaacaattaaattcctaattctatttggtgacaataaaaagaagaaaagattttttatttctgctaaatagaaaacaaagaaaacaaataattaaggtataattaataatgattaaagcttaaggtgattaatttcaattacatctactttatatagtttaacataatttaattctcaattttaaattttcatgtgatagcggatttactaaataaacttatatttgggctaggacatataaatctcaacctacatgcaactttctactctcgtgataaagttaacaaataggaggcattaagcataaaaatcctaaatgctacacaaactatataggtactttcatcctatatcaaaatctgtgtctatttcaatatagcataatcaatactcacttctcagattttgtattgaaattattaaacaattaattggtgatcatgcaattaaaaataattaagtatgaataaaatagatacacgtagataattggggaagaactaaatcatattaaaatcaaaataaagtgtcaaacaatcttcattaacacccaaataaaaagtctagctactcataatcattgaaaacaactgacaacaattaattaagaacgtgaaaaataaattagaagaaaaaattcatcgaaaaaataatgttgacaatctccatagccgccttctgcctctaatttttgtactcccaaagttgtctccctaaagtgttgaaaattggcctttaaatagccatcagaaaagataaaaaaaacctaaatttcacagtttaaaaaaaccaaaaaaacccatatcgataaatagcgttgaaatagcctaaatatcgataaaacacaaaaacttagttgctggaaacaccctaaattggtccaccatttttcatggttcaaccttggaaaaatggtccaccatttttacagtaccctataaaaacagtaagtcgtttttcctgtagaaacaacctaacttcatgttttacacattaaacccaatcaaatcttcttcaaatctaatcaaactttccagaacagttaatatagcaaatcaaacatatcccacaactttattacccaaaaaaatcaaaattgaaaaccaccatgggtgctcaagcttgagttccatgaactcaaaattggtttcccaaataaacaatagctcaaccacccttagaataacacaacaacagataatttaaacttagaaacatgatttaatactattctaattatacagaagataactcaagcaaattcaatctaaaacctatttttttcttaaaggaattgaaatagaaaaggtttgggccaagcttaccttaatcaaattccaattgtcctaatccttgaatcaaaacctgggctgaattggagcaaaaaccagagtgaaaatttttggtttccttggcttctagggatttt

SEQ ID NO: 225181 - DNA, 2612 bp, Cannabis indica
aaaatataaaaatgaaaaaaacttcttctttttagttgacaatgcatattataaatcatttatttattttttttctaaaaaaaatggagagaacatgtaaatttttatattttataatataaaaatagagaatggacccaatttggtttttcttatttctttattttatcctagaatttccaaatatattataggaaatttgtatgtttaagcttgtttttgagaaggaagttgtttgaggaacgggaactaaggcggcggcgaaggagttgtgttgggttgagtttttaagattaaaaaacaaaaaggagagagagagagataagtaaaagtcaaatgatgctgaagaagaccatcccttctctttcgcttcctttgccttcctctttgtttactttcacaacacaaaaaacttctccatcttttctcacttccagaaaaatggattccctctcagtctcagccaaagccaaacccccaactacgaccattactccaaaaatacccaaattctttcctattcaacaaacttcttctccaactcactctcactctgtttccacattcactttggtctcttataacattctcgcccaggttaatattaatttatcattacatctatttatcaatttatatatataaactcatactctcatatatgtatataggcttatgtgaagagctcttattttccgcattctccatctccttgtctcaggtatatggaatttgactacatagaatgatttcatttttgtggaatactgaatttgaattgacccccttttggtcgcttagtgtaaaaatgagaaagttattttgctaattatactttttgaagctgttgtttttggtgaattcttcatctttaatggctttggttataggtggaaagctcggtcacaagcagtgttaactgttctcaagaatcttggggctgactttctctgccttcaggtatgttgtatctggattctggaatcacattttgcctattttactcttattgaaatttggtatttaatacaatctcattgcttatgattgtgaaacttcacaggaagttgatgagtatgagagtttttacaaagcaaatatggagaaaaatggttattctagtatttacattcagagaagtggtcagaagcgcgatggctgtgggatttttttcaagaatgatcggtatgtcgattttgttgttgtgaaagccaaacacatgtattgttagatttgaattagacagctttggtatttatgttaggcatcaaattagtttaaatatattttattgcacaagaaaagtttagctaggattatggttgctcagttgttaagtctttaatggctgagaggtactgttggcagggtgtccaatagttagagttccattggttgaatggttaggagtatttgttagtaaatattcagattaaataatatgaaaggtattgattattgttttgtgattgtttagagtaaaagatcacccaggagtttcggcaagtttctcgaataacttgcgattttgtattattctttggctcttatcaataaatagcctttcgtagttctttcaagaactgaactgtgttcaagtgcctatcagtttataatggcaaatctacataactggctaaaagggaacctcaatcattgatgggataattatctttagtaggttccattctgtaatctttcgagtatatagaacctacttattagttattatgtgctgaatgttttcactaaagtctacatgggagttgaatgagtatgctcattaaagctgcagggtactataggattgtgttgctcagtgtgcttaaacgaaaaaataaaaaatttgagatgcacatttgtctactgctgattacggtatttttgctgtttttatttctcacaaaggaatttaagtttttcgatgaattaacttagattttccataaaagtaaagtgtaacacaacatgtgctatttttattgttgatagagggtcgatttgcttttttctttatatttatttagttgtcagttcctctggatcagattacaaattgcttaaaatatactttctctatttgagtagttttgatttttggctgaacccttatacatgctaagctgtatgcgaaacaaagaaatgaagggaagacatgttaacaagagtggccatccacatgaatattactctctatttgggagctttaaattgacttatcaaacatccgatttgctactcagtttatttctataaatccataaacagtggatattgggatgcaataaactgcatatttcttccacactggatttttgtcatttatttctcggttgtttatacttttcatgtatgcctttccttttatgatacttttgttgcccattgaggatttggttacaaatggaacagtttgctggaagcttacttttattcttgtctgtttgcaatacactaataggtaattcacaagatcggggggatccaaatgatcctcgagtgaggctaaaacgtgattgtgttggcattatggctgcattcagactcaagtgtcctcatagtcctattgttatagtggcaagcacacatctttattggtaaaaatttcaata

SEQ ID NO: 225182 - DNA, 2994 bp, Cannabis indica
aaaaaaaaaaaaaatgtaaatttttttttacaaaagataatgtattatgtaattatccctaattttttttggactactaattaaagataatgttatttagagtagttgtaaaaattcggtattataggatttttatagtagactctcttaaatggttgtttaagaagactcttatttgttttagcatccaataaaattttttagtctaatttttttatagtagaatatgttgtagctatttaagaacacttataaatttttaaatttttttaaataatttacaatactgaaaataaagtctaaacaattacttatcacgtatataaaaaaaataattacgcataaaacataatatgtaaatctcatttttgatattataaatacaatcaataccaccataaaaaacaaaattagacttaaaaactcacctaaattgtcccacctcaaatttgctcatagcttctgtacgggtaatacgactagtcgtaatgtaggcattcacagaagagatcatttgatttgcacatctgtagttcgaccgactcaaatgggtcccacaacccaactctgtggtcaccaacgtccaatagcatttgcccctctatgcaatttggccatatccacaccaacaacaacaaccaaactctcccccccaaactaccatgctcccttcctccatccgacccttctcacctcatgggcttctcaatcacctcacccccgcccacccacattatctcccaacaccgcccccaccaccaccacccacgacccgaccctaaacacctccctctcaatttgacccgccgctctctcctcctatccacaaccacttctctctccatctccattcccaccacagcaacctctgctcctactccttctcctctgcctccctctccgccggacaccactgtcactgaccgggtttttatggacttcagcctctgccctaactatttccgacccgaaagaacatttgctgatgacatcacctcactctgctccgaatccgttcttcttggtcgggtcgttctcggcctctacggccggctcgtccctcttaccgtcgctcatttcaaatcattgtgcaccaatacgacctcttcttctagttacaagggtactttggtccacaaggttttccctggtcagtttctcctcgccggccgccaaggtgataagcccggcgaagttcgtcgtcccaagggtttggctcgaaacgtcgagactgtggactccaaatctttcgctctgacgcactccaaacctggcctgctctcgctttgtctctccgaaaacgacgacgatgaggatattaagctcgacccagaataccgaaatgtcgagttcttgatcaccaccggtcctggaccttgcccagagcttgataacaagaacattgtattcggttcggtacttgaaggtaggtttcagacgaattatttttctggtagttgaattttgtttgcatttaaactgatttcgatgtgttcttatggtgtaaatgggtttgggaattgattggaaaaacagggtcagtaggttattgggtttgagttggatttggataagggtctcatggattctgtacttgaagttcagattaagaagaattggcatttgggtttaatgacagttactcttttgtaatgtatgatatggtgaaaatggatttgggtctgagttgaataagtctgaattacaagacaagaacatcttcttccatagccaaaattagctttttagatggttgacttgacagttgacagttttataagtattgttcaaaaaatttctctaatcttttatgtccaattaaagtttgattcggcaagaacatgttcttccttagccaaaatgagtcttataggtatttgacttatcagttttatggattattctaaaatttctcttagtcttttatgttcaattatagtgaaaatgatattgggtttgagtttgatttggcacttggattatgcaggtttggatgtggtgacagccattgctgccataccaacttacagaccagctgaaaggattaagcaattcaatgatttggctgagtttttcggggacgaaagagctcagaatgctcgttcgagctggaacagacctcttaagactatttttatcagtgattgtggagaagtcaaagtgacaaagccttcactttctcctcctagtctaccttaacaccattacaccaaccaaatcattcattattatttcaaatttcccatggtggtaacaatgcttctttcctttgtccatatttttattgttttgtatatctttcttgagaaaaggattttgttctactgagtttaatgcatgaagaaatgaaagaaaaatataaaccagagttcaatactataattactgttggtatctgattatatggttatgtgtatatatgtgtttacatgctttcagaattaaaattcaagagaaaatgaagtgaataaattaatgtctgagtcaacttggtcgacaaaacatataatgaaaatttaccaagttatgaaattgacttaaaattttgactaaataaacaattaacaaaacaaacatcaacatcatgctcaagtaatttttttaatgcactgattgttagaaagcaagattaacggtaactctcatttattgttatgaaggatatattgttaaccgtacaagaagttgtatcagtatcaaatctttgtcagatttatctgcaaaatcataagcaaaggctctaaacttcaaagctatattgtagtacaaggctactagaaatgacaaacagtgaatcctcttttctctctcctctcttctttttaaccttaaaattctaggaattttagttgttctcttagctgggtcaccaagaggatgatgcttttggcacatgaggtggagatgcttgcatactagttcagggtttcctaaatttttgagtttggcacgataaaattcagtaatgggaattgatcgtgccaaactcaaata

SEQ ID NO: 225183 - DNA, 4973 bp, Cannabis indica
aatccaatactggtaaattttgccaataccctggaaaggacatagtacttatccaaggtgtaagtataccttatcgtcgattatcatgtcactctaaatccagtgaactgacaaatcttgggaattaaacttttgaacatataataatgattatattctactttgctgacaatactataatcatgaacaaatatatatacatgtctatatatgttctggacttaatagaatttatacattaaataagtcacgtgaaccatgcaatataaaagcgatatctgatcttatattaattagtaaatctgattatattgaaatgagttttattgaaggcacaaaacgatcaatatttttctggtttaatgtgtttgctgatttttaatttttgatttaatttttgttgtttaagtgtgatcttcaagctagaattacagaagttaatttctatacatcgagctaaatttcctaccgcgtgagtttaaaggcattacaccaatataagttgtctttcttaaaaagaataataattgaaaaaaagcttatacaaagcacatttagacactaaaccaataataaattattgccagaacaggaattaagaacagtaaattgtacgtgcacacataaagttagaaatattaatatctgtttatgcattatgaattgagattttaatgtggaattaggccctcaaaggctgaaagagctctcatgcttcattagtggacactttaatatataactctccacctaactgcttccccacaataaagaaaccacattcaatacaccattacgttaattattgcagcaattcaatagtactctcataattatttcgctctgtttttgagtactatactccaacatcacaacccacatttgtcaatatatacctacatatattattatataactgaccaattctagttccaaaactggataaagtattgtaaagaatttacaacaacatggaacttattctcgttccaaaatggctactatctataggattagcactaatactagtagtccagcagcactcctccaactgttcggccatggcgacaaaaattcccgccatcattgtattcggagactcaacagttgatgctggaaacaacaatcaaatattgacacttttgaagagcaattttcatccatacggccgtgatttctctggcggccgccccacaggccggttctccaacgggcgaatcccgcccgattttatctcagaggctttcggcctgaggcctatcgtaccggcatatttggatcccacttacaacattaccgactttgcaataggtgtttgctttgcttctgctggaactggctacgatactgcgacctctgatgtactagtaagtaattatatttttataaattgttattgattgtcttgttgtgatctcattattttgttgtacttgtaacatataaatgtaatgacagaatgtgatgccgctatggaaagaaattgagtactacaaggagtatcaaaacaagttgaaagcgtatgtggggcatcggagggcaaggacaatattgaaacaagcagtgtacttagtgagcttaggaaccaatgattttttggagaactattacatctttcccaggcggcgtttgaagtacacaatagacgagtaccaggattttcttattgaaatttctacaaattttctcaaggaactctacagccttggagctaggaaaatatcccttacagggcttcctccaatgggttgtttgcctttggaaagaacccttaatatttttgggaataatgagtgtgatgataaactgaacaaggtagctctgaaatttaatgccatgttaaagagtatgacaacaaagctgaatgatgagctccctggcttgatattggtgttcacagaaagcgtttatggtcttctgtatagcatgataaacaaccctgcttcctatggtacgtctaccttaattattattattaatttatacacactggaaagttattaatactaattaacaacaataaaacactctactaacaacactccctgatcgcatgtgtcgttgttcattagtgtatatgagtattttttttgataattattagtgttgagtaattaatacatgtttaattgtgttgagtaattaatactgtaccgtatttatttattatacggtacagtgtttttttgtgtattgggttatgtatgcgaaatttaggaagtggaaaaattaatatattataaaaatatgttagacataaatgagtatttttatgtcatcgttcaaaaaattataactaaaagtataaattataaaaattataatttatggttggtaaatgtatttttaaccacactgacaattcatatcgaaatatttaaacatataaaatataagttgtcactagttatcgttgaagtattttttggtggtgaaaacaaaagtaatgtcacaaaatatggttgttttaagggaaaaataaaagagaaccaacaaaatactacaaataaactaatttccaaaaacaattagaggaaagttgctagagcaattccattacgtactaccagaaaattgttatagtttgtcatcaatatcaaaaaaagtcaccaaaaagttgtcaaagattttataaccttggaaaaaagtagtcaaaaaagtctttatcaaaaatcattatagagtaaacattagagtcatcaactaagttggatgttagaatctccgacaaaaaaaactaattacatttattagctaattaaaaatttaacacgaaaccaattttataaagcgcaatgtgaaaataaattaccatatataagatgaatgagctactcgctctattgttaattagttttgagattgaactttattcatcttaaattttaacaaaaactaataaataaaaattagttacctaaaataaccaaattaaaaattaaactttagaacttagttacataaaacaacaaaaataagaaaataacataattaatttatagcttaataatagataaaaaaaaaaaagcaaacgctttggaaatgtatccgtacttttattttaaagatggattagattggttataaagtagagtgtatctaaaacatgaaaacttgccactttgtacaaattaaatgcactgtcaatcaaatattgcagatttaattaaatataatattgtaaattggcattaatttgaaaacttcaacattagagtatatagaaaaggcaccaaattatgaaagtgatcagtatgtttgttttcatgtattattttaatccttttcgatatctctgtttctaattaagtgtcaaattgatctgcaattaataagaaggatatcaaagattagaatgtgctattctttctcgatcttctcctttctcggccccttccttgtcagctacaactatgtatcagtactctctctttattagagttagttctatctatatcattaaagtgtgaaaataaataggttattcttttcatactcaattagttttgagattaaaccttatttatcttatctcaaattctaatatagtatcaaaaacacttatgatctattgtgagcctaaagtatcctcaatccaattagacgagccataaaaaaagctgcttgcgatccgttgtgagttcaaagtgttgccgatccaaacctaaatataagaaaagtgtattaaaattagttccacattactaatgtgaaaataaattgttgaataaactataaatagataagaagactacctagccttgtcaaaaaaaatccaattggcaagtgcttaattaaaagtaaaagaaattgaggcatcttaacaacaatggtggctgtagtagatgcattaattaaataagtggataggtgccggtggtagcttagatatttaactcttgtgcgtttaagaggcagaactaccatatctgcctgataatgtgcctctcagaagaaagaaagagattgattgtgaatatgagcataactagctatccagctgttcatgcatatacaaatagttagttcatatttttaagattcattagttatgctattgtcattatctttcaccgttacactacacacacccaaattacatattttttctttgttagaaaaaataccaaaattaaaaccaaaggataaaaacctcaaatggaaaaaaagtgttataggagatggcaaaatattgtggacttgaatcaatgataaatgaataattaattttaattgtagttatagacataatttagtagtttcacaatttttttcattaaaataaaatctcaaactcaaatcattttctccaatgtcaacaaaataataactaattttaatcacacaattaaaatcttaaattatatttgacttgatatttaattgtactaataaaaatatgatcgacatcgaaaaaaatactaaacacatcggtgctaaacaccatgatgttttttagtatttctcataaaaatgtataccactaccatttaataggcattatttttttttgcttataccatttaataaacattattgtgttcaataattagtgtgtgtgtggtgtacattaggagaggtgtttataaaattcacaatttgtagttttaaatcccgattaattcgaacaaaaccatttaaaatcagatcaaataaatttgttgttaatagttagttaattcagagcgtttataattctctagttcagtcacaatttttagaattattggccgtttcaaacaaaactaaatcgtctgcctaatttttaatatacttaatatatttttttattgaatattaatattcgggagcaatcttaaacatagtagtaataatttttttgagcaaacatagtagtaatattgatttaatattatttttgacatttttcttttttatttattgtgtatgtattataaattttaaaaagtaaaataatttaataaaaaaataagttagaacaattatgaaaa

SEQ ID NO: 225184 - DNA, 2720 bp, Cannabis indica
tctggttgtgattagattagaggtaatgaattaggagaagaaagtgtttgtgtttggattcttgcggggtccatctgaagaatctgtgaattttgtggctgtgaagtagaagagattcagatccattagcaaccatttgcgtatacaagtaactaaagtaaccatcttttttacaaaaatccaatatttccttttgactatattctgtggtagcctttgtttgtactcttcttcttcgctactactctactctgtttaacaataatgatatatataatcaattttgtataattaccatcatttttgttgcttatattcactcatttgatttttttttgaaagcatttacttttgtagtgatgatgaatgattgtgttgtattgacaaaaactttggtgtggagctcagctttacgatacccattgttccttaaaagaaaatgtaaaatgtacttgatagagtatagaggcataattaataaaattttatgtttgcaagagttgtcgtgtcctttaataacactttttttaatgaggtgaaaatatttttcataaacatgttttataaaactgtttttacttttaatttttaattaaaaatcaaaattttaaaaacaaaaataaaaataactttcaatatttttttaaagagtttctttttcttaatcaatatcttggacttcgattagacccgaacccaaatctcttcatggccctggcgctaaatccggcctttgactcgaatccgaccctggacctagacccaacgtaaataaaataaaaaaatgaaaatgaaaatgaacttttgtagaacacacttttgttttctgttttttaaattaaaaaacaaaagtggttacagaatgcatttttgtttttcaaaaccaaaatttttaaaaacaaaaattttaccttcattttgtgattaaaaaattagaaaacaaaaatgttaccaaacggcacctataaatttttatttttatttttagtcataatgtttgtaaaaccataatttgatactacctgtttagactcaataatcctacttaagataataacactatttacctttctgttattaaagtatttatgtaggaaattgaagttattttcattcaacaaacaccaattaggcaatttcagtgaatagacaaatcagccaaataggcctcacttgcaacaatgggcaatgtcctatcccaaatagtagaggctttttcattaagagccacttttgatagacaatgagcaactacattagtagccttaggactaggagtaaaacagaaattaatcaaatgagaatcggttgcaacacaagtttcaaatctgtttcataattccctccatgtatagattttgtcaatgtgctgcaatggtgggagagaggctgatcaaaaaagtcagcttgtgctgcattaaccttccccgaaacatctctagcaatcgcactggtactaaacttgttgggtgtgtaatcaaagtcattgactaaaaatggaaatgatcatgagtatatatggatcgacactattccatttgtatgaggttttttggaaaagtgcctaaaaataaaagcgtaagagcttagacccaaaacaaacaacattatactaatgttggaatcagattgaggtggtggtccgacaaggtagaagaataggcccaacaaaactgaccacatgtgaaatttgtagcagtatcaacattggttttaattgtgtttagtggtggggtttccacctctgtttaggcttgttttcctttgctttcgaacctttattgctacaacgcattagaaattgccttgccatgtttcaagttattcttaatgtttcaattgtgccaagacaccacagcatgcaactcaagatctttccttggaatgactataaggtcagccattctacagccaagggagatggggtcatttaatttttcatgcttacattaaaaaacttgaaactaattttcgaaaattgaaaaaaatattctcacatgtatttttggacaccgaagttgactaagagattgtaaaaaaaagttgatgatagcactccccactttttaataattacaaaataataacacatgcccttaatgacaataaaaaggcacacatagttaagctagctcacattttatgtttaaatagttgaatagttaagttaactttattttgattttatttgatacaattttatttttttttaaactattttatttgatacaatttaggtaggtcagatattaattaacttcaaataattttggtaatatgtcttataaattttttaatctaacaacatatttagaccttgattaatgattacatagtagttatggagtaaaaatgtgtttgaatcacttaatgataaagctttaagtattgatttagttaatggtttatatatttgattttgttattgaataccctactataaaataaaagtttggaatttttaagatatgtaaaattagattaaatttattttgtatgttgaattgctttaatctttcactaattttcttaataacttatatataattttgaaaaatattttaattattgtattttgttagtctctcctctcctacaatccttgaacttgtgatgttgaagcaaaagtcttgagagtagtactattctttttactattctaaaatgtatgatattagctattaattagatttgctcaagttggtgagtacatgagataa

SEQ ID NO: 225185 - DNA, 2507 bp, Cannabis indica
agttgggaccataatatttttatatataaagcatataaatttaaattttccttacctaatcagatatttagaaagtatttgcctcaaaattccatttttaaaatcaagttccagtcctaaaataattagatttgaaatttgggaagaaggtaaaaaaaaaatcagttagctatttctctcaatcatgtagtcttgttttacatatgactcattgacttgtggagtagagtctagagtgtgatgaaggggacagctttatccgtgaaacatgtttgtcgttttagcatgttcattttgaaataaaattgtcgtttttcttttcttttgtcctctcctcttctgtatggactaaccactaaattgtcctcctcactcttcttcaccaaagatgcaaataattttagggctgttcatcactactaaaattgcccgtaccataccacaaaaaaaaatacagtttaaaatttgttgtgatgttgtcaccgtttaaattttttccaaactgcacggtggtgttctttacgattttgaattgttaatataggattcaaaccacaccgaaccgcatatattaatttttatatttatttaggtctaatatatgaaggcctaacctaaaacctattaattattgtattgttgaaatttgaattttttttcatatttattttcaagtcttacggtatttttaccaggtgtcgctcaagctttattgtatttgtgacagtttaatttttagtgatactctaaaccccagaaattgtagaaaccgcactgcgctgcactattttttacgatgcagtttctgcggttttttagttttgcggtgttggtgcgatttgaaaaattggaaaaaccgcatatacaatttagtttgaaaatggtcaaaacatacaccacccgcaaatataaatacccctaacaaatatggggtgttgtgccgagcctaaccgaactgtatttcatctttgataaaaggttttttttctttatttttttttttcattttttgtataaatatgtataataagagttgtgtgtgcctgcttgtaaaaaattataatatcgtgccatgcgttgcaagtgagttcgttaaagaaaaatataaatcattcagctcgtacaaaaatatgaatatgttgtatcgtgctaacactaaaattacatgtattttttatattttaaattacttttgtatattttttcaacaatacttaatgtaattatataaaaacaattataattattaaaatctaaatacttataaatactttagtttttaactcataactttaaaataaattactataattttatattttctaataattttagttaaatgaatataaatactcgattttatatttgaatttatatgtaaataaattattattattattattattattattattattattattattattattattattaatatcacattatgagatgttttaacatgctgagctttagactagtctatttatacatatgtattgtactttaggtttatagtgttgttgtgtaatcaagtttatatttttcatgtcatgttagttgtttacaaaatttgggtgagtatttacttttggtggaagagttgtagtctggagaagcattaaacaaaccaatattatagattcaacaaaccaaatatatagcagcttgtgaagcatctaaggaagcagtttggttgaaaaaaatttacacagctctagaagtagttcaagaagtagaaaactcactggtgctctactgtgacaatagtggagtggtggccaactccaaggaactaaggagccacaagaaagcaagcatattgagaggaagtaccatctactaagaaatatagtagagagaggtgatgtaacaatcttgaaaatcgcatcagaacataacctggtagatccattcactaagacactaccaacaaaatcttttatgggtcatattattaatatgagactaagggagatgcctaattttcttttagggcaagtgagagattgttagagtttatgctctgaaagcctacaaatatattttctgattattaaataaagagttgaacatttgatatatgtatgaatgttaaattattaatattattattgaataatttatattaaatatcgaaaaattccttattcttatatatgaggttgttgacttgtagctgtacagagaactaagaacacttagctatggataaaacaattagtaacatattaaagttatagaatctttaatcaatggttgctagtacggttcactaatgcccgttcttcagtgcaagtaatctcgatttggattatggatgtagtatgacatcaaagtaaatatattgtatataataaaaattatatatgataatgaccgatataatgaagttgtctttattaacataatgtttatcataaagacctagttcatattataacgatgatcaatagtagatcggcctaaatcctgagttatcatgaaatcctgttaatttatta

SEQ ID NO: 225186 - DNA, 2671 bp, Cannabis indica
aagtttatgggtttttagtaactaggtacccttatagtaactagaaggttaaccagctactataagagaataactaggtatcttatgtttttttttttattattttttttttacatttttctaaaattttcttatttctaagaataaaccatatttttacaaatttatactacaaaaatcatatattttttttcttaatataaaggtgagcaagcaagacttggaagatacctatgatgtaccattcaaagcttgtgtagtggaaggagatgttgctagtgtaatgtgctcttacaatcaagtcaatggagtacccacttgtgctgaccctaatcttctaaagggcacaatcagaggtcaatggcatctcaatgggtaagttggtcattttcaattttataattaaaaactttttatgaaataaataataattattttttgattggcaaaaaacagatatattgtctcagattgtgattctgttggtgttctatatgattctcaacattatactaagacaccagaagaagcagcagctgtcactatcaaatcaggtttttagaaaaataccattattttatacaagtattatattatattatgagatgagatttacatgtatagtgatacattatgattgtattgacatataggtttggatttggattgtgggccgttcctagcagttcacacccagggagctataagtaaaggcttattgagtgaaaatgatgttaacaatgctcttattaacacagtcacagtccaaatgagattgggcatgtttgatggtgagccatcagcccaaccatttggaaacttgggcccaaaagatgtttgcagtccagcccatcaacaattggctcttgaagcagcccaccaggcattgttcttcttcaaaaccttggcaaaagcttgccactctcaactcgacttcacaaaactgtagctgtcattgggcccaattctgatgttactcaaaccatgataggaaactatgctggtactgttttactttttcaaatttaccacattaaacactattttcaattttaccactttagcaattcgattttacaaaactttaatctctttgtttttaggtgttccttgtggttatgtgacaccgctacaaggaataggaaggtatgccaagactgttcaccaaaatgggtgcacaaccgttgcttgtggcgacaaccaacactttggttatgcagaagttgcagctcgacatgctgatgccaccgtcttggtaatgggccttgaccaatcaattgaggccgagtccttggatcgaactgggcttctcttaccaggccaccaacaagagctcatattaagagtagctaaggcctctagaggcccaactattttggtcttgatgtccggtggtccaatcgatatttcatttgccaagaatgagcctcgtattagtgcgattctttgggctggataccctggccaagctggtggtgctgccattgctgatattatatttgggtccaagagtccaggtagcttatctattattttctcaatagttactacaatatggtatttttgaaaataaattacataaaagtggtatttgtttttctcttattaggaggaaaacttccaatgacatggtatccacaaagctacctatctaaagtgccaatgacaaacatggacctaagagcaaacccagcaagagggtacccggggagaacataccgtttctacaaaggcccagttattttccctttcgggtttgggcttagctacacatcattttctcacaaactagtggaaggcccaacacaagtctctgtgccattattgaccagtttccgttcttcttctacaaactcaacaatgttaagtaaaggtattagagtaacacatacagagtgcaattccctctctttaggagtacacatcgatgtcgaaaataatgggcctgtggatggaaccaacacattgcttgtgtactcaagcccaccaaaagataaatgggccggagagaagcaattagtgggctttcataaggtccatttagtagctgggtcaagacaacgagtcaagattgatgttcatgcttgtaaacacctaagtgttgtggatgaatttgggatccgaaggattccaatgggccaacatacacttcatattggtgatgatctcaagcactctatatcatttcaagctgatttaggtgaaattaagtcttagaaaattcaaactgtcaatacacattgataagtgaaaaataaatcttacatatattacatattctagtttttttttacaataagtctcttgtgcatgtaaaagaaaggaacacgtggaagagatatagatataattcaatttcaagggaatcaagatcttctattaaaagattgtgtttcataatgtattaaaccaatctcattgtgacacactaaataaatgaaaaaattagttaacatatcggacttatattaagttaacacagtatgatacgcagagatcttcattcattagaatggtaacacaaaagacataagtctcttatatatgccaaggcatgtaaaagagaactattgtaaagccttttggcccaattatatggcaacaaaagtgtaatttttcgagcccattgaaaaagttttaaaaaaagaattttgttatttattgttattat

SEQ ID NO: 225187 - DNA, 2863 bp, Cannabis indica
aaaaatgaaataacttcattgaaatattagcatttagagtacaaaagtatttctagatcagtttaaacattgtgctcgaaaatgttacgaccaaagagtaatcgagaatgtcttgccataacatgagtaactcgatttactgatcgtctaataaaacacaaactaagttagagtaccttaaacactaaaagatgttgtatattattatttgtgcatttcaatatcacgtctcttaagttttttaatttaataaattatataaaaaaagtatacatatcagtatagtgttagacaacttaaaatattaaataacaatacacctttttgtaaaaataataatattagtagtgaagtgattatcacctttaatggtgggattttatgaactagtataaatagagttttttcacatcatattgaaaagatacaaataattctattggtactccaaacatttttttagctaataataatattagattttctttttcttttttttaagacatgtactaaatgatacttccaaaactagttaaaatttttatgaactattcataattaaatgggacttgtattatgttttatcccgcatacctaataaattgctaatgtggctgatgtatcatttttatatcaaatttaaaataattaaaaatataatttaaaagtgacatatttcatgttgtaaatagtaaggatacgatttaatagagataatattttaaatgcaaaaatcttaattagcaaaaccaagtttatgttcattgcaaattcagatcccatatcatattaacaaaaaaaaacacataaaatttgttatatcttattcatatgcacaactaaaaaacaacaagcacaaaagaaaaattttatcattttgtgtggacatttgaaattgaaaatgaaacctttttcccttcccaactgttctcaggacatttcagatactagctagaaaagctctttgactcgaaacccgagtcgaaatccaaagctagttgttctaatttgatgcatttcttcctctctttatcataaactatcttgtagtttaagctacttacatttctaaaataacaaacattttcatcttcttcatagttgtaaacttgttgtgtactccaacttgcttcaataatcgaatcgttctcgataatcattttagcctcaccattctgcagattattcagatgacttttcgataattcaaagccaccaattttagaagacttcttctcttcaaaccccaatttaaaatctgaaccaaacacatattctccatttccttgatcaaagtaatcagagtataggaaaagtgggaactttttatccgattcgattgagtaaacatcagcaaaaggcatcttaacaagaacagaatcattgaattgaatggtttgattcactacctgtgtgataccattgttctgcatcaaaatgaaatttgagtaatgcaaattctggattgaatgggttagaatagtcccaaatgaggacttaactttgccaatagacaataaatttctactagctctagtcaagaatgtcccatctaaaccttcaaaatccgaaacatgggaaagatcaagaggcttggtaaggtgtttcaaaagcttcccttcggttttcgagctgtgtttatctaaccaaagatgcaaatttgcatcaacaaaccaaacattcaaagcgttcgttacattaaacccgaaagtatgaatctttccatctaaaatctcacctagaaatggagtaatttcaatctcatatgaaggaagattgaatgaaccaattcctgaaattggtctccaaaatatagggttgattccacctgtgtaaattacagtaaaaggccatatagcaccaacaatcatagtaccatcaagactaaccaaaatctccctaaaaggaccatttccaggagtatcactaagcccattctcagcaatgtaatcattaggaagatttgaataccaaaactcatcattttcatgaaaagaaacataaacttcaagcacagctctataagtattctgaggaattttaaactctttcaactgagtatccatagaattcttgatttcaaaccataacccatcattcaatggtgaatttctcgaaatgggcaagatcaaatctgcccaattatgatgcccaggaactaaagtttcaatctttatatcattaacatcatcataaagatcagatttttttttcagcaggataaaaatgtatactcaaattcacatgataaataccagtataagtatcatccacaacatttccaagaaaaacagtaagtgtttgattagtcatgagaagagaataatacctagtaatatctttctcaacactccaaaaaatcccagaagaagttggctcagctgtacaactcctcaaaagctcaaccccaccaagccaaaccccaaaaatcctatcaaattgtcttcctttacaagtagctttccactcaagaacaattttcccaaaatcattatatgggcaattcaaaggtgggttgtaatcaactaaaagtggaggctttccataagtgaagccaaaatcatgacttaagagcaatttagagcaaggttttgaagtgggcaaatcaatgggtttggttacttcaaagaattgagttggggaagtgttttcttcttggaagtgtgagatttgggaattgaggtgagatttgagatgggttattttgtgtatgttggctgaggaaaaatggggttggtgaagaagaagggagatactgatgaggagaaagaagaaggtgaatgaggaagccattaatggagattttttgttgaaggaaatgaaaaagattgaagtggtgagaattgataatagttgtaatgaa

SEQ ID NO: 225188 - DNA, 7704 bp, Cannabis indica
acaacatcacaattaatcttatgaacatctatgtcttttcatccattgctcagaagatataacagtaaaaattgttgcaataagtttattcaacatcgtagcttgagcaattaattattgtataaggtacgtaactgcactactaataactcttttagtcgcagagaacttgttgttctcagccattaacaatgatttgatgatgagtaacaaaaaagaactaacaacaaaacaaaagcatgtcatacaaataagactaaaacactcaaaactatatcacagagacaagattaatcacagtaacaaaaatcgaattgcagtagcaaaatacaatcccgaccaaactgcacctaagcccaagcagggacggacccactagtaatcatgtgggggctatagccctactaacaaaaatattgcattttaaaaaattaaatatatttttttttaatttgataattatagactaaaatagtaaacccccacccctataaaattaaataaatttattaagagtgattataatgtaagtataaatattttttaatagtaaataagcccccacaaagtaaaatttctggattcgtcattgaacttaagaaaggtcggcaggcatgaccaaaaaaaaaaagaataaccttcaataactataaatttataaacgagaaaatctaaatttttttttccctattattaatccttgagagagattgatttaaaatctatcttgagtagcatggttgacactttttattaaatcatatagcatatatgcttaagatatttagggctttactatagtggtcgtggtcacaatcaatatatgtgaatgtaatataatacaaattaagcacattgtgcaatatttattttggtgttaaataaaactagtaagatttaatcatcaaattgcttaaaagtttagtttttgttagttaaacttgatgtagtttgtcaaattggtcatcaacattggttacaacaactcccacttaaaataactaatattgaaagaaagaaaaaaaaaaggcataattaattagtattgtgttggtgtttgcatcttaaacctatttatgtaatcttgtgttacaattacaaaattgaaagtttccatttttattttttatttacttttcaaaatttcttatttgcatgaaacatggattgattttggagcatgtcataatgtcccatgaacaacaaaccttaatgggtcatcatcattaattatgattgaaaaaaagttccttatttttctcattttgtataattattttagttcattaattatataaatttgtaatgattttcaaaatagttaaaagatattattatttctcaccgacttttcttgctattatttgataaaacttggtcatattttttgttgggaaaataaatatttagaaaaatagatgagtttctataaacaaaaatggaaaaaaaaatcccataaggaaggactaattttattatttagttttaaaattgacatactatattttatttaaaaacaaaattagctaattttgtacttaaaatgattatttgattaaacagctttaattcccagttcttcataaatataatttttttaaaaaagaatgtgaacaatgataaataaaaaatgacaatagagctactagctagtactacccaactttcataattcttttttatatatatatataaataatattaattaaaatagagaatcaaacatatgaaaaagaagtattacttataatattgatgctaactaacttaaaacttaaaaacaaatttaaataaaaaaaatacaaccacaaaaaaaagactttcaacctaattttgcttcttattttctttaatagtactttgacattaataaaaatgttgaaataagatccaattgaaaatgctaatttaggatttatgtggattgtggctatgttattggttttttttagctttagatataaaagtttaaaaggtaaatatatatgtacatactaatcataaatatttaagtgatttatgtattttggtttgtgtaaaaaatgtgttctaatgaattattaaatagctttatattaagaaaaaaattgatcaaatccagtgaattaaactaatccaaaatataaaatttatataaattgattagatgaacacagtacataaatttacaataacaaaccctaatcattcatctagattgtgtactaaattttattagtagaatagatgatgaggaccacatattaactcgaggtattgacataatttttatatgtattgaaatatttgaactcaacatgtatatattaataatttgatttaaattatatgaatggagaaatatcttttgatttttgagtgtagactaactaatagtgacacatcaaatcaatgatacttttcctaaaaggagaaaaaatatcaatgatactctcttaataactttctcttttgtttgctcatagaatagtgagagtggagttatagcttgacttacttattttctcttctcattttggtgaacaaatcccacttatgctttaggtaaaagcctatcaaattggccttgttacaaactataatacatctaaaaaaatgtcatattggcctatctagtaggtgcttgaaataagcatcaaacctaagcaccaaatatatacaagaatattttgatctaggttatttttattttagtttaaaattcctcaattattaattattattgaataatatgtatgtatgtattgccctaacataaaggttaaaaacaaataagggacacacatctattattggtccacactaccccaataaatattatttaggtcaaatcatttaccaactatttatctctttgtaagcttatgaaagcaacacctcaaataccatgggacattttcataccccactcactcacaagacttattattattattattattctaaccctttatttaaagtgagattaaaaaaaaggcatgccatttgtctaatccaaaggtactaatcaaaaatcaaagaaagtataatagagagttatcactttcttattttcttttaaaatgatatttaacatttttctttatttattatatccaattaacatttaaggattcttttgtctttgtagggcacatttgtagtgatactatcacttaaaaacttttttgtcatatacttataccccattggattgaaaaactaataataataataataataataataataataataataataataataataataatatgaccctcttttaaccaaattagatttgattttgaattacattaaacttgctctaccatttgtgcaagcctaaatatttttataaatatatttttcaattgaataatttatgagcatattattggaggtggggtgggttagtacatcatttttctttgttcttatggttactccaattttcatatctatatgagattttcttttctaaagtatttatttgaggcaaacacattcctatctatgcatacaataatgataattcctttttgtccttttttttaaatgtgaaagagagaccccattagtaaaattcacatatatataaaagaaagaataaaaaaattctataagtgtaataattacaacctcttaatacaatctatggttaatgtttatgctcgaaattacatgtcagaatatttttttttctataatccttatagttacaatatattcctgtaatttttaaaaatttcaaataatttacaataacgaaaaatacgaattacttgatattccatctactatatgtatttaactaatttcaaacttattttcgtcacggtaaattattcaaaatttttgaaaaatttaaaaaaaaaaatattgtaactataatgaatatttctttaaaaaaatatttaaacatatattttcaagcacaaaaattaactaaaaaattgactataacactctttaaaattctaatttgataaatgtttttctcttttttcttttttgagtttttcttggttacaaagaaaacttttttaatttttcttttttccatttattacagctttatttattatctctctcccaaaaaaagaaaatacaaactctgttcacacgtgccagttctaacacgtgcagtatctcttccatttttaaagcagttcaagtatagttggacacttctcagtcgttaatttataaataaataaataaaaacccaataatatcatcaagcttagctttttccttcacaatcgtccactttctcataatccaatttcctctcctttcccggagtaacctcttcccctctctctcaatttttcttctcttctctctcatacccagaaattttttccgagaaaaattcaacctttatttagtttcatccgagaaaaatcaatccctgttcttaacccagatccaaagatcgaacctttaaagcgtttttcatgtttataatttcttagccttcataatcgcaggcgatagattttcattgttggatttgaaaatcctgttttgtactgtgtctattctttgcccaaacagaaattttttctctgaataattttcctttcagaaaaaataatccttttttctttctcttgccttttttgatagtcagaaaccttttttagggttcgattgttaatgggtttcgtttagattatcaatatagcgtgccatatttttattcttaggaattacatacctttaagcatttttatttttagctttgattcagaggatataggttttgaatcattgggtttgtggtgaaaatttgatggatctgagattgtattgctaacttaaatattagcttaaagattaggaataatatccagatggggaatgatctttttggttgaagggaagctagttttggatcatagttttggttgttctgaattgggattgtgttgaaattgaaactcaagaaaggtgaagtgggattttgagtttatttttgtatatacatatatattttcatttggggatttagatcatggagcatgttattgggggaaagtttaagctgggaaggaagatcgggagtggatcttttggtgaactttatttgggtatgtgattattaatatgagtatttctttgatttgttgtatcagcaatttggaaagtttacatttttatttaaatgctttcatggctctttttagtgtgttttgtgttcatgttgctttgtctttgatttttcttcttacagggattaatgtacaaaccggagaagaagtggctgtcaagcttgtatgtgatcacctactttttttttattattattttcttactaattgttgacaagtccttttagttttttttattattattattgtattagctgagtggtgattgtcattgtgaatatttaaagttctcttgggtactatttacttaattatacatgtatggatatgatataatattgttaacatttgaagtagctgttcagcaattagcattaaaaaatcagcttagattttagttgagcagctatgtgtgttgtaaaccccttatttgtgcatgtgcatgttgctgtcttaaaacacatttgctaagatcaatttcaaagtactctaggacttgtgcatgtatatctcttttgagctttattaatagactagttggtttattattattattattattatcatcatcatcatcatcatcctgcctcttgtattttactgtgatataatgtcttaaagttcatctgtacttgattttctttgtctcagtttccaatacaatcattccatttttaccaacttaaattttcttggtttccaggaatcagtgaagactaagcatcctcaattgcactatgagtcaaagttgtacatgcttcttcaaggaggaagtgagttttcctttcaaacatatcagtatcttttctgttagcatttcggttttgactttgagaattaaagttgattattgtagttcattcgtattgatttattatcttatatcatgtagcgggtatcccccatctcaaatggtttggagttgagggtgaatacaatgtcatggttattgatcttcttgggccaagccttgaagaccttttcaattattgcaaccggaaattcacgttgaagactgtgttaatgcttgcagatcagttagtaagttaactattgccttgataaatggtttctaatgtgattgaaatggtttccattctcattttttcaccctgcattggttttcgtagataaacagggttgagtacatgcactcacgtggttttcttcaccgtgatattaagcctgacaactttttaatgggtttggggcgcaaagctaaccaggtatatttccttagcggctctgctttgacatgcatttcatttttctcaatgcaagttctcaatttagtagaacataattccatccttgtattgccgttggaggacattttatccaaaacaagttttgcttttctatctcacttcatgtcaatggggactgtacaatgttaaacaccatggtgattgtactcttgtaaagtatgtagggagcatattgagattaagatagaaacaattggtaaaacatgattatcaatgtttttcattgttcaatacagtatggaggatggcattggttttggaatacctgagtaaactaaggtttgatctttctattttttggaaatggaggattatttaaaagtagaagggagttttatgtaaaaataaactaggatggttggaaccttggttattgtgttacggaaccttaattttgaatctatattttcattgattgtgatattggacactaaacttagtgaacctgtatgaattggagtatggacagtttatccttttatgaatcacttccattaaatccacctgaccttgattatgctatctatcgaatcgaggatatttaacggttttatccttttatgaatcactttgctaaattcacttgaccttgattatgccatctatcaaatcgaggataattaatgcacacagcttaacactctgatttttaattttttaatctttattacaggtatatatcatagattatggtcttgcaaaaaagtatagggatcttcagacgcacaagcacattccatacaggtaacagatatttcagaaatattaagaccttaagcaaagtggaatgtgtttatatcgttactagtgattatcgttgtgctgagtttcaacttttaaatgtgaatattaaagaacaagctgttagatttgtttgggcaaacactagggtaatacaatttggtgttgtcacattatttttcgctcattaaagatactgaaatttcacagtaacaaacagtttttatttgctgaatgtttgatctgtttgtggtataattctatgatttgtggactatagtctttatttcacagcgtcttatttatttattaattgttacatatttctcatcatcaattttgcgttcttaaatcttcaaatttctgcttcttatgctaatttattgtttcagggaaaacaagaatctcacaggaaccgctcgttatgcaagtgttaacactcacctcggagttggtgagccataatgatatagttcataattagagattatgttatttgtttagacttgggggctttatctaattgtgcatgtaattttcatgcagagcaaagcagaagagatgatttggagtctcttggttatgtgctcatg

SEQ ID NO: 225189 - DNA, 5742 bp, Cannabis indica
agaagtgttgcaattaataataaatttgttcctattgtttatttttttattaaaaattattttcaaattttaatatttagaattagttaaattttaaatattattttaaattaaatttgaatgttttaatagtttaactagatgagcattttcattaattgccaagataaatttagcacgaataataatttttttttttaaatactattacaaagtataatagtaatttttatttttatttaaattactattatgctttcaaatttcaatgattatcactaaaaactaaaataaaaataaacatacgtgactttacacataacatctatttagtatatatatatatatatatatatatatatataaataattagcaatcctaattttctaaagagatcttaaaaccttgaagaaaaaaaccaaattatccaaacatcgaacttatttttttaattagaaataagctaaaaacagagagaattagaacgactaaaaacctagatggaatgcatatgaagtaattaactttttgttattaaactggagttccttttttcttgtgaatttcattgttcatttgttgatgattacaccatttgtaaacacctgaagtcatgatatatatatttgtcttccttaaaaaaaaatctatattatatttgccttattaccatatatacgattacagaagcaagcttaagcacatatgacttgacattgctgtgtcatacaattaagtaacaagacagactactaataagataaggattgggtcaatcagtgtattgacttgacattgctgtgtcataagatatttacttgtgtatttacaatcaacagtgtaacagactaccactacatcatcatgtgagatgatttcaggttgatttcattcccaatcagcatcgaagaaaccggcatctttcatctccgagtagtatgcattttccaagttcaaattttcctcctgcattgattaaaatatagaatatacagtaatttgcaaggcatcgatcgactatattaactgaacaaagagaatcttgtcttgcagacaagggttgatgaagcttaccatgaaaaagtcggcaagaaatgttgcataaataagaggaagataaaaggcatggtaacagacaatggtagtgccatataacctgcgatcaaaatgttcgaaacaacaaaaagccatcttactaatttgttgccacatgataaactgaaatcttttagctcctaaagatcaatatcagaaataccagaatccaaaaccagccccattccctgtaagtccgcaagcaaatagcgacactgcatttaatgagaacatgattgcagtgtatttgtagaaagcaggtcttgctgtaaagaagaatagagctatcagattctcccttgaatcagtcataaatttaagagctgacttgtacctatggtgagcttcttacctggtaatctttctctccacttggaattgtacatgaacaatatagagccataaattgcagtaagcaccatcttgtggacaacccacaagccccacttcattttatgtgtttgatcattgctgtcaatgaataatgggattccaaatgcaaaaagatatattgcctgcaagaggaacagcgtctcattagtgttccaatgtgtgcattttctaaccataataaagcagaagaaaaccagcacagttttagcattcatcgcggacaagtaaacatcactcaaaaaagtattaatgaggaaaacagataagataccttcagaactatgtccaaaccaacaacaagccctgagataccaaaagtacgtgtcaaagcctctaatccatttacggaatttccttggaatagaaaagccagcaagcttacttccaaaaacagcatcccagccttggtaaacaaagataggacattccaagccatttcttttcctggagtgcactcccatgcctgtgaaattcaagaattaacccagtctaagctgaatgattggcaaaatttgtataaagaaatcaagcagtaacttaatgagaggtccttagttccatagtcataacaagatccaaataaatagcattttgttgagtatgaagacaatttatatttccaatccaagtttagaaaataatgtattccaatcaaaaccatacaaaaactcccaactagataccatccataatatataggcataagccattaatttcatgtcaaatatgggcactgtcacaacccaaaagcatgaagagcagtctactatacaaagttgacatatttgccttgggtagaaagtgattcacttattatttagataagttggcagtgttgggtcattagaattacaaaaacaagtaagagttatgctccagattttttgtttccctagtgaatagggagtgtctaggggtttccttttacagattcattgaatcgaagatccattagaagctgacatccctttgttctgatcaacagttagaatttagaagccaaaccacactactgaatgagagagtaccagctaggagcgcagagatagagagctatctggccaatcaagtggaggacgaatccttctagctccattatgtcatctagctgcacttagagagttactaacccaaagcaagaccaattcctcagaatcttggccataaccaaataacttaatggtaattcatctaaaccaccaacctagtcacaagccacaatcgatcgtcagtagccaaaccatataggaaagctcactcttggtagggtaacatctcaagcaatcaaaatagtccttgatttttctaagatgaaaactttgataaaagacaatctcaaagcaaactagcttgtgttgtgaacaaagttatatagtttattcacttgaggtttgcgcacatcacactacctatattaacaaactttgtacgaataacttatgcaaaaagactccatattacatattaatatacttgtcacattcatgtactgagcactctaagccacattaagaaagtcctacttcatacacattgatccacagggtgttagagtccaaataaaataatcaagcataaatgattgattaagtctttgttcttattctggcctcatctaatgatgcttattgaacacactttgaaaaggaagaaagttgcctgcttgaagctgaaaccttaagactttctcttgggcaatctatgaattacaaagctcagaactcctcaactcaatcgctgaacctcaaaattattcatttatgaaaagaattgtggtcacagagtgggacctacctctaggctctaatccataaaacaaattcaaaaagttgtttctttataataaattaaggcatttaccctttgtttggatggacttaagattttgaggagaaaaaatttgatgagggaaaaagtggaggaaaatgtttcccacataaatagttctatatttcataaaattttactatacttaagttgaataattctagaaaaagtattcttacttattgatttaatagaaacatgtggaatcctttggaattcattttttcccactcaaaatccaagttccaaccaaacaaggccgtatctaaacatataaaggggcttccaatcagatgtcatactaatagttagcagagaatggtgacccgtaccctatttctaagattatagtgaagtccttgactaaattacttggtggaaagattgaaaatcttgattgaagagaaggcctagaaaaatcctcattctttaagaactcggaaagattgaatttcttcctttcattaaggaagacaccctcatcattccaccaaaaaagatggttattcacttcctattttcaaagcaggaaataagaaaagaatcttagatgtttgttttgggattttaccacatatttctctttgtttcctcctgaactgaatttacttctcttcagctaagtctatgattttcaaaggatgaaatcaatggtctaaaagactaaaacaaagccaactccaccatccaggtcaagccaggccctcaaatagcataatgaaggatcccccgtttataggtaggcttatttgataacgtacttcttataaaaggaattgcgtaacgtaaatcttttgtcatgttgatgctatataaagattataatctaaaattaaagaaagaaaaaaaaaatcagtagcacaacttagttatgaagtcgaaagaagagcgaacctgaaaaaggcaccaaccaagattgagcaaactgacaatccaaaggcacgcgtaatatgaaatcataatataagagcggccatgggagagcttaggcaagctctgtctggcctgaaaacccaggtacaggacgaacagaagcgatgccaagatcagggccgcattatgccaaaacccatggcagtctgtgagccagccgtacaatcgtggacccgaatctccgactggtactgtcaaattcgagccaagagtgaggggtatttggagacctgacggggagagaatttcttgaagatcgcgcattttcgcatgagagaggaaagggaagacttgtgatatgggtgatttgttgatgaagtggtagaaagtagaaaccctaatcctaggtctgatcagcaaaaatggggacgaataatgtttttgatacgcaattgaaaaaaaaaaaataataataataaattatcacttttaattttcttgttggattttttaatatgcatacagaaattgctgcaacaaaagaaaatggttttagcttttaattttcagatgggaaaacggtacactatcacattttttattaagtttaaaagttttaatatattttctatatcgagaacatccgtagaaaaatgtaagtataatttgagtgttcaatttttattccacttaaaaattttatttttttttactttttttattgtgagagagaatttttttcaaaaatactgtatattgtgttaagtttttacagttgtttcacggttgttttttagttgtactattgttgttttaattgtttagttttgttgttttacggttgttttataaaaagacagtatttttagtaaaaaaaaaaattgtgtaataataaaattgtaagcttttatccaaaatccaatatttttataaaaacccctatattttagggttgaggcccgagatgatatccagctaaagattgaaatataatttgcagggatggtacctgtgggatgggtacatgtgggacccacacctaatcgagcggggatttctcaacttggcgggtaatgggattgtagtggaggtgatgtcaatacccgaagtagggtcgggcgggaacagggtgatactaacgccccatatctaacacggtatatccagtatttatttatagttttaacgtatatatattaagaacaaatattgactattgtgtatttattttattgactatttatttatttttttattacgtataaaatgttctttaataataattctttcatcttgaaagttgttggccaatttgttagcctaagatatgtttctaagaggggcggagaattgaaaatggaaattttgatattatatgcttaaaaatagttaatggtgttttaatataccacaataaatatataggaaaataaatctccaaaaaatgttaaatccaaaaatactctcctttagaggttacgtgttggaatatgttttaccaggatctaaatttactaccatgtatgttgtttaacatcctaaatatgattctc

SEQ ID NO: 225190 - DNA, 1597 bp, Cannabis indica
attttaattttttcggggccttcgaaattgtgggcctggggccaaggccccggctgccccaccctctggccggccatgggtgaaatcaaattatttggatgcaaaaagcttgacagtcgattgatataataaaataatcactcaagtacaaatcattatattttattttcaagcactttgcatagtaatttttccaatcacgatcgaccatgctaccatacaacacactactatattatagttataattatagtataatatataaatatatttttgttacatcataattgtgtggttcataattaatctcaaacttcatgagtagctgcagccgttggatgccatgatcttgatgttgcttcagctcgaaagtcaactttagaaggtggcattcccacaaacaatacctccttaatgttaccacaaactcccttatcatatgggctcttggaacccacaaatctctgcctaaaattctcataagcagtctacacacataaacaaacaattagcacataaaacaccattttaacaataagtgaatttgatcaaaaaagaaagccaacctggtttgttgatataaggtacaagtgaaatatggctagaccagtcaagaacatgattgcagcaacggtaaacaagaccaaagcaagagtttcagggcagatcctcaccaacccaaatagattactcccatttttcacaactttttggtgaattctccagcaggaaaagtataatacatagataaagaaagacaaagctgatattataaatgttaggtagaatctgtaatttctctgcatccaaagaaaaaaacaacaaaatcaatatcagaaactctaataagttgttaaaattgacttcaattaagattgaattgactattgaggcataccagtgcaatacactgaccaatccaagggcaatgatgatcgaatttttcgacacaattgtcacacacaacacagtgacaacttcttggtggcctaaatatcttacaagtgcgacaatatttaagtttgagttccactccattaactactacaatcttcttttttctggctccacttctactattactactactacttaattcttcttccatttgatcttcttggcttctgggaataataccaggatcaattgaacttactaggatcaaattcccaagaacctgtattatttttattaaatgtgtaacataaaatttattaggaatactattggtacaagataattattaaggatgatatcgagagggagagcaagggactaacaagtaaagttagtatctctgagattgtgattatgagattggaacgatgatttggtagatcttctccaatataaacacaaaaaatccaaccacacagaattatggaaactgttgttaggagcaacccttttggatcaggaccacacactagtcgtccatggaagaaaaacacctacaaatatacataaaggtatgttgtcactatatatatgaatttaaatgtatgcatatattccatttaaactcaaaacattattatagtcacatataaatttacattttttcctggccaaatttggtagatccgtgtggtttcca

SEQ ID NO: 225191 - DNA, 3045 bp, Cannabis indica
tttttaaaaaaaaaaaaaccattattttgaatgaggttgacattgacaattaacatatattagccatagaagagaatgagacaaataatagttgctcttgtttaaagagccggattgaaaacgccacgtggcccaatcagaaaaggttgagtacgtcaatttacccaatcacggcgtgaccggagaaaaaatcacaaagtccactctctgaccactctctattctttttcactgtttcactaattaatttgtttcctttaaattatataattaatctgaaatatcaatatcttgattcatatttcttgtaaattaatcgattaattaattacttcctgtattaaaaaatatagattaaaaaaaacccacaaaaataaaataaagacaaagaaagaaaaatctttctcaagatccagcaggaagaagagagctctctcgagactctggggtttctctcaccgacacctgataatcggacgccatggaatcctctggatctcgaatctttctagctccgacgttcttagcgattcttctgcttctgatcactggcgcatgttcgttctatctccctggtgtggctcctgaagactttagacaggtcagctctcgatcgatcgcttgttttgtttgaattttgttttctgcctgatatgattttgttttttttgttcgatctatagttgatttgattggttttaagttttatatcggtttgttgtcgagaaagtaaaggaaatggattggaaatttggcattagagaagattcagctgattagatttaggaggcttttttttaaatttactttgagatttttggattgatgattgctttgaatgttattttgttctcttttacaagtacttaaagctactttctgtggattttagttaggaattgaagcttctgatcattctctgatgatttttcgtgttttgaatggataccattattcgcattaaactttgggtttgagacaaagaaatggaaataaatctgaaaaaaacgaagcacttgatttcaggttggcaaagttcgcctgaaattccaggacataaatacattagtttctggtttgacagagttaaattatagaaaaaatagatacaattatcataacatatggaattttgtgtcagcagtagtgtatcttgcagtttttctgcctcagtttactaatggtaaaatcatttgatgccatcatatcatatgcatcaattttttttatagttctttatgatttaatttttctgtttaagttcattgtgcttcattttcgattcactctaaagatgaaaattatgcttcctggaagcttcgccttctactatattgggttaagcatcgaatttcatgcatattggcatgcaattgtgatagccacaccccgtacaaagaattgatttttccaaaagttgggtcacttttttaatatctttctaacaccattatccgttacctgttagaaaattgcttctttgcgctttcctaattccaaataaactaattaatggggaagggaagcagggacatacgctggaagtcttatctcattgcgaatttttgtggtttgttaaataatttggattttcttcggaatatgtttgatgcagggagatgaattgaaagtgaaagttaacaaattaacgtctacaaagactcaacttccttacacctactattctctgcccttttgccgtccagagaaaatcgtagacagcactgagaatctcggggaagtacttcgtggggatcgcattgaaaacgctccttatgtggttagtttttatataactcataaactcaataacttcaggtctgcattattatacttttgttctaataataattgtgtgtatataaaccgtgtgcagtttaaaatgcgggagacccgaatgtgcaacattgcttgtcggctgacacttgatgccaagactacaaaacagttcaaggagaagataaatgatgaataccgggtcaacatgtaaggccacattataagaattttgctactaatacaaaatctacattgcttagtgtgttttgattaacattgcctcgaatgtcaggatccttgataacctgcctctagtgtttcccgcacgaaggttggatcaggaatctcctccaatttatcagcttggctattacgttggcgtgaaaggacaatctgcggtatttgttatatcatcaaagaacttcatcatgttttttgtatgtgaaaagttggcgatttacttgttttacttcttatgtggttagggcaaggacgaaagatattatatctacaaccatttgtcattcactgtcaagtatcataaagatgtacaaaccgacacagcaagaattgttggatttgaggttaggccatacaggtcagttcttctgctgtctctctctctctctctctctcctttttttttttaatatttaaagaattccttttcacttgttttcgtttcaagagtaaagtatgtgttgtcagtttcgtttaattttatggggtatctatagtgtgaaacatgaatacgaagggaaatggaacgagggaaacactcgtttgagtacatgtgatcctcataccaagcaaacggtggttaactccaattctcctcaagaagttgaagagggcaaagaaattattttcacatatgatgttgatttcaaggttagcttctctaatttgaaacactgaagttatatatttaccattttgttgcctatctttgaaaaatcaagaatcatttttttggtttatattatctccattccatatcttggtctgagttactattctgatgtggcttggcttttgtcatgtctgattgtaggagagtgatgtgaagtgggcttctagatgggatgcttatctcttaatgaacgatgatcaaattcactggttttccattgtgaattctttgatgattgtcctctttctctcgggtatggtcgccatgataatgctccggacactttaccgtgatatttccaagtacaatgagcttgaaacccaggaagaagcccaagaagagacaggatggaa

SEQ ID NO: 225192 - DNA, 4631 bp, Cannabis indica
ttagggaatctttgttgtccttggttgattttcattttagacaatttttagtttttttatgtttgtaggtactctatgcgttttatattctggaactggttataaacttttaggatatttgacattaaccattataatatgttcattttttttttttatgttttaacaacaacagtgttatgattttacatttaattatgttttttttaaagtcgtccaattatagataaattattatgtaactgtatacgaactattttatatagaatagatatttatgaaaattataaagttgattgttatatatacaattctatcaaattgcaccttgatatattgttaaggattttgatttgaaaatagaaaattactataggtgatgagagacctgaattttaggggttaattactctttgaaatttaatatgagaacataattattcaattttatgatgcattgagtgaaccataaggaccacccctcttgagaagtactattctttcaacaataattcatttttgttgttaccttttgtcttttttaatgtacacaattataaaagtccaaacaaattaattcttgatttaaaaaaaacaaaataaattcataaatttctcacatggaaaatatgaatggtatacatataaaatagcactacttcctttttttttttttttttaaacttaaaacttaagtcacacttcatttatttggttcatctcatgatatgatgttttaaattgaccaatttcaagcataaatatgcaaaattaatatatatcacaatctttcactttaatctatatttataaattatatttttctttttgagtattctatttaagaaattgtatacatgaaattatattcaaaattacatgaatattgctatatattactgtccaatatatatatggtaaataaattttattttatttttttgaaagagactacatcctaattttacgtccattcatttatttatgtgaaaaagaaattttggtgtggtattattagtcaaacatttgcaagtgtggggacagagttgacttgtttaaattaagtgcaaaattatatagaagaaaagtccaaaaatatttacatttaattcatactcttaagtcttatattattataagcaattaattaagctaaagagaatcgtagttctacacattatttcttattcaagtggcaataaactagattcatactttttcctttcattattgaaaattttcttcaccttttttattataatcaattctttattaattatttcttcttcttcttcaacttattaattatctatagatttattgagaaagttgtgaaaagaaaaatgccactttattttcattatttttcatgaccatcttttagcctctatttattatttattattaaaaaaaaatggccaaaaagaagatcatgcatacacaaatgctgacgcattagcattgtgacaacttaattatgtgattcaatataatctacttaaaaagaaaatttcaacaaaaaaattaaaagacctatattataatcattttatttttattataattttttttttggatcctatagcaaaggactaggaatcttatgcatttagtaatggacaataatgataatctacaacaaataattgtttggaggaaatttcaataagccaacaaaaggccatggtgttagaaatgtaggaaaggctcaataaatgaatacaggtaaaattcatgaaaaattgaaagatataaaaagaaagtaatatcaaggagcagatatatgagaatataattaagagggtaaccccactgaatgagtcgaagtaatatttaatttggatcgatcaaagataattctcatctcagattgtgttgatgaagatattatctaggatcggaaggcatttatctcaattcattcttagactcttcttatctcgaatcagtttaaaatattctttttatctcggaccagtttaagatataacctatcgtcgttcctagatatggcctatctcagtcagtctaagatataacctatctcggtcaatctaagctctcatatctcaaacggaattagtcacatatatcggatgagataactcacatatctcgaacatgataactctcatatctcagatgagatgactcatatatatttccgacaggatgactcgtatatctccgacaagataactcgtatatctctaataggatgactcgtatacctcagacgagatgactcaatatttcgaacaagatgactcacatttgatataaatgatcttgtcaaagatatgttatgacacttcataagtaataataatagacacatgtcaaagaaaatctttataggattgacacctaagggtaaagagggataaatggaagagttaggaggagagaaaagagggggaatggagaagctaaaaagggatcaagaatgaataaagagtcaaaaaataaaagtgtactaaagtatttcagtacttttgataaaatttagcagtaccatctttacaatgactcttcaacgagcttatttgaaacaatgctttgtgaatataacaatcataatagggtctaattatttgatcattcatcaaagatgtaactttaggcacaacaatattaagaattggctccatataactttatttcaaagtagatcagatcgacaagtcaaatgaaaaaatatcaagaaaatatttctgaaagataggaaaaatattattttgatcaccaaaccattccacaccatcatcatcaagaaaatgatcaatagtatatttctttttttcctaggtgaggcacatttgttgaaaaaagattatgatcaccccaactctgcttagaacgatgaacccaataatatttctccaatagagaagcaacatttggaaatggttatagtaatagtatcttaaatagagaagcacatttttttcaaaaaataaaattttaaaaaaaaataagagaagcaacactagaaaaataatagcattttctactcgactatatacatttagcaagatgaagaattaatcatttcatgaatataagaaaatgtctctgcctatagtttttatgttgtaccatagcgattcttattgattaatgttattgtcttgacactctttttccggaatgagattttcatgcgattttaatgaggccaaatttttcaaaaaaaaaaaaaaaagagagaaagagaaagaaagcaatatatctttgggtttatgtaaagattttattagatcatattcattagctatttttttccccactatattaataatacattaaagtatctctctttgtattagtttttgtaggcaaaataatctataaattaagcagacaaatatttagaccaatattcttaaaattttataatgtcatattttatattattatcaataatttgatataaaaaaattaccaatctaaaaaataacaaatattgtgcaacaccatgcaaaaccctctaacctccaattaatctataaattaaatcatgacaaagtgtctaataaaaatagcaacaccttattatcttgtactatattatatggggcaagatgaatcatatccttatatactcctaatcatctttttttttaaaaaaaaaaaaaaaagaaaaggaaaatagtgtctataagaaaataaaacaagggcaagttgtgatacattagtttgataatatacaaaattaaaagattaaaaaaaaaaagaaaaatattatttcaatatatgaaagaaaatatgtttcatcaacttaatgcccacaacggtatttcatctcatcttaattcatagaaccataaacctatatataaaatctaattatactccaatccaagctataagaaaatgatagttgatagttaatgatatatataattttgaaataatcgacattaattattatagtacatatagctagctcgagtgggtcggctgaaaaatgatttattttaatttctttggggggacaaaatccgttggaattattaataaaaattgcttaaatttattttttaattaattatttttatttggttggtatagatatctaaaaaaaacaataatcctaatgggaaaaagaaagaaatattttagtgttggccacatgttgatgttgcttaattatgaatgagctgcctaactaacacaacgccttcataagcatgtgcctactcaaatggtgtgtggtggttggcctttgacacaattcaattgagggccacctccttaattatacctctcttatctcatttcaatattacataccactactactatatatcaacattaatattatgagatcaatagtgtttaatactattacgagaggtgagtgtaaagaatagttagtattttattataataattataataatttacgatataaatatataaatttatttttggctgcaaatatatatatgttttagtttaatttttggcgataataatacttaagttataattctagaatttctgtaggtatctgactgttaaatgttaagtaaattggcacgtgtcaatctttgtttggtccagatcattaaatttctgtaggtatctggaccaatcaaagattgttgtccagatcattaaatttt

SEQ ID NO: 225193 - DNA, 6384 bp, Cannabis indica
tttatttatgataacatagccaaattgtattacacatctatctcccgtggaggttttaaatttgaattcatatccccaaaatcaaaagatacaatattctttctctatcataccttgaaaaaaggatctttacacattttgaatgacttaatgggaattaagaagaagagttcattgtgtttttggcctcaaagaataaggaacaaaaaacatacaacaaaaaagggttagaaagaaactaactccctatcagatctaaatatacaggtagagtagagaatagattcacagatagaataaggaagggagaatttgcctggattgatattcggaaaccgaagctcggtgtgaaaaaaatggtgggaaccgagtgaagctagctgctcaagaacactccatttcacaaaatcttctcttagaatctgtcatgtaaaagattgaagcaaatgtcagattacatgttgaatttagagattgttatgtctctaatgaaaaaacttaatagtgaaatgaatttagtgttaagaaataaggactagggctaaggctgagcatgaaatctaaaaaatcgaaaaaaccgttcaaaccgacctaccgaatactgttggaaatgagatacgaaaccgaaaatcgaaaaaactaccattgaacggtctagttttttttttttcggtaataaaccgaaaccaactgttatacatatacaattagtttttgaacaattaatttgtatagttacaattgtagaatgtaaaataatgtgcttatagaataaattggatcatattttacagaaaaaaaattggtttgggcagtttaaaccgaccaaactgatgttcaaaacagtcggttttaagataagttctgaattggttggtcggttttcggattgcaccaatccagaccaaaaaccgaagtctaaatttttatataaaaaaaaaccgaccaaaccgaccgatgctaagtcttattaagcacaattctccattgcatacctgtctcaatgcaaaaaattcttcaggctagttggttgaagagaatataatcactagagatgatcattatggtctgattcaagccccagctatgttaatctgaaactttcgacgcagaagagctgcaaaaagagaatcttgtttatgtcatttgctccaatcaagaggaaataaaagtatataatctgtgttcattaccttctgctatgctgcaaaagctatctggtgggaatatggtctctgggtctattccatcttgtgaagaaacaaggagagccacactagatttactgttccaaaacaattgaatttcttaagtcaattataaacaggacaggattaatggttgataagggttggaaagcatcataccgagcccatgaaggaacgaattttttattcggtgagtcatcatcttcttcatcttcatcatctgaacatttgtatggagaaatatcatatgactgttctacattgtcagctcctgtgggtttgtctaaattgttcatctagaaaagggcagagtgtcaattactgttgagaggtagttatgaataatttcacagccaaaagggaatagaaacttattaccttcagatttgtcacaagttcacttgaagacctagcatcacttgttgatgcttgtgtagtagcatgttcagtttctgtaagtgtctggagattctcatatccattttgctgttccatcttcttatgaagattccttttttcatctttagattccttagtctcatgtcctctatcatcctataacagtcagagcttagtgtgagtaacatctaaaacaacaagtaaaaataaattgagccaagaacttaaggtaagacatgctaccacggttcggtatttggcatctttctcttctttttgtgcattcaactttcgctcattttctctctgttgcttttttgtttcctcaacacgcattcgtttcctatctctttctttcttctcttcctcttccctttgccttttcttcgctgccatatcagcctcttttttcttcctctccatttctttctgtttcttctgcatctccaattgctttagattctcttgctcgagtcttgctcgctcaagcttcatggcttcctttttagctttgcgttcgtcctcttttttctctgcaagacgccttgcagcctcagcagcccccaaggcctttactttgacatctctttttcctgtaaaagttaaacaaaacagccaatgaaatcaatgcaatgtcaaatcatgagtgtgtgcatttcccaactttactagaatgagaaataacctgttgcaactgcggctgcttgtttttgttgaacaagtggaataaatgaagtaatattcgatacgatattgctaggcttaggctctgtcactgtcaaacttggacctcctctcctcgaactagttcttgttgatgatacttttggcttactaaatcgattatgaaataatcccagttttcccttaggaccagctgttcctagtgatgacatgctatcattctctttgttattgtatcttctcttaatgccttttccatttccaattttctgtttggtcctcttgtgagttccattgaagctgaattctgtgttgactgaatctaaactacttctatcaatatttgtttcagcttccgatgcagcaatgttcgcgattacatcagcaagtggtgctctttttactgagctagtcaggtccttagcaacattgtcttctcggtaagtataagctacttcatctacattctcattttcttcacaaatggatggaagctcaggaactacgctcattcgcttctcagagctgtctgatttcgatatgattctgtcccagacttttcgaactggagacaaacaaggtttctttatctcccaatcaaactgactagttgaactgggaagacaatctgaatatgatctttcttcaaaagcacaactaaaggcctcactcaaacaaccgtaatcatctttcggcttatccatgccctctagaagcccagttggaacagactggtatatatttgaaaatttgagcaatttattcgaaactgaagaacaggatactggagtttgtaagcaagtagatctgcaaagctcctctagaatgctagcacgttcaattgaagtgtttggaagactgagcttgtcaaagctgatcctctgatcagcaatgcatggttgttcatcatctgattgcaaaacgaaactctcgagcacaggcattgtcttatcagcatcaatcaagtgcaatgaatcactataagtcaaagattcagcattccggatttgaaatttttcttcaagatcagatgaaaatttttcctcttctaaagtgtataatgagattccatcaaaggtaaagctacttggatcttccacccttcttgcttcctccataaggagtacatcacaagctgagacatgcgatgcttctggttcctcatcagcagatacaaacatgggatgcttcgttgcacttgaatccctatctttcaaactataatcatcctgcagatacaacatgattgtcatatactgtgcatcagaaaatattcataatgtaaaagtaaaaaaaatgtgttagtgtgtgaaaaagaaaatgaaactgaaaatacctcttgaattaaaagcttcagtgaagatttagacctttcttgcatgtcttcctcctcactttgaggcatcccttcaacttgaatcttaccaatatctaattgaatatcgtcttgagagctttgaaggtctcgggattcttcgacatctttcagaccatgctcttcaggaaacaagtttttaccttcagtgtccctactgagaggagaaactgtattttctttagcaccaagtgaagtagacaaagcattcagagagccacttctttttcgattgttcctagttgaacccttaagagattcacctacactggctttctcaatggattttactgcagcctgccgttcaattgattgatagagacccacatcacaagctccagcagactttctgaccacacttgaaacatggaatgcttccaattcctcattagcaaaaatgaccattttcgtttcacttaaatccctatctttcaagctacaatcatcctacatatacaacatgatgtcatatactatgcatcagaaaattttccaaatatagaaagaacaaaatatatgtggtagtgtttaaagaaggcagaatttttaaccaaagccagaagagaaaaaaatacctcttcaactagaagctttagtgaagatttagacttttcttgcatgtcatcctcctcattttgaggcatcccttcaacttgactcttactgttatcttctaattgaatatcatctagagaactttgaaggtctcgggattctacaacatctttcagaccatgctcttcggggaacaagtttgggaacaagtttctaccttcagtatccctgttgagaggagaaactgcattttcattagcacctggtgaagtagacaaagtagccagagaaccactcctttttcgtttattccgagtcggaccctcaagagatgcacccacactggctttctcaatggactttgttgcaatctgccgttcagttgattgatagagaccaacatcagtgacatcatgagcaactctctctgaggagtctgcggtacagctccgagtacattcaaacttctcagttgattggtagagaccaacatcagtggcatcgtgagtaaatttctctgaggagcctgcagtacgacactgagaatattcaaaattctcagttgacattgcttgattacccataatttcatccttggaaacagaacagggatctgtacacacttcctgaatctcaaaggagacaggtatggatacctgagtgtaatcagcacgtgttgatagtttatgaacaactgaagagatattcttcagtctatctgcagaaactatttcaccaggtgttctgctctctgtctcacttggggttactaaaggttctttcaaagaatatttctctttggaacttttttcactttgctgcaaattatcagtagccaaatccttctctgcttgaggtgtttcactcactgctgatacagcatcttcattcagagcgataatgtttgtatcagcttcctcaacaaaggcttcagaagaacaattcctaagctctctttctttgctaaaggcttccctttcctccaaggacactcctttatctaacacacctccagattctgataggacaagagggcttctttctaacaatctctcctcctcattcttctcaacaaaaagagcagaaaccccatcgaaactggagggttccacatcgtcaaaattcagttgcttgggctccacatgcttagtactaccaacatgatgttggggaaaatcttccacaccaacatcgcttgcaccaatcaagattgacccaaaacagactcgttgctcatcaatatgcgttgcagtttccattacagctgccgaatcagcaggcttgctggtgctggaaataggcgagtctttcaattcatcacatgacaccttattggggccaagttcttttgagctttttaaagattcagtttccagatattccttcaatcccgcagacttggagtgagtaacttgaagacccaaattttgggagctgtcaacttctggtgttccttcagttataaaagttcttgtattttccttgtctgaacactctgttgaattttctgcataaagctcttgatcctctccaattggcaagaaaagttcagctgatatcagtctgtctttgtcttgttgagaactcttcgaagcagaaagtaccaagtccgtagtattagagagatattcgtcttcaaagttccgtgtatttgaagacttcactggcaatgacaaatcatagacagtgttgtgtggttgagaagagcttctagatcgagttacccttctaaaacaaccatcagtagctgatttcactgtttggctcagagacctggcaacttttcctttcagaccataacttgcattagaaatattagcagatttcactgtttggctctgatcagtaaattgggcttgtggtgctagattgcctgaaccacttttcttttcactgtcatagttagcttgtttagcagagcttctggacctggtcattctcctcaattctccaaccttagcttctgctgctatgcaatcttcatagtgactttgaatatgattagcacactcctgaggtggattagactgattaattgaggggccaatagactcttcaattgcaattccatcctccccaacaacattagataaactacctgcattcaaagagttatgttgccaaccagagctttctttctccttgctacaagaatcacccact

SEQ ID NO: 225194 - DNA, 4675 bp, Cannabis indica
aatcacgtaatacgcctatgctagttagggtgttacagctagataggtcaaggggatcaccattctcggtatacataaattccatacccttgcccatgttcaagatactggtatggatgatatatattggacgagaagagccactgacacttatcaagtacttctagatgtagctcgatctccaaaaaatcactaatgatgtgtcacgtggtgttgcatattcacgacaactttgtcagaaacggctcagcaatggtactttaagcttgccccaggaaaattcaattcttggaatgagtttttctgagaattctagacatagtttttgtccttaaggcttttaccattatagctagaagaccttatcaaagtcaaacaacgacaacgagaaccgtgaaaggattacttctagaggttcatggccaaggacaccaaggtaaaaggccttactgaagaatgccaatatacgaccataatggggggtattgttccattgagcgacttctggaaagatatctgcaggatctaaactaacaacatgaaggaattcctcgacaaagctgacagcttcatcaagctagaggaagctatccgacaagcccaaatagagaaagtcagcaataggcagtcacaaggcatcctacagccccatgacttgctaggcacacagacatgcactggtaactctacccaaacctccagcggccagaacactcgtaacaagcacaataataatagaattggaagaaacagtgctaaaaaggggaaatataacacttcttcaatgccaaaaaaactagaagaacaaggaggataagtatatctgcttcaccctcctgaccgagaaacctgagcccatctttatggccactcatggaatagtcccatacaagaagccccctcccatcaaaagggagttaagcaagatggacatgtcgaagttttgtcagtttccattatgaatttttccatgaccaaacgcaggcacaaggtgcccaaaatggagacccaatgcaacctccagtggcgggtcacttaggagtcatcatcgacggaccccatattgtaggcaaaactagtaaagctagggagcactatgctcagacactccgtcacgagcccaaaagcgacatcctagttgtcaaataaaggggctctaagaaaccaaagcttggagagcctgcgatctctttcacagaaggagatgctgctcaaatcagtttcttgcacaacgacctctggtcattaatgcacaaatcaggaatatgactgtggcatgatgcattgttgacaatggtgcctcctccaacattcttttcgaatcaatatatgaaattttggggttccaacatactgatttggaccttgcagtcaagtgatgtatggcttctttggcccgggcattgcactcatggggtacattagaagacccctctctgttggagaaaatccaacccctaaaactctgaaggcccaaatcattgtaattgaggttccctcagttttcaatgccatgataggttaaccaaccctatacgacctgaagggggtgacatccatctaccacatttgcctgaaattcccaacaaggcatggggtaggatgattgaggggagaccaaaaatcttcctattactattacaactgggccctgtccaaatctaagaaagagaaaatgcccgctaagggctctatggaagagcctagcaaaggacaatgtagtccaacccaaagcggggatgcaaacatagatcctcgctttggggatcctgcagaaaaatttggacctatagaagagcaagaggaagtggacgttgatccaacttctccagctagaagactgaagatcaggaagggtttagtgccagaaataaaattagtgctaataaaatttttagggcaaacatggacctgtttgcatggtcacatggagacatggtaagaattgacccttccctgatgacccatgccctcaacattgatctcaacatccgacttgtacaataaaagaggaggttataaggcaaagaacttgcataagaactcaaagatgaagttaagaggctacgagcccatgacttcacaatagaagcattctatccactttgcacatacaacgctgtgatgttgctcaaatccaacaaaaattagagtgtatgcatcgacttcaccaacctaaacaaagcatgtcctaaggactgctttccgcttcttagaatggaccagcttgtagatgcgacaactggccacgaaatcctaagtttcatggacgcgtatacaggttcaaaccagataaatattcatcagccagatcagaagcataccagattcatgacagacttaggcctatactactacaaagtcatgccattttgggctaaaaatgtaggggccacgtaccagtggcttgtgaacaaaatgttcaaacaccttattggccacaacatggagctgtatgtggacaacatgcttgtcaagtccaaaaaggttggggggcatgtggaagacctagatgaatgcttcaggatcctccataagtacaacatgaagctcaacccactcaaatgttctttcggagtaggctcatgaaaattccttgccttcatagtcaatgttagggtaatagaagaaaactaagataagatccaagcccttttggacatgaagtcgcccacaaccatcaaagaagtacaaagcttaacagggtgcattgctgcactaagcagatttgtgttcaagtctacaaacaagtgtgtacctttcttcaatatttttagaggctaccaaaaattcgagtggacagagggatgtgaaaaagatttccaagagttggaaaaacaattggctcaaccacatgtgctatcaaaacccctagacaatgaagagctaggcatgtacctataagtcgcagtacatgttgtgagtgcggtcctaacaagagaaggagacggtgtttaacaccctgtatactacataaacaagagactaactgacgttgaaagtcagtaaccactcatggataagctgacctatagcttgctagcgtctagaaagctaataccatacttcaaggcacacccgataaaggtgtacaccgagcaaccattgcgacaggtttgacgaaaacctgaagcattaggctaactactcaagtgggccattaaacttggcaaatttgacatcacatatcaaccagaattggcaataaagggtcaaacccttgcagaatttgtggatgaatccataaacttatctcttgaaatctctcaagattcaggagaaacgtaaaagtcagagaagaagcgagagcatgagcaacaacataaacctaatgaattgacaaggaaactcaatgttgattgaagctgcactaaccaattgtctagttcaggcattgcccttataacacctagggcaacagctgcatgaagcaatcaaattcagattcaaagcctcaacattgaggctgagtatgaggccttaatagcaagtctcaagctaggccatgaagtgtgggttgaccacctggacatattcagcaactctcaactagtcgtgaatcaagtcctaggtgaatacacagttggaggtgaaagaatgatggcctacatgagcaagatccaaaacttgttacatcagctcaagggcacataataaggtagatccccaaagaacagaatgccacaacaaatgcacttgcccatctggtaagcagcaccactgccaacaaggcaaaaatagtgcaaatatagttcctgaaggaaccgagcaatactgtccctaaagaaatcaacatgttagatgatagtctaatatggatgacatctattacagcttatctctaaagaggagcctgaaagcaagaatgaggcaaaaagtttagaagaaaagctgcaaggtatctaatcatagacggagtaatgtacaaataaagcttcgtaaggtgtgtaaccaaggcagaagtcaagcaactgatgatagaagtgtatgaaggcttctgaggcaaccatgccaagggcaaagcttatccaaaaagatactctgataaaggtactttttgccaacaatgatcaagggctcgatggactatgtaaaaaaatgtgacaagtgccagagattctcaaaaatacctagagctccacccaatgagttcacaatgatatagtctccttggcccttcatagtattggggatagacctaattagtcaactcccaaatggaaaaggagggctgtagtttgcaatagtcgttgtagactactttaccaagtgggcagaagctaaacccctggcaacaatcacctctaaaaaaaactccttgattttattgtgaagaacatcatatgtcgatttagacttccatagaagattgtgtcaaaaaatggaaagcagtttgacagtcacatgttcactgatttcggcaacaaacatggcatcatcaaaaacatctcttttgtggcccatcctcaagcaaataggtaggtagaagttgtcaacaagacccttaaggactccttaaaaatgcatcttgtagaggcaaaaggcaactggcttgaatttctcccaaaggtcctatggtggcacaggaccaccaagaagacaaccactaggaaaactccatttgctttagcttacggctatgaggcaatgttgcttagggctgaacatttagacc

SEQ ID NO: 225195 - DNA, 2669 bp, Cannabis indica
attattattattattatctcctcagtgagctcaactttatgcctttttttcctcttaagaagaaaagtaaattaaagtttataaagggttggaaagatgtgaacttgttttatcaagttgtcaaatttttttttttggttaaagaatgtacccaatattagtctaattctaattacaaattgttaagggaaaattcaaatgaatacaccccctaaaatgaaatgaaatgaaaattgaatttttgttcactatttggacgtatacactctccattatattttacttattagattgaaaatgtgataggatttgataaggtgtatgggttttattttaaaattaattggtgatggaagaaatagctcatgctcatttattttatatttgataatttatttctacacgttaacaatgtgtactaactctaatagactctattctcctcatgtttggaccgggaaagaatcccacaaggtcaaatggaggaggttaaaggaaaaacaacaaaagtttttagattgactgttctttttgaactggcgacagtttgggctcacaacggattacaaatgactttaatattatgttagaatttgatataagatgcatgaggttccatcctaaaactaattggtaatagaaaacataattaattcatcttatatatgataatttatttctacgagattaactccaataaagtaaaacaatagataataagctcaaaatggtttcaaaattatagatatttacataaaatctttttattggtagggaatgggtctggaaaaggggaaatgattccaatatttttggttggaagtttggcaacgtaggtgtatacatgttattgttaggccgttttctttgacgtcttcatttgattgttcaaatattatgaagttgattggtcttattagctagggtttcatattacttggaggtttcttaatttggtctttttgaaaaatctataatagaaaaagctatggcacaatttgactagtgatatcaaaactataaatatatatatatatatatatatatttatagagatgtgattttctcccgtgatgtacttttaccgaatgtattccgtggtacattagatgggtctcagggtatattaaatgaatgtcagggtacgtttctacttattaaccctaattattcctagatcaatctcagccgtcagattaaataactccctcatctgacgactgctgtacatcacggattacaatccgtgaaagtacaataacggaacaaaatcatatccctatatttatataaatatataattataaatatattttttaataatttcaatctcccgtttgattgtttattatttgcctttttagaattatggttccttgtatgtatatatccttccattcaacctataaagcttaaaaattataacactcattcagcaccatcctactttcagaaaaataagatgtgacataatttttattatgattgaatataagtttaacccaacctttgatcaaaatgattccaccaaaaaaaacattattttacacattatgtggatttttgcacaatttatgctggattttttttcaaaaagtttttggaaaaaataaaaatttgaggaaaatagtataagctagttagtatggttagggtaactggttactctaaattatttttttttaatattttttatttatgatttttttcccataaaatgtatatattttttaaaaaaatcatattttttgtaaactttgctaaaaaaaccatgaaaattataatttccttatgttatatagaagaaattattataactttttttttcgttttactttagagggaaataaaacaaaaataaagatagagctacttagggattatttcaaaaatagtcaaaaataacaaaaaaagttacccttttatagaataattttttatggacttttgttcctcacatactagtattttatttttaagttaaaaaagactattgtgtacatatttttcacatcaccgaaatataatataatattggggcaacatgaaaacacttaagttaaaaaaaaaaaaaaaagaagtaatttttggtacttttgtataaattagtttcccaactacttactacttttgtggaattaattgaaaaaacttcgtaacaattatctctctctggcaatagtgccaaataaaatttagcagtgtcaaaaatctatatttattccattgaatgtcaaattaaatttaaacataattaatatattaaagaaattattagaatatattttaaaattgaaaatatttgtcttagatttaatttgatttatttttgcaaaaataatgtagcatttttggcatagctgaaatagtaattaaagaaatgacaaagaaagagaaagctgaaaagatggcatatatatgtaagggaaaaaatatatataaatttcacaatttttttagaaaaaaaaaatcaaaatttacagttaaagctattaattacaaaaatataacatccttttatttagtttgtagatatcaattataaaacttgtaatatattattataaacttgtaaattttagttatgaatttgtgaacttagttcgaaaacctgtatatataattatgctcatccatatttttatattttttttccttctaaattctgt

SEQ ID NO: 225196 - DNA, 11564 bp, Cannabis indica
tgtataggtgcggatcggatatggtcacatgcccgtaatggaaatggttctgataccacgtcaagaatcatggggttccatcttaaaactattagtgcgaagtggagtagttcatattcttacatatgacacaatattttagcatttattctatgtgagacaggatcctataaaaaactatctaagcccttacgcccctttgattgaaagaattttactcaattcattgcatacctcctttattccattattacttatatatgtagtaacttctcactcaaaactacctttccaaacaaaaacttctatttactatatgctagcacaccttactaatcataaggcctaacagatttataagagtatccttaattcatgttggttggacggctaatgtggttgtacatggattagctatgctacttttagggtgctgttgaaacagattgtttagcagtgtctcttttgctaagagacattttttctttcaataattttggattattttttgagattttagcaagtttgttatctagatttttaagagtgtttcctaatccatgttcgttggacgactaatgtagttgcacatagattagttgcacatgctcttaggatggatgaacaacttgtttcactagatgattttctatattttcgttgggatgcttagtacttaaagcctatatgacattaattatattttcaatgaattaatcattgcttttaaaaggagaaggaaaagagttctcagttgaagattatcatgactaaccatttgtgatatactttgtaatttaactggttcattgaccttgagtgagtgtttgtattagtttgtcttataagaaatgaagatggttggtgttggaattatctaaagagtactaatatcttaatctatagactcaagaattgcagataagaaagtgttcacctattcttgaaagttcattgctgtcacgcgacggtaccttggtgtcagatgagtggaaagctgttcctgatatatggaggacatcagctgagaagtacggtgatcgaatagcaattacggatacataccatgatccaccttcagctttgacttataaacaggtgcagtttaagttctatatgtaaggtgtctcattaggatagttagaatcttagtgcaataggcttacatcaatttcagaacaagaaatgcttttagtgttagtttttcttgtgtactgatctgagcaaaaccgattctcatgaaatattaggccaattttatggctgcaattgaattgaaaacttctttttttgtcaaatggttatagaaaaaataagttaaggcactaataattggtaactgactctcttgtgcttctttcgaattgcagctggaacaggaaatattggatttcgctgaaggtttaagagtcattggaataaaaccagatgaaaagctttcgctattcgctgacaattcataccgatggcttgttgcggatcagggtaagcggatattattgcttacattatgtgttgttgttgttgttgttttttcattcatgaaatttctactttaacatacatgaacatcttatattttaaaaaaaaatagaaagaaagtattttggctgtgttttaatcataaagtgtttccattttaaagacattcaaactgccctttcaaagatgcaatttttattttaagaaaagtctcccatgagatgttcttatttgtctttaaatctatgtttatgctttagcttgtccacacacattagttcttggctaaattgaaggctgattttctgttctcgtatcatcctagggagtatgactaccggagcaatcaacgtggtaagagggtcgagatcgtcggttgaagaactattacaaatttataatcactctgaaaggtttggaatgccctctagggcaagttctgtttcttttactccctccatgtattaacaaacacgcgatttttaagtcggatagtctgtgttaacacattacgtactctcaagtcggtaacaccttgtggtagtttcagagtaaatatcatgttagttttcaactaataatcacttctgttaactttagattaattaggatttttgcctctcgaactttaacatgtaccatatcatgttctccaaactttttaggccattaaaaatttcccctaagctattgggattgttagattaaaagccttttgttcaattttattaacagaagtctgacgtggatgaaagttcagggggcacgattttgtacttggacaatcaccacgttagtacaattgagcagaattggacagaagttcttgaattcaacaatctcaatagttcgggggacaaaaatcctaataagccttaactttatatcttataattatgactttcggtgttctactctttttcacttttgataaatgttgttatgtaagtttgactagaaaaaaaataagatctatatggtaatgcatacttgacatatgatgatgtgaattcaatgctatttgttactacagtgtcggacttgctgttgacaatcctgagttgtttaatcggatttcagaagctttccattccaaggcgaaaatacggtttattattctgctttggggggataaatcgagtttgtctaacgaaggagttgaagggatacctgtctataactacaaacagattatacaatcgggacaagattctcgcagggcgatacacgattctagtgacgttagtaagtcactcaactcagctacatgttcgaaaaatatgactcagaatgaaacatgcaaattctaaaccaactgtttttctttaggggaatcctatgtttatgaggccataaactccgacgatattgctacgctagtatacactagtggaacaactggaaacccgaaaggtgtcatgcttacgcatcagaatctgttgcaccaggttcattttcttatccgtctcctttggatgttcttgagattttgaatgaaatttcctcatttttttcgaatcaacttttttcgtagatacataacttgtgggatattgtcccggctgaagttggggatagatttctcagcatgcttccaccttggcatgcatacgaacgagcttgtgaatattttacatttacacatggtgttgagcaagtctacacaattgtgagaaacttaaaggtaatactcttatgttcctaatgttaatttgtgttttgtttcttctaaaatttgatatcaactacaaatttacgcgtaatgataggacgatttgcgacagtatcaacccgagtacataatttcggttcctttagtatatgaaacactctataggtatgatcagtttacgaattgttgttctttttcggttagtgttttgttttcaaggacttgcaaatgattcttttacattctatttgcagtgggattcaaaaacaaatttctacaagctcagcagctcgtaagctaatcgcgcttacatttctacgagctagtatggcatacatggacttcaaaaggatttaccaggttctgattaccacattgaataatagatcacaatgtttcaaaaccaagactgaaatataattgagtttgcttacataatttcacagggaacatatctatcaagaaacccgaagcaaccttcgattcttgtctcgttgtttgattggctatgggcaagaatcatcgccgcaattttatggccagtacatgtgttagcaaaaaagcttgtctatagcaaaattcactctgctatcgggatatcgaaggtactaatgaatttcaacaaaattagagaaatggctttcgattttcaagcaagggattaaaatgtgacaaaattttgtgttcttgctcgtgtaggcgggtgtaagtggtggcggtagtttgccagcacacgttgacaagttcttcgaggttatagctaaattcttacttagctaactcaaatgaattgttctattttcttgcttcttaccctttttctctatgttttactttttaggcaattggtgtgaaagttcagaatggatatggattaacagaatccgcccccgttgtttctgctcgacgaccaaatctcaatgtaagaattgtttttaattaagaaaattgcatggttttatttgctttcaatatgttaacacttcattgcttataaagtttatgagatgtagaatatagattgacttcgacaagaataaataagagtaaatgaatgcataaaatacgcgttcatcattcattcattcatacttttttcttcgaaaattggtacataatatgacaatttcatagatgtaacttttctgaaggttcttggctcggttggtcacccaattcagcataccgagttcaaaattgtagattctgaaagcggtagggttctttcgcctggtgaaattggtattgtaaaagtaaggggaccacaagtgatgaaaggttactttaaggtataggaaattcttcccaaaacaatatagaatcaataccgagttttattatttttttctttttcgttctctttagtgtaatgtattgcgaatatctttatgttgatttctttattttgaatgttggactagaatcccggagctaccgagcaagttttagataaggaagggtggttaaatactggtgatgtaggttggattgctcctcatcattcgagggggagaagtcgtcgatgtggaggattagtcgttcttcaaggacgtgctaaggataccattgttctttcaacaggtatagtaaaaactcgattatcttttgtaacaataatgcttaatggatcataaaacaaaggggaataaattgttttcgttcaatttccaacccttcgtttctaagactgatacaaccacttaggtagaactcactctcgaaagttagactaagtaggatcctaatgatacacctccttggagccgatgttcacaacggcccactctaggcctaatccacaagtcgcctcttttaagcttctatgatgtcaatcccacttgagggtgcacgactctgattctgatttggtcaatgtgggatcctaacaaagaccttttcccgagtgaaatgtttatttttatacctaaagtttatctcttgtcggttatgattttccttttggcaacattatttctctcttacatatttgtgagttgcaagaactgattaaattattttcgagaaattaggcgaaaatgtcgaacctgttgagctcgaagaagctgcattgacaagtcccgtaattcagcaaattgttgtcattggccaggtaaagatcaacagctctggtttcgatttcaccatgtaaatgtattagttttaaatattgaattgcgtcgttaactcatgcaggatcaacgacgccttggagctataatcgttcctaacaaggaagaagctttactgttagcaaaagtgttatctattgtagattctaatgccactgaactaagtcaggagaatttaaagaacttaatatacaacgaattacgaaaacggtaacataatatctttcttcttttgcatttttcctcgaatcaaaatatgagatccttgttccttattcgaagaattgatctttggtttcggttaagcattttttgttgaatgagtgtttacttaatgtatgcttacttttcgtaggacttcagcgtgttcgttccaaattggaccgatccttgtggtggacgagccctttacggtgatgattttttcagtgacttttaatgataaaaataagaaaagaaatcttttgtttccaactttcgatttgctgatttgactcgtctattgcagatcgacggcggtctaatgactcctaccatgaaaattcgtcgggacaaagtggtagctctttacaaggaacaaatagacaatttgtataagtaaaaacatcctatgttcagaataggcattggatcaaagttttttggtataagaactttgtttcatgttataataataataaattaataataaaaattcatgttaaagtttttcttttgtagaaataaatgcataatataattgtatatagtttgcaaagacaagtttttatattatgataataatgatagatttttgaatatttaggaaactatgatttgtttttttttaaaaaataagcgtagtgatatattgaaaaatattagacctcatggtcattatagaaaatattctctggtaaagagtcaatcgaaatagatatgtacatctggttgttaaaagcctaatttgctacattataggccgcaaagttacaagacctactaattttcgtttactatgatttgtaagaaagaggggttttaattatgcggtttcaaagttcaaacatcaacatcattgctcacaattattattattcttttactattttgtctagttttataatttcaacatataaggttaaggtttctatctatcgctgatacgtaatttaagattgaagaaaatcgcactaagtaattccctaatagttataaaaaaaaatgaaaacaaattcaaagaaaaactaaaaatgtttttgtaaaatacttatttatatataattaatgatttacataaatttttttaattttttgttttattagttttttttagtaaatagtggtataagtacttaaaattttgagtgcgacataaacttattatttatttttatctgaataaatatctactatttataaaattataattttcttctaattttatcagtataaattttattttgaatttataaaaagaaaatttaaaagtaactgatattatatatgtgttaattaagacaataacacattctgttctaacgaaattagaaaaaaaaaaaatacaatttaataaatattaaatacttgtgcttgttatttttttgtatgtggtaattttgaatatattatatacatataagaaaatatattttagacaaataatgtctcaaaattaattatatttatatatatatttattatgtgttaatggaacattgaatgaaaaggctacactgttatttctatatgaattttataaaacaaaacatagtcgttttttcagttaaatgctaacttttcattaccttaaccaactcaagctctgttccaaactcagatcaacttctacagccaagaaaatccatgcccaactcatcaaatcagggttagattcatgggagccattgccaaacacccttttaagtgtttacagcaaatgcactcttttcaaagatgccctccaagtgttcgacgaaatgcctcaaagagaccatgtttcttgggattcaattctcactgcccacaaccaagccaaccttccccgtcgaacaatctcaatgtttatcaccatgtcaaccgtcgataaattgcaaccggaccattttgtgtttgccagtcttgtcaaagcctgttcttgcttgaataatgttaggctcgggaaacaagttcacgggcgatttatgttgtcgtcttattgtcttgacaacgttgtgaaatcttctttagttgacatgtacgcgaaatgtggtttggttgatgaagcttatgctgtgttttgttcaatttctttgaaaaatgcagcttcttggacagctatgatttctggctatgctcggtgtggtcaaaaaggcgacgctataagattgttcgggagaatgccgttttaggaatttgtatacttggacggcgttgatatctggattgggtacaaaagcgggaaatggtaatgatgcttttaatttttttcatttgagatgagaagagaaagaaattgatataattgatcctttagttctttcgtagcattgttggtgcttgtgctaatttggctgtgttagagctttggaaaacaggtttcatggcttagtgatatcatttaggggatgaatcttgcttgtttataagtaatgctattagttgatatgtatgctaaatgtagtgatatttcaaatgcaaatgaaatctttagtggtatgaaacaaagagatgtagtttcttggacatcaatgattgttggttttgctcaacatggtcaagccaagatggcattggatttgtatgatgaaatggtttcggttggtgttaagccaaatgaagttacctttgttggtttgctctatgcttgtagccatgttggtttagtcaaaagaggaagagctcttttcgattcgatgatcaaggattatggaatcaatccctctcttcaacactacacttgctttgttgatcttctcagtcgatcggggcattttgatgaggccgagaatgttgtaaacttgatccctttcgagctcgatgaagctatttgggcagcattgttaacttcttgcaagaatcggggaaatacccaaatggcgattaggatagcgaatcaaattctgagtactaaactcgaagatccttctacttacataatgttatctaatgtctatgcaggagctaatatgtgggaaaatgtgtcaaaagtgagaaagctaatgacttctctagatgttaagaagaaaccgggatatagctccatcgagtttggaaaagaaaggcgagttttttatgctggagagacatatcttgatccgataagagatgagattttcggtttgcttaaggaactagatgaagaaatgaggagaagaggttacattcctgacactaactctgttttacatgacatggaacagcaagagaaggaaaggcaactgttttcgcatagcgagaggttggctgtagctttcgggttgctcaaggctgtcccggggacagtgattcgggtagtgaagaaccttcgagtttgtggagattgtcatacagttttgaaattcataagtagtattgttgagagggaaattgttgttagagatgctaatagatatcatcatttcaaggatgggagttgttcatgcaatgatttttggtgataactataataacaaacatagttgtaaatctttttctctcttagccaagagtgttctttagttatttactttggttaatttttatttgtagctttacttatgttgttccttttgcactagttttaaatcttctttttaaagaatattggataaatattattttagaccctggattttgtaaaagttattaattggactttctcttttgttaaatgataaaatgaacctgtatttattaaaatggtaatgacttttatttatttttattttattttttaatattaaatatatattaacaattttgtaatttaaaatatgtcttacaatataactaccatacattataatttaactcaaattagtaatttagtcaatttaagcattccgattacgttttaagataaagtaaacaagctaaattattattattcaatttctaaataattttagcaaacaacatattataaatattgattctgattactcttcatttattctattatatttctccattaatttattctgattatgaatactgtgtagtaaacgtgctattaatgtaataatttttagatagtatcattaaccaatcttgaaatgacacgtctagaaagtactagacatcactagtacccaataataatgttctttttaaatttcaacttcaaaaatctaaattagcctttaataaaacaaagagcccaattaatacttttttcaaattttaaaatctaaaataatattaactgcaactgacggtggttcttgttatgctatctcgcgttctgcgatataactcatgcactagctaaatctattatgtctgaattaagaattttaaaatgggcagatacttgtccctcatttattagtgctcctgtaacaattgatttttttcattaatgaaaaacttattttcaaaaaaaaaaatctaaaataatatttaatagatttttttattatttattttttcatatatataaagattgtaatttgtaagagagagagattgttatgtttgaaaatggcgaaccctagaagaagctcacattcaatctcagacagcccatcatcaaatccacccccactacagattcaaagtcaaagtcaaaggctaataagtcaaagccatatccttcttcacttcctgaagaagcctcaggccttccctttcctccttttcctcttccttcttctcacatggctctttctccgactgcattctccaactcccaatcctcctcttcattcttcttcttcttctcatcaatggacccaattcgatgattcccgcgccaatcttcgaagattctcttctaggtttccttctacactcgctaaggatcacatgggctggttattcaaccccatttctctcgctcttcattctcgcctcttcggtatgtcttctctctcttaatgaaatttaatattgaaattgtattttgattttttgaaaattggttaacagaaagcaaatttgttaatgggttttataggattaagagaaatgtgctaatctacctttgaatttttttcaaatgtattatgatattatccctaactattggaaatttaatgagcttataatacaattctaaatgggtatatattgaaattgtattttggtttttggaaaattggttaaaagaaagaaaatttgttaaggggttttataggattaagagaaatgtgctaatctacctttgaaatattttctaaattgtattatccctaactattggaaatttaatgagcttatattacaattctaaatgggttatattgaaattgtatgttggtttttggaaaattggttaaaagaaagcaaatttgttaaggggttttataggattaagagaaatgtgcttatttacttttgaagtttaatgagctaatattacaattttaagtgagtattttgaaatgtattttggtttttgggaaaggaaattggttaaaagaaaacaaatttgtgggggggttttataggattaagagaaatgtgctaatcattgtggcgggtttgatttgtaggatgaagattgaaatttaatgagcttatattacaattttaaatgagtatatattgaaattgtttttggtttttggaaaattggttgaaagaaagaaagttttgttgggggggttttataggatgaagagaaatgtgctaatcccattgaaatattttcaaatgtattgtctctcactattggaaatttaatgagcatattttacaattttaaatgagtatattgaaattatttttctttggaagttattatatagtaggaggtctattttgatttttggaaaattgttttctgattttgctatttcggtaacttaaaacaaatcaaatttgtgtgtgtgtgtgtggtggggtagggtggggttatacttagtaggattaagagaatgtgctaatctaccattagaaatttaatgagcatattaaaattttaagtggtatatcgaaatgggaaattagccaaactaacaatttagtaatagtaaaataccattagaaatctgttggtcacacagtataaatctatgattgcaaagcgtattgtaatggtttgtttaatggtcgcacagtgtaatagtttggtcgcttcacgttgtgcaatcatacatggttattttaccaataaaaaa

SEQ ID NO: 225197 - DNA, 3018 bp, Cannabis indica
tttttatttattttttagtttttatgacatggaacatcataattatattatccattttactatttttgaaaaggaaaaaaaaaagaataatgtagtatccaaaacaaaatgcaaataatttgttggcatatgtggtttatatacatataccatttcaatattataaattatttaattaaaaagaaaatgatggaatatttgctatatctgcaatgaataatgtcacctataaaataaaatataattgtaactatttaagcattgaaaatacaaagtgttacttccatagtaaagttccttttgttccttttgttgatacaaaactctggacgtaaaaatttgatcacatacgctcgctagattgacaagaatgtaatgagaagtaagtaaaagtaatagagacacaataaatttatagtagttcacttctcatgacgcaagaataatggagctacgtctacttcgagtttttatttctcacaagaattacaagaaaccgactaagtgtggagctcgaatttttaaagagagagagtagagagagatgctctaaccatatggggactaagaagaatgtgaaaaataaactagagaagttcaccttctatggggaagggagtctaaaaaattaccaaaaatatgaagaaaaaaattcctttaggctgatcttggccattgatgatgatccaatagtaaaaattgacttttgatgaagatcgtcaatttttggagctttaatcttgtttgttggaacgttttactgaacacttttgtgacccctacagttaggttgacacacaacgaccaagttgacattctagatgctggatgagtaaaaaatatctcaaacttgtatttttttttttaggcctaagtgatgtgttgacaccacttagtcagattctacgttccggtgaagttgttcaccatttctcagagatgtcattcttttgtgaaatcaaggaagatggagagacaacctccatttggttccatccctgggttccatgaaccgagttacagcctcaaccaaggcttgatgctactgaagggataagtctggtaagtaatttcattgacaactatatggggaatgagtcgcaagtgaggaggtggtttcatgcccaggatgccaaacgtattctaaatatcactctccctaatcaaccaacgtcagattcctggttatggctaccagaaaagaatgtcaaatttaccataagatcgacctacaggactatcaaatgcctacaagatgaagtaatttccaatgtgaagtggaggcacatttggggtgcaaaaatgcacaaccgttaaaagatgctatggtggaagattcttgcagattctttattgacaaggggcaagctcatgacctctctacaagtgaatgaaattttatgcccattttgttattgaaagtggaatactccttccacatttttttgggaatgtgacttcgcaaaagccatttggtttggatgctcctggcaaattagaaccacaatggtgaatgctactaattgggacagttggttggaatggtcagcttggaggtgaatcgaccgacaaattccaacttccacttgtttcttgcaggagccgccattatttttgaaaagatctggcatgaaaggaattgtattgttcataacacgaaggctactccatttcactccttactgtagagggtgaatggtagacttacggaattgaaagaagaacacaacaccaccattaactctgctactcagaggaatccacccctactaggatgggtgttatgcaatacgaatgtggccattggtagcctccttactgctggtgcagctttgttttggaatgaggaagaggagattattaacgtatttacaaaaagactgaattacaaggaccctctggctggagaagtagccactctttgctggggtgcagaaatggcagccaatctcaaactcaaaaaagttatcttccaatgcgactcagcaagtgcagtggaggcaatgacaatttctcaatcaaaggtggccgaccttgatcacaacattcaaacccttgttcaatccatccatgattatgctaacagacttgagctttcggaggctagctggataccgagacaacttaattgtgcagctgacaatgtggcccgtagggcaattcgttctggcaagttcgagaggattaaattgtccaatttcgacagctccctgctctagtgtggggccgatggctgatttaggttttagcttagtttgattttgttgttgtttttttcttactgtttgctgttttttgttattggctttcaggttgtaattctttgatggttttgtgttagctgttagttgttctttgcgtgttggttgctcttttggaggcaacagtaataaaaaaaaaggaaaacttaaaacttcttgattatgttgatatttcaccttgttgaaagggtaaaatattaaaatgtgaattaaacctgccacaaatcgtagctcttatttactaagaaaaaattcatggagttttgaatgtggagttgtagagctctgatagcggtggtgaaaattggttatgatttttttctcttttgatagatgtatatataggatatatagaaaccattgttatgtacctaggtgaggaaatttttgcaaccatttgatctatgatgaatggttataaaagcgtaggtgtataagaatactttgtaagtgtactatattatattatttcttttattattttaataatacttaacaattaaaattcttttaagaaataatagaagaaaaggtggttgggatggggttggactatatattctgaaacatttaatcatggaataattatgggaaaaaaacgtgggagagatgagaaggagcttgaagaagaagatcaaatgccaataacaaccataagggagagatgagaatacaatataatatatttttttagaatttttttaaaatagaaaggaaagagatgataataaattattttttcttattttttttttct

SEQ ID NO: 225198 - DNA, 3345 bp, Cannabis indica
aacaacacaacaacaacaacaacaaaatagcacaaccaaacttatcatcacaaatgaacattttcacaagttgtatctaatatgagctaagagtgccaataggttcagtagtccctcctctgttcaaaactctctctaaccttgtctcaaatggagtagtgtgccaattcactcttctatcctgcaaatcccataaaactcaaaaatcagaaaactatatcacacattgtggcttgtttgtttgttccccataatcagtgtcttaatacttcatcatattatatacctcactgtacttgctagttgtgtttggtattcctttgaaagaagtatctgtaccagaatcattgctagtagtagtagcccctgaatgactccaataggttccaacagtacctattattggcatctcatcggggcttcgacaaggggatttcttcggcgaatttgttgttgagaattgccttatctcttcaacagtcaaagcacctaatattggcctatcttcatctttgcttttcactgagtttgatccttgagatgtgcatctatcaggagtagtaaaaccaaatgagctagtcttactaataggtgtggtatttcctggtgtaaccaaccaatttgagaggctagcatcaactgccatatcttgctttggcttaatggattggtcattttttgacttgaaactaagagataactccttgtaatttggttcttgatctaatgagaaattattctctttctgaggtaacatcattactggtttacctccttttactttcacagctttccattgagaaagattttcaaccggatttaggacagaatgaacataacctcttctatctcgagcatttcggctcaacccaattgtttgtatctcattatccacttccccgaaagctacccttttcggtgcaatgatttcatcttcataatctaactccccatcatcaagatcatcctcatcctcatcaagatcactgtccccaaaatccaactcttcttcttcatcatcactttctctacaattttgatacctatgattcgggggaaaagatagcaaggagctcgaagtgatcgaactctcttcagaagaacaattagataagcttaatttggcatgatctctctctttctccttctcctttttcttaacatcttcttcactaactggtgaaacatctgtatcatcatgagttgaaacatgttcataagttttcacatttgaatcaaaagtcacctttttccttgtactcaagcttggttgaacctcgggctgcttctgcctgaaaataaaatgagaaaaaaaagctcaaaacttccattaatacccaaaaaaaaaaaaaaaaaaaaaaagtaagaagctttccactgttaaaaactttaatcacttacgaaagctcttcaactaagctaatggggttttcagactcttctcttacagaagagacaacacattgtacggaattgaaactagcattcctctgcaataattttcaaacacattagttccattccagataataaacaaaacccataatcacaaactaaaaatcaaatccaaaaacggaaactttatctcaaaactaaaatgggttgttcttattttcataaattttctcaaaccccaaacagaatcaaaaacaaaaacgaagatgaatctgtgaaaggatcaaagaacaaaaacaaaaaacacatacttgttgttgggctcctcttggcaaaacctgattcctatgtcttcttctaggtttacgatcctttttagaagtaccaaaacaagcaagaaaacaacccatcagagttattgttcttaatttttctcaaaggtaattttttttgctctttctttgtgtaaaagaaagatctttattagaatttcatggtttcaattcaaataacaaaatctttcagagaaagaaattgaagaaaaaggaaaacaggggaagagagaggagcgttggaaaaaggagaagggtagggacaaaacggtcataaaaaaatttgaaaaatttaggacctttttttagggttttatatttattttttattttaataataataatattttttggttaaaggaagtgaccgttagaggttttggttgtgtggatcacagcctgtaaatatggccgtttttttttctttatggtcaacttttgatccacaccgttgatctgatccttgtttgtggaccccaaccgttgatctattatatttgtttttttagggggatttctatttatgtatatggataagatgagaaagaaggaagaaaattatgagtgaggttattatagaataattaaagcaataaagataagactaattcaaagttattacaagcttaatgtaataaacaacaatgaaaataaaaacgacatcatcatttgaaaacgacaaggacagtaccaagtcaaattaagaaactacaatgacaatagtatcaaaacgggaatcattaatgagatctaactttcatgaaatacatactgatgattcaattaaaaatttggcacgtggtctccaatattatcaaagttaccgaaaaaataaaaaagatttgcactacataatccccttttggttcattaaaaaaaaaaaaccctttgattactaatgaaaaaaatatagccaaaaatatgtctttccctacttctttgtgatctttatttttctttttcttttttgatcaacttactttaaattactttggtggattgatatctactaagtaaaaactaaacaaaaatataaatataatggaaatcttagattgtgtgaaaaagctacaagacttaatccttgtagaaggcaaagaaacaaaataagcaatggtcttattttggtcattggtcttgtttgtggcgtagaactgattgtcatagtcattgtaatcactcttattatattgtgtccaaaaaatcaaagtgttggataagtacaaacaagatcccaacaaaaatggcacgcaccagtcattgatttgggagaaggaagcaaaattcacatttggagaaattgtagaggcaacggaagactttgatgacaagtgttgcattgggaaaggaggttttggtactgcttacaaggccatattgagagcacatgagttagttcttgtgcttaagcggttgcacatgtcaaattcaagtgatatttcagaagttactcgcatcagttttgagaatatgatccaaactttgaccgaagttcgacattgcaacattgtaaagctttatgggttttgttcaagaaataatggtttgtacttggtgtataagtatgcaaacatgggcaatcttggtaaagtgttatatgattcaacagatcttgatt

SEQ ID NO: 225199 - DNA, 5843 bp, Cannabis indica
aaataaaagtgttaccaaacggtacccaaattaatcgagctagctaaattcggcactaattttccattatctcctaataatattaatgaagaggcaagaaaagaattattgacaatgaaatgattgaagataacccctatattgaacctaattcatccacatgctccatggggagccaaagatcaattgatgttccattaccaataatgaatcaagattcatctttaataagatctctcaaagaaaaaattcccgtcgccccaaaagaggcacttcttggcttgaaattaaaccagaggacttgttctcaccatattacttagccaattagccaagaaggtttggcaccatagtgtatcctcaccccagaccaacttcaaatttcttaagattgagacctcccactcaaggggaaggctaatggaattccaattagtcacacagccaaataacagtttctatcagaagtgcccgtccaccaacatttgcaaactacttgtctaagtcttgacaaattcctcttgagaggagggtcaacatagcataattttctagcactttgaaatagacaatataaatgcattaatcattcaacaagccaatcaagattcattcagccaacagaagtaatctgaatcatgcaacaccaattcatccaatgtaagactagagatggtgtaaatttatgtcaagtttggttcaaaagtaaactaatttggcttaatttttgcaattgtagtcggaaatgttatattttatactaaatttaacaactattaatatgtaccaaattccacacatattttaaatcattattttgtcaagatatgctaaaaaataataatacaccactttaatcaagggtaaataccattttaaaaaaagttactaattggacattctgttttgttaaatgacaaaatagattaagtattttttaaaattgtacaaatagaactttgaactaaatttttatcaaaataaaacttaataataatccgatctaaagatgttatgacaaaactagttacattttttgtatttatttgtattaaaaattgtgttaaagttatttatattaaaaaataaaattgttaaaaattgaactccaactcttattttttaccattttagaaaatatagaatctattttgtcattaacaaaaccgaaagtccaattagtaatttttgtaaaacacagagtccaaaataatatttaaaattaaagacactctaacagcttattattcgggtccttaattattcacaaagaaaatgatgaaaatccatatgggtgggaaatgggtagtttctagtgcaggcaaaaattaagatcacgatggtgaacaacttacagtccatcacaattctctctttttctttgttttcttaacgaaatgtgtggacagatgcaagtaatcaatgataaccaaagagatcacatgttggtcatgcaaaccagatgcgaaaatctgtattatacagaaatatatctcactaaagaaccactataagtctataacatccgctcacatggtcaaaaaaaaaatatactaaaggctcatctttgatgtttctttgcaatagattgctccaccagatacctacatcaaaaacacggtattaatactgttggaatggataagaataatatggttctagatattttctactacatatctcaagttgatcttaaaatagtgccaattatatgcatggaaaatgttgactacaaatctatgaattgattaaaatctgaagattttataaaagaataggagtgcctcttccaaatctaggcacaaaactgaatgagaaaaagaaccaaaaaagatcacaactatatcttaaatgatgacaaaacaagatgtcaagacatgtttttatattcctcgttgaaacagagctgacagttcaacccagtcactggacacttatcaaatgcagaacagcaatgtacttgagaaaattgctaattatgaaggaaaatagtaggcactaagtgaataagttgcgagttcattcattttaaagcaataaaaatttacgtactttccagtgtagacacctgcagaataccatgcattcaagacttcagtaagatcagtctctgagctagcagattgaatattgcccccttcttttctatcagtttcttcccccttgttagctgagtataacagataatgcaatgaaaggtcattatatgcatttagagcatacaattttcaaatcataaactacacagttctttcatgtttacagaaagaattcaagacaatgacaagatgatccaccacaaacataaagtgggtaatgattactttagtggtgtcatgtacatgtttagtaactaaaatgtttacaatttgttccaataaatgtcaaacttaaccttacccagttagaaattgtattcacatatgtcaagtatcaacctcaagctctactacacgtttattctgaaactcaatcttgttaaagaggcataaataaaacctcctgcttcatgttaatctgacaatgatttgagttgccgaaaatcactcaagacagcaccaatttaattccaaccaaaacaacctaatgaccagaagccaatatttcaaaagcacactaagtctattcttttaacaaagcactaataaaatacaagtcacaagaaactctacaattggactccatgcctttatttgagtacatgaacagtggactccacccttgtattctttcatctaccaaaactttactgtttgttcgatatgtatattagctagaaactaggctaattagtttcctttattctcttaatttcctagtatagcttttctaagttgtatataaatatatattattttctcaatggaatacaagtcaattattctcttctccattgttttaaatggtatcaaagcaaaatttgaaattctaagttagggtttatcccaaaattgtggtttgcaattataaatttgttcttcatctttcttaaggttcatttttcgaaaaacacttttagagagcacatgaactctcactgccaacaccaacagactgcccagttgccaatcagcaaaaccctggaatttggtggccagaaccgtcgcgtgtgagccacatgcgccgcctgaagcttcggcaacaaccctcacacatcggcgcgtaagcgggtgaggtgtctttttccagccgtctctttgtttggtttactctttcggcgtttcagaccttgtagtgtgattctttgttctttctctctttggtattgcttcgctgttttaaaattatgatagaaatttagtcagctattgtgacagacatggtgtcgttgatgtctaaaattactgaccataaactcaatggttcatctgctccatctacatactgaaactactccatctgctccgcttactagtgctttggtatgttgcaatagtagtaatgcgtttgggagaccttctacctcaagttaacagaaagggggaggaattttatgcaactattggaaaaagcttggccacaccaaatttgagtgtagaaagttcaagtttaaaaatcaacagagacagttcgctaatgttgcaagcactagtgatgcatctaacaaatcggtcattatttttgcagatgaatttgccaagtttcacgggaccaggaatcacttaagttttcatctccttctgttataactattgctgattcaagtaaatctaatacatgccttctttccatatcctcaaaatgggtcattgattctggtgccacagatcacatgacagataattccaatttctttctacatttcgatctcatagttccaccaattgttatctcagctgatggatcttcctcttctattcttggatctggcaccattactctcctacatctctacttactttgtcatcagtcttacacttacctaatctatcatttaatttgctttctattagtcaactcactcgtaatctaaattattgcatcttattttttcccaatcattgttcctttcaggatcttatgacgaagaagattattggtaaatgacatgaattcgccagcctgtatgttcttgatccatttccaccaatctctattgcatgtccaagtgtcacttctacttttgaggctcattgtcgtttggcccatccatctcttcctcggctcaagaaactttctccacaatatagtaaagtgtcttcaatagattgtgagtcatgtccgtttgctaaacatcattgcgttagtttgagtcctcgagtcaataaacgtgctagtgcaccttttgggttagttcattctgatgtttggggtccttctcttattttgtctaaacttggattcaggtatttcgttacttttgtggatgattattcttgtgtatgttggttatttttaatgaacaatcgtgataatgctaaggaatatacatctgctcaattataaatagtgtagcagaatgaaaagacaaacaccttcttgaaactgcacgtgcactcttgctccaaatgaaagttcctaaacctttttggggttatgttgtttccacaccgtgttttcttatcaatcgcatgccatattctgtacttaatagtgaaatcccatttaaaattctttttcctggtaagtaattgtttccagttgctcctcgaatatttgacagtgtttgttttgctcaagatgttcatccacatgtcacagattagatcctgtcatcaaaatgagtctttcttggttattctcccattgagaaaggatataggtgttattgtcccgatcttaataaatatcttatttctatcgatgttacttttgtagaaaataacttttttttcgtctacacctaatcttactcatcagggggaggatgatgatttgttggtacattctatcacatcttttgcgcctgaaacgtattctgacgagtctcttgttcctccacctgccatggtcacaactcctgacatgcctacaccaccttcgcctccttcacctcctagtaaagtgtactctaggcgttcacctcctctgcatcctgtttcatatcctgaaccaacgtcttcgccatcagatccattgcactttgtaaaggtaaatgcaattgtatctatcccatttcttcttttgtttcttataatcatttttcctcgccttcttgcttctttattacttctcttgattctatttcgatacctaaaacttttcgtgaagccctatctcattcttgttggcttgttgaaatgataaaagatatgaatgctttaaatgcgaatgatacttgggacttggttgttttaccttcaagaaaacaagctattaagtgcaaatgggtattcacagttgctaagggttatgctcaaaactatggagtagactataatgatatttttctcctgttgctaagctgatatttgttcggctatttatttccatggcaactactcatcactggcctttgcgtcaactcgatatcaaaaatgcttttcttcatggaaatcttcagcaagaggtgtatatggagcaatctactgggtttgttgcttacggggagtcagggcgagtctatcgtgattgcaaatctttgtattgtttgaaacaaagtcatcgtacttggtttggtaaatttagtaaagctattaagaaatttggtgcattgaaaagtttgaccattctatgttctataaaagatcaatgatcgggattattttgttggttgagtatgtggattaaattgttattacctgagatgatactagagacatctcatcccttaaattgtttcttcatacccggtttcacacgaatgatttgggggtgctcaagtatattttgggagttgaagt

SEQ ID NO: 225200 - DNA, 3114 bp, Cannabis indica
tgcacccaatgtaagttttcttaaactttatatgtgtttaatttatcgttttagaaagctcttatttaggatgttaataaacatacttgtgagtagatctaagatcctggtaaaataatttccaacactcccttcaattctttctctctgggtcctaatctacccaaacgaaaacaagaatttctgagcaaatcttcagttgttagcaagaatttcagttagtaattcaagtggaattgaagccaattcaaggtaaaaccctaagctatcctctccccattaagtttgtaagaattatatatataaatacatgattttggtgaattcatttctatataggtttgtatgagtgagaacctatttctaagttgatactatgattgtttgaagtttattttaagccagtagcagctgtagcttggtttgagttttagaactcaaagcttgctcaaaaatagtgggttttgtttaggggtttattgatctctttaagggttaaattatgtttacaattcatatttgtgatgttctggaaagtttgagcaggtttagggtagaaatgagttagaaaagatcgagtttttgagctctgtagtgaaacattttaccgtttctgaagaaacaagtaaccgtttcatctggcaggcctgggtaaatcgatacttgtttgaggatcgggttacccatttggggtgattgttgaataccttgatttttgtattttcttgatatttgaggtattaaaatgctatttattgacaggataacttcagattataagtttaagcccccgaaagtgttttagtgagacacttactaattttatgttaatgtgacttaggacttctaatcatcaagtagttttttcacttagttgactggcacatctaattactgaatcgaggtaagattagtataatagatacacacatatacatatgtttagcatgcatgtttcattattgtctttagattaacatatcacggtatggtgtacataaagttgcacgagataccaacatatacatatcctaggcaaaataagaaagccatcagattaacgtatcagatggttacctggaaacagaccctattgatgtggacatgaatgtttgacacgtggaaagaaagaaaacatcctagaattgagtagtcccgagtcatagcagttgacttgggaggggtccctagccctgcacctaggttggctcaaagaactctacagtgggtgtttggatcctgcaatgttgtttcaaactcaccatcctttagtattctaaaccaataagacaataaaaatcgaagtctaaggcctgtaaactaaaatagagataaaacaacacccttgaattcaattcgggtgcctagggttttcaccaactgcccaagttgacattccaactagggtttcagttttagggtagtgaaaatgactcaaactttgtactttgacaagaataagacctatcacaaatatgtttgagtcaccagaataagaattagggatcttttcattttgagcacctatggcacctagtgcacccaatgcccaagttgacatattgtcaaccttgggcacttctgaccctaatattgaagtatcttgagcattgtattcgtctccatccaaaatgagggtacaagtgctttcgggagagaaacctatcatcttggagggaaaataagggacccaacgcccaggttgacattgtgctgggtcgaacacccaggttgagatttttcaatttgggccatttccattagtagtttagaagaattcttccgggcgtattctctacttttgtcaacaattgagattttggtgcttttgagaaataaacagagtcatctagagccgaaattgggacctaacacccaggttcacactagtcctaagccaagtgctcatgctgacattgacattaggcccagtgcccaggttgacatttcgtaaacttgggccatttccaatcaattttttcaagaaatcttttggggattctccgttttcacaaataaccgagatacaagtgtttccaggaatcaaacaaaaccatttggtggcaaaaagctggacacagctcccaggttgacattttgtcaatctgtgttatttctagtcatatttctcaattaagtgtaccaggaatcttttttattttgaaaaataatgaagataaaagtaattgcagggagaaaacaagatctctaaggagcccaaatagggccccagtgcttaggttgacatgtgtgttggacgttgtgcccaggtttacattcaacctggagcgcgtggttacgctcctcaaataccaattttgctccaagagttcttattattttggtcaaaaatggggtaggagaccttgtttgcaatctcaaatgcctttaaagtgtcaaaacaaaccccaagaagccacccgagaagcacccaatgcctaggttgatgtatggtctggtgcactaggttctgcttgttagattccaatttcatctcaagcatctgactattttttgtagtaaacgagagctatgacttgtgatagctcaaattcacaatttaatatcgacaaaattagaaagttttgagtctacccgatttcacaacaaagtgacatcttcgagaattggtaaagaacttcaccagaattaagaaactggctaagtgatgtcaacatatcacttaggaataaaaaataaaaatatgggatgttttttcacttacctagcgcccaagttgacgtcagaatgtcaacttgggcgttgggtcctaaacaaccttcagtataacgaccttacatccctcaaaattaatccgattgatgtgattaaacttgagttttaaagctctttcaagctatttgcaagtaatgtctcatagccatatcacaattatgaaaattcggagtccaaaattcatgcctaaataagtgcaatttttttagtagattaccgaaatatgatctaacggacaagattcaagctccaaaaattgacaactttcatcaagagtcaattttcaacattagatcatcaatggacaagatcaacccaaaataattttttcatattttttgtattgttttattaatattttaataggacctccttccc

SEQ ID NO: 225201 - DNA, 4555 bp, Cannabis indica
aaggttgtcaagtctgtgctccaagctcgtaatattcataatgccaataaaatgtctaattctgtatgttcagcttgttgcttaggcaaaattcacaaattcccttttccaaaggcatcttaaaccacatacaccactcctcttgaattagttgtctcggatttatggggaccctcttatattcctcccactaatggatataagtactatattcactttgtatgcttattctaggtttacatggatctacatgctaaaccaaagatgaggcattaaaacctttcaccatttcaaagttgaatctgaattacaacttggcaccaaaatcaaggttcttcaaaccgattggggtggggaatatagatcctttaccaaaactcttcaagaggctggtatagttcatagacatccatgtccaaccacacatgaacaaaatggcctagctgaacgaaaacatagacacatagttgaaaatggtctcaccttacttgcccaagcctccatgcctttacaatattgggatgaagcctttagaacaattgtatacattcataataggctacctacacctgtgcttaatcataaatcacctatagaaactctctttgacatcccacctgattacaccacattcaaaacctttggctgctcttgttatcctaacataagaccctacaataggcacaaacttcaatttcgatcctctccttatacctttattgggtatagtctcaataataaaggatataaatgcctagatcaatcgggtcgagtgtacatttcaagagacgttatatttgatgagtgcacatttccttatgcttcacaaaatcattcacctattactgccgatatcatgtcttctttttatccctctgctattattcccactgctcacacacaaagtaagcactcatcaattcccaactctaacactatgtgtagttcttctcttcctatgcaggaaccggttactgtgcttgatattcaaaatgtaccattgactacagcagctccaggttctcttacattgcctctgcaacatacaccagaatttgcaatttgttctcctcgacctgatcctacagttgctggaatgagtgacattactgtctctcctactgatgttgtgccaaccacatctgctagtgatatacctacccaaccagctgctcctgcaatgtcaacaacctccacggttcctgttaactcacaccagatgcagactcgtgcaaagtctggcatcagaaaattgaaagcatatctggtttctcaagagcctctaagtgtcaagcaagctctccaaagtgctcattggaacaatgccatgtctactgaaatggtggctctcaagaaaaataaaaaataaaacatggacttatgtggttctacccgaaggaagagaagccataggttgcaaatgggtatatcaaaagaaggaaaatcttgatggaactacttccaagtacaaggctcggcttgtggccaaggggtttcatcaacaacccggctttgacttcactgaaacttttagtccagttgtcaaaccggttactatacgagtgttcatctctttagcaatatcaaggggctgggatataaaacaattagatgttaataatgcatttctcaatggtgatttgcatgaggaggtttacatgcaacaacccccggggtttattcttccctctgcccctcacctagtgtgcaaattacataaagccttatatggtctcaaacaagcccctcgggcttggtttgataagttgcatactagtctacttgctcttggattttcttcttcaaagtctgacaggtctctattcatcctacacacatctacatctactactttcatattagtatatgtagatgatattatcatcactggaagtgattcgactctcattgccaaaattgttcaatcgctgaattcacaattctccctcaaagatcttagagatttgagctactttcttggaattgaagtccaaactacatcactcggtctacacttatcacagtcgaaatatattagagatcttcttgtcaaggctcaaatgcaggatgcaaagccccttcccactcctatgatcagtggcttaaaactttctgcacgtggtcatgaaccgtttgataatccacaactatacaggtcgattgtaggtgccttacaataccttttgatcactcggccagagcttgcatttagtgttaacaaagtgtgtcagttcatgaaaactcccttacaaccgcactagcaagctgccaaacggattcttcgctatctcagtggaacaattgaccatggcctacatcttcacaagtccctctccactgatctcacaacattttgtgacgttgattgggcttccgacccagatgatcgacgttccacttctggttttgtcatttttctaggtggaaatctgatcacttggcagtgtaaaaagcaacagaccatcagccgttccagtaccgaagctgaatatagaagtttagctaactgtgtatctgaactcacttggctgcaatctttcttttctgagcttcagatacctcaacctacacctcctactgtttggtgcgataatcttagcactgttctactggctgctaatccggttctacatgcgcgtaccaaacacatagaacttgatctatactttgttcgtgagaaggttcttcggacacaagttcaagttaaacacgttcctgctacagatcaaattgctgatggtctcacgaagcctatttctagtcacaactttccactgttttgtaccaaactcacaattgcaagtccttccaattatgagtttgcggggaggtattagggactctgttcagagttagttaaggaactgttattttgttaattcagggtagttagaaggttgttaggagtcgttagtcagctccttttctttcctctctctctattctgatgtatataaatatagttcctattgtactctgaacacttgatggatacacaattgatctttctctctgtctttctcccttttttcttcttcttcttctttctcagtttctttcattgttgttctggtttttctgctatgagtaaacgaatcaccaatcgtaatagctattaacaaatgaaaagtattattaatgagttggaggcgctgtttgagaatattataattttattgtctaaatttctaatgacagttttgtaccacgtggctcacaataatttttctgcagctcatggtttggtaaatcatgttattcgattagacgatgagctatcttggttcaaaaaggtgccgctgattataaatttctgcatcattaatcatatgtaattttgattcatactataaaaaaaagaaaaaaaaagcaattcgtttgctcgtggaccgtctttcacagtgagaaatttctcttgaaactataattagaataagaataaaaaatagaaaactttaattagttcaattttcaagttgaaacgaatccacatttatttttttaatttttattttatattttttatttaaagctaaccgttcaatacacagcagcatgaaacaaaatattagtatagaaaaaaatgcaaatattgaaaattttgttgcgcttaaagaaatcaacactagtcacaatagagttccaatttaaagattcaaaatctcaaatgcacaaatcaatattgactttggcagtgttatgtagtgctgaaatatgggtcaaattttttgacacgatacgaaactgacatgagtttgaagaacacgagtacgagcacgatcaagcacgaaaaaaaataagcttgagcacaacacaacacaatattataaattggcatgacacgactcgaaaaatatttacttaaacacgatacaatacgagaagtacgaaagacgacatgtaagcacaaatacactagcccaacatgcggcaagcccagcaaaagattgagacatcctagcaacaatatgttaaaattcgttttgttaaacgaccagcaaaccgcctagcacatgttgttgctaggatgtatcagtctttttccgattgtaacatttgtatgtttaatgcacattatgttatgttggatattttatattctaaatgctaaatttaatgaagttgatatttcatccaaaattcaacaataataaaaataataataacattttaatataacagtaaatattataattttataatttaaattattaaaaaaaatataaaactagaagtctaaaaccagatattaatttatatatacagtgtaatataaaaatttaaaaattacataaatataattgaaactctaaaataaatagcttagtaattaactcattaattactaaaaaataatatagaaaagtaaagcataaatttaaatttggatgtgaaaaatgactgacctatatttaagaaaaattggtcggcacgtgcaaagcatgacacgaacatatcgggcctacaggctgtgctggtataccctttgaaaatattgacatgacaccatctctaattttttaaagcacgacatgacatgtcttatatgttaaaa

SEQ ID NO: 225202 - DNA, 4173 bp, Cannabis indica
ataccctaataggcttcaagaggtatactctaaacttattattttatagttttgatttaatgtacacacatatggagattttgtggatatggtacaatgataatcagataatacgaaactcttttgctgcgtacctgatttagtaccataaaactaatatattgcaccatcaaactacaatctgcggttttttgtgtctccttacagtcatcattaagtctaggacaggcctatgggagctccactcgtaacttatgctcccccacaattaaactatggatctaatcctttaagatacaatccaagcacacttgaaggaaccattttattcataatttgtacatcaacaaccaaaggatcattgtgcgggtaaataacccgagtgacttttcacgaggcttcgttgagtgacttctcacgaggcttggctaagtgacttgtcacgaggctgacaaagtgaattttcacgaggcttggttgagtgacttgtcatgaggcttaactgagtaacttttcacgaggcttggccgactgacttttcacgaggcttggccaagtgacttgtcacaaggctggtcgagtgacttttcactagtcttggctgagtgacttgtcccaacggcttcaccagcgacttcatcagatgaagttagtcttacgaagtctttggctagttgtcttgtcctgacacacacacacacacacacacattttttttcgggtgcttctccatttttttatctaacactacaccccattgatccttctttgtcattcgttaagtaagttttcttatccatggttaacttgcataaatgtttactcattccttacgtgcacgagttttgtctttcctacaacttagtaaatcgagttgcacgttaccccccagagcccttgtatctacattctttacctagaaaacttagtagtttctcttctacctcttacgtaagagagtcgattgacctcatctcgagttcgagtgacttcacctcgagttggccatgaatcccgaacacatccctcctggggataactttattatatctcttcctcaaactttaaaagtcctcgagagagtcctcatgtgagatacgctaggttgctatctgagaagggcgaccatttagggcgcattattaactgcaatgagcgtctggaaagagttcagtctgaaattcattcgatcttgagagggagtcaaccgaccaaattgctgaccccaaagtatatttatataggcttagggtgtcattagttgagaccgagaacaagttattgcatcttgagaatacctttcctctagagccgacctttcccatttctctatttttcccgatgattgcaagacgaagttcaattcttccccatttctttctggattaccccaaattaggacctaagcttgttaaatattcaaaagaaatagcaagtgtgaagccgctcttaccatcatttctttctgattgtaggtatgcctaagaagaggtgatccctagtttgtctattccatcaaattcattcactcatgttgatgttcctagttctgttactgccaatgaactttgcaacattaacgcaaactactgcattctgtctaacgcctcttaccttttattagttgttggcgacggggagtggaccactcatcctgcggctggcagagttgcctttagtgagtagttgcttacatgcagtgccacccttctccttcatccatttctcattacaatgctagcttacctcagtattgctcctctctaattggctccgatttgctacataatcttggcgtgctttgctattgccttcaaggggtgaatggccgctttcctctagtagaggagttcgacttgatctataacattgcacacaacacctcagcaactaagacttattattttggtgggtgagtgctaaggacgttgaatgctgattgaggatgccctctaaaattgctatcaagacatccagatcttcgttgttgaaggcaggcctcctagcgtcatatctgagttttgatttttcaggtgaactttttctactcactttcattatcttcgttttgttttgcttactttactccaggcttacgcttcacctcgttattatagtcaccaagaatattcctaagcttagcactgattctcgcagggccttgcaaaagttctataacctttcttatgttgagaggatcgctaagcatctatttactcctaccaatctgaagaactctggtttagccactattctattcccatactcggttctagctcctatcccaaatcctccgtcctcaggcggtcatgatgctccctatgtcaaaccatatactcatgatggggaggaggaagatcaagaggagagggtgactctgcccaaagttttggctgtcattcgcgagggtacggctctgcccactggcttaggttgcgactctcgtgtcaaaggaaagaagaaaaggtgtctcactctgaaactcagaaaggagactccatgcctcctcctccttcaaagtctagaagacctccggaccaagatacataagcctttaaccaattcaaaagagaggcgtcacgcactctaccttgaagctcttaacttgcacctcttcaaccttcccaccaagtcttctctttgtgatattcgttgacctctttcctctccggttgggtcggggagcaggataattgggtggagcctgatttcatatcttccgatatcctagtggatgatattggggtgaacaatcccatggatgatgacctgtagtaaggctatcactctcaaaggatagacggttgttctcatggcagagcaaaccaggattgtttgggatatgcctttaaaatcttgtcagaggctttcaacccatagctcttattccagtcttcttatggcatcaaccaaactttccttccttctttcgttggtgttgacgacttggcctggtcctaatctcaaatggggcactcttcgagtgggtacaacgagtatcttagggaatatcctcctcaattacgggcttggcttcacaattcgttggaagaagaccactgggaagttgtgcttcgacactctatatgggttagtacctgcacctctttcatttgtatttatttcctttgtgatgtctttctaacttatactttggtttgccttgcagacttttgtcatccaataatacatctctgcctttaagctcttccgaaggcgatgatattttgcatctcaaaacaactttggaagaattggcaacttcaaacacggagcgcggtaacctccagactcaagtgaatgagtatcggggcaaggtggacaagcttcaggctcacttgaaacatacaacaccccaaattgaggaactttcccgacagctccaatcttccttaaatctcaacaagaagctcaaggatgaagcgcaaaaagagcaagacagcttcaaagcttctataaaatagttggagaggcgtatgaagactataaagaagaaaataaatgcacgtgaggctgacaaggtggagcgtctgttgcactctatctgggttaccaaccctcatgtggatttcagtgttcttggctccataacactccagatggttgagaagttcaaacaagatcatgaagagcaacatgcagaacaagattgtaagcacgccatggtgccagcaccagcaatgaccagtagtttcttcttttctctttttttgggtccttaagactttttagagcgatccttatgctttcttttcgtgtgattgtaagactccatttttattccctgcatctttaatatttgtaactgctgttggtcaagtgactctgagggttactctttgaccaaatgacttttcttgttttgataagtaggttattatttgacggagtatttctctttaagaggtctcatcctcttatttatttcttcatcctttacctggatgggagggagcttattgtacttgactgtgctacaacctcttgatttgtttaatttcatccttttaattggatgtaagggagcttattgtacttgactgcgctacaaccttttgatttttaaatgtgtgcttacgtttgagaggcatccctcttgtttccgaattcagccatgagtttctttcaagatctcttttggccgagtgactttcgtcactcttgaggttgagt

SEQ ID NO: 225203 - DNA, 2596 bp, Cannabis indica
cttcaattatgcttagtttatggctaatatacgagtttttgttgtaaagagatatagtatttttaaaaaatttgccaaaaatctttgtgtatttaaaacaaattattttttgggccttaaacaaggtgggtgagctctaggcaggtgtgacccaggttaacagtgatggtttggattagagatgatccctatcctctttcatgtctccgcctgcatatttaagctctatctttagttaacggatacccttttctcaggaagggttaaaagtcgacaataatttagaaaagcatacgtggcagtctagggtgcaaggtcgttgctaaaaaggttaatctctctctctacaactcactcactcacacacgcgtactctctttctcactttaccttttcttttagtttgacatttatgcccttcaattttgacgatattacgattcactacagatcaccactacttctacttccactactacacctccatatactatagttgacctaccttctccgtctccggcgagattcccgccatgagtgccggaacgacgacgtttcgctccatacttgagaagccccttaaccagcttaccgaagatgacatttctcagctcactcgtgaagactgccgcaaatacctcaaagataaaggtttcttttattgtttttctttctttctttctaatggcggatttgattggtttttctttgtcttggaatatgagaagtaaaaaaattaaaggaaagagagagaaagaaaacaaatgtataaaatatttgtaataatgtggttaaattaatatatatgtagatgtattttgtgtgtaaatattggagttttacacgtgtttatacagggatgcgaaggccttcgtggaataaatcccaggcgatccagcaggtgatttcgctcaaggctttgttagagccttgcgacgattccggcgccgaagacctcaggaaggttatcgcttccccgacttcgaacacgcctcgactcccgacatttagtgtaagtttgcttaactgtttggttgccgggaaaattggagggaaagtgaaaagggctgtaaattttgagatgtgaaatttctaattttatgggtttgtattgtttctgactaaaaaggtcatgcctttagcgctcagataggtgaaagacttgaccaagttgttgaaaatatcattgacagggtcttaacatttcctcggccaccaaactaaccattttcttgtttttattatatttatctaaaagtttatgtatttagctgattattgaaaatatgagtactgtaggtgacttcaagttcagctgattcagctaaggaagctagtgccgatgtccaggtttcagtgtcagctgaagaatcggttccgggtccgagaaaagaaccaacgaaatctgtgccggagcctgaggaaagacccgctgatatagatgagagggaaagtgcaaggtctaatttttcttcgttctttcattttctgaagagaccactttttgatgtgcatatattaattgggttttccaggatgctacaattagtatttcttttttttgtctttttcatttctgttgttgacaatatatgaagttgagttatgctgattttagctgcaagtgttatgcctcatgagctggttttgctatagtccatgttaggctatcaggaggttgttttttttttcccttcttccaaacgtttgacttgtttggcaatctgtgtttttgttggatgtaatggcaatttagctttaaaagaatcgaactgaaggactgttggtgagtgaacaatgctgattgtgtgctcagtccatttaagtttttttgaaactatcatgaggggtgtagcagaattagtccatatatttttggattgttaattgtacttatatttttaaatataggatttcccttgaattatttaacactgctgtaaatttactaaagtagagtgtaaaaaagttcaatgtggttaaatgctcttttatgttgtaaattgaacagtgttgtattgattatatgtatgattatttgaacctggtgtgattgtactgaatatttatgatcaaagaatttaggttatattgattgagggttttagttttatttaaaatcttttacacaaaaatgtctgaacaacaatacttgaaaatctggttgcagaagtcaatgtgcaactgatgcatcagctggccaaatgacaattttctattgtggaaaagtgaatgtatatgaaggagttcaacctgagaaggtaatgaagcttcttctactctcagtctcggtgatatgttgtggttagctttccaatgaggcgatgaacggttttgcaggcacgtgcaatcatgcaactagcagcaactccaatccctttatctcgggaaaactcgtttggtgtccctgcagcagttaggccctttccattgcatttaaattctacaagtgaaaaatgtggtgttcctcctagtgtctcaatctcacaacccacgcaagcaggtattatttgggaaagggttttttgctctttatttgatggatgtgatgtttggggagctgtaaatccaagaaatcactctttggattttactt

SEQ ID NO: 225204 - DNA, 3643 bp, Cannabis indica
taatggttaaatttaacagaatattcttttattttttttaagtatattttgttataataaattgaattttttatttgaaatcttgaattataatgtttttaatatatataaagtgtgactacctatattttaagggaaatggttagtttaatggtatttttaattacttttttttcattaatgttaacagtcgaaatttaaactgttaacaaaaagtaaatttatttttaaataaaactaacgaaacctcaattgtatatttgtgttatttatagggacgtggccacgtgggtatatattctttattttttaaaaaaaaaaagtaagagcaaaattagaaaattcactttaaatgacagaatctatgtgcagctaaaatatggcttaaccatgtaatactggctataatttcttgatatgattctttacaatttttcctttttcattcaaattaacaaaaagaaaaagaaaaaccaaattatcaaagagacagacctaacattcaaggacagattataaaatataaagtaagagtggtagctgctttcattgttcataatggctgatgttaattcttggccattcatttaattgattaaaaatattgttgatattttattttacatcatgtaatgcttggttgtacagcgttcatgtcgacccattctatgaaatatcaccaaagtacatagctgatctgataggatgatattagtatacacttcagtactactgtatttgttttgaccattaatgagaaacaatcaaaggaacgccttagactcttgctccacacaataattcagtccaattaagcctctctcgctatatatatatatatatatatatattcacctaaagtcgtctattttgtttttattctgctcagtttatctatttcttttgcaacagtactagtttggaacggccccaaagacgtacccgtattatatataatacaaacaaataactaaatattttattattattagaagtaatagatattttctattactctctctatctctagctagctagctagccagttagcactctctgttgagatatttcaatctatgtagctctacttgtacagtttctgtgactctttatttcctgtcgaaccgtctcatgtgaaaccgagtttgctgaggcttaagaaaactgagtactataaatgagacatcatgacccataagtgggtctcctcttcataaggtccacttacataataaatatttgtatatataaagagttttcctttattatcaaggtatcatgaaggtgactcacatggttacttgagcttcatatccctgaacattttttaattgtcatccaacttacaagcaacgtctttttgtagtgagtgtaacatccaacacaatcacatgcaatataatagcattatcacgtgtctctttgcatgtcccttcgatatatctttgatttttggatcactaatcgtttgtatagtttattaattagcatcttcaaaaaccttattaattagttcatttaaagcacatgcgtgatctttttttgcattgttaagataaatgaatttaatttactcacgaatgtgtagacattaatttaattaaattaattcatgttattatagcaacatagcttgctgcactttgtctttgttgaccttgctttttacgaacgatattgactttttaaagcgataaaattaaatgatctacttataaaattattaaaataataaaacaataacaacacaagtattactctcttttctgttgtattactaatgagagagcaaaagtcccgagaggtgaggttcttgatattctccagaaagctacaagtattttagtagcgtaataacttttagaaagttggtgttgacttgagatttagccaactgacaacggagccttattaattgttgataatcaccaagtgtaaataagaataaaaaatagtaaaaataacacaggaatttatagaggttcgacccccttgtggaacgaataatgactacctactcctcttttagttgtattcactcttgagatgataccatacaaatcacatgttaaaacttaatgatttctatctatgactttcttcaatattacaattgtgagaacaatgtgttacagataaagaactggtgagatcttatgaagaacttatgaagaaacttgacctaatgtctaggaggcattaagaggcatgtgaggtttgaaagagagagaaatataagtgtgtcatacttagaattggagtcttttttcatgtgatctaatgccttttaaatagtgtagggcctcctttgtcggacagacctcgttggtcgaacaaccttccttggtcagataaccttccttggtcggacaaccttccttggtcggacaaccttccttggccatatagccttccttggtcgaatagctttcctggttggatagccttccttggtcggccatcctacctttgttggcaagccttccttggtcggacaactttccttggcaggctagtgtctaatgacttgcaatgttcttaacttggaagcgtcacggaatgtatgggatgttgttgataggttgtattctacatgtcttctgttttgactatgtatacatgccacgttggatgggcaaaaaataggataacatttgccacccaagtccctgttgcgacgtctatacggataaaggctttttagctcttattttgactataggagcctttaccgggcagccttgtctcgctagctattggactcttcagatgacttatttttatgagaaataatgactttatttccaatcattatataagggttttcccatatgtgaacttctaattttctctctcccatgtatgcctttactttcctcatcttctcttctttgacatttcctctttttctttgagtctatcattgatgagtttcaagctttttaaagcttttaataactttttggttcccacattttagattagtctttctacaatagaatctgctcgatagctgtatgatgcataaggtatgactttaacatgaacaaaatcaagtcttggacatgtaccttaggtctgttagagaccccgtccgagtcttagattttgtctagaaactgtgtctggtacttagctcctgtctaggagctctatccattacttagatcatgcttgggaactttgtccagcacttagatcttgtctaagaactctgtccaacacttgagcccattgtagacccctttccgatacttagccccttttaggtgctctgtccggttcatgagtcttgattttgtactttgtagattattgactttgtatttcaaggatttctggttaatactctttgattttggccgcttaacccatttttgtctaagtcttttgatgttcttgttggattttgcgccctaaataaaactcatttccatataatcagatttactaattaataaaagatcagaaatcacttttacgttgcatggttcacatgatttatttcatgattatatttaatgtataaattctattaagtccagaacatatataaatatgtatatatatttgttcatgattatagtatcgtcagcacagtggaatacaatcatgattatatgttcaaaagtttaattcccat

SEQ ID NO: 225205 - DNA, 6555 bp, Cannabis indica
aatactgtcacacggaaattttttcaaaaatactgtgttttataaaacaccagtaaaacacaaagcagtataactcaaaacaacaatagaacactagtaaaacaccagtagaacaccagtaaaacttaacacagtatactgcagtatgaaacttataaaaaaatacagtaaaaagagtaaaaaataccgcttggcagtatttttgtaaaaaaatggcaaaagttagtataccatgtaaatttccctttaatttaagagtttagagagatagtttttgtggaaaatattggacaaatttaacatttcctattagagatggcttttttttttttttttgataaagtgggggtgtccaaggacacccattcattaaaagcaacagccaacaaagttcaaaacaaaagaagaaaaaaagcaacaacaaacaagaacataacaaagaaactaactaccaaataaaaacatcatccagagcaaaatcagaacttagttaagcagaataggcccaggatcccattctctgaagtcgtcaatcactgcaccagacagctcatcaagctcaattgtcccagatttttggtgcaccgctgcccatttagcaatgttgtgcgctgtaaaattgcaaatgcgagatatatgcgatatatcccattcctcaaacttagaacaacaatcctggaaccgcaccaaagcctcttggattctaaaatcccccctgtcttgagccgatgctgcaaaggacttagctacacacagattatcgcaaaggaacataatgtgattcatacctgaactcagagcaaccttcgctgccaagtacactgcatttgcttcagcagtcaaaggatcagtaaataacacatctgaggttgtgattgcgattatccttcctccgtcatcacggaacacagctgaaagtatacttccattcgaggaaattgcaacatcagtgttgcaactaacccaagatgcaggaggaggcgcccaagacaccacatcattcgccttatgattggagactgccaaatgatctttgattttaaaccttatctgcttcatgatactgggaagagcatttgcactctcattatgaactcttctattcctttcactccagatcacctccattatatacagagctgtaaccatccagtcattaaactgaattctagggggccggttatgatcctggctaaaccagtcaatccacgacttccagtttggcggtcgataccaatcggtacggatcccccatccaatgcagaaccaaatagctttcgcaaagctacaagtccaaaagagatggattgtggtttcggatacttctttgcacagaggacacaggtcgtctaaatcaacaagaatagatgccaatttacctttagtgggaagaatatcccttagcacctgccaccaaaggaatttaagcctagaatgaaccgtggagctccaaattagtttccacataccatcctccgaactcgagtcttgccctttgatgatcctataagccgatttaatggaaaaccgtccattgtgttctcctaaccatatccaggaatcatcaatcttatcaatagggaggtcaatgttcaggatagctttggcatcttcttcttcaaaccaatctttaaccatttggacattccatgtgttgttagcataaaggaattgattaacccatgccacaccgtgggatacatcctttacaggaatgggggtgcgattcactgatgggacccaaggatcaaaccaaattgaagttgtttccccattgccaatttttctacacaggcctttctcaagcactccccgggattccaagatagctttccacattcccgatttacctccttgcttttcaagattcaaaaaatttctaccttttaagtacttagcttgcaccaccttactccacgtgctagagtgatccgtgaaagccttccatgcccacttagtcatgaaggccttattcaccgcttcaacactcctaaatcccagtccccctctgaattttgattgacataaggagtcccacgcgagaagatgcaatttacgtttcgcatcactatctccccaccaaaaatctctaaggcacttatcaactttccttgcggtttttagaggaatcggctcagaggccgcgacatatgatgccaaggcggagccaacagattggatcatacatgttttccctgcttttgaaaggagtctagtcttccaactacgaaccctttgcaaagccctatccactaggaaacctagatcctttgacctgttaagggatctgaatagaggtaagcctaagtaggttgcctcgtgtttcattcttttcatgtttagaatttcagcgatctcccctgcaagccccggagtaactccttttgagaaatacactgttgacttttgataattaaccgcttgacccgaccaagagcaataatcctgaagacaattgaggaaacccctagcttccttgactgaagctttcccaaataaaattacatcatctgcaaacatcaggtgagtgatagccggaacatttctggaaaccttaaatccatttaggtgtccctcagccgatcttgttgtgattagtctagatagaacatccgcagctataataaatagggtcggagagaggggatctccctggcggaggccacatgtcggcttgattatgccttgaactgatacgttaattagcaaccccatctgttgaatagcaatacacttctcaacccacttcacccacttagagcagaaacccaaacctttcagagttgaaagaatgaattcccagtccattttgtcatacgctttctccatatccaactttatcatcataaacccctttttccccttttttctcttcatagaatgaacaatctctctagccacggcggtgttctccgcaataaatctcccatggacaaaagccgactgggtgggtgagatgatagagggcaacagaggcttcaatcgaagagccaacaatttcgagatacatttatacgccacattgcaaagagctatgggtctataatcattcacacttgtaggacagtccttcttcgggataagaacaagctttgtgttgttaatgaatgaagggagatccgcaattcctgaaaaaataggtcaccatttttacaaagtcccgcttgatcacactccaatgatgaagatagaaacccggcgacatgccatccggacccggagctttgtcatgccccatggatttcaaacagtggagaatttcgtcttctgtggggacaagagtaatttttgcattggtatcttcctcaacaatcctgttactgaggaaagcttccccatccgctgaaggagatgaatgacgggtgaaagtactattaaacttagagataaataactccacaattgtcttcatctcagtaacccaatccccattctcagttttcaatgtttggatatagtttcttctacgccgtatcgctgttgacgccataaagaattttgtactgctatccccatgtttaagccaagcaacacgtgatttttgtttccagaagatttcttctctagcaagagcttctctatgaatagccctggcctctcctagagcttcctccgatatcaaatcttttgcctcaagtttatccaaagtcatcttcgcttctttaacttgttgtcttacattccgaaattgtgtcttgttccatttctgcagatgttctcttgttcttttgagcttacgatagagattcgtcattggattatcgtgaagctcctccctccaggcattacggacaacccaaaaacaccgcagatctctaccccacatcaactcatacttaaactggggtcttaaacatctcgctccccctaccgtattgagaataattggtctgtgatctgaagtgctgacagataagaactccacaaccgcattgggaaacaggacacaccaatcggttgaagcaagagccctatcaagccgggcccttttcaccgtagaacttccaaggactcttgacgccttttgaaaccaagtgaatctttcccctggcatccaagatcaataggacccgttctattcaccattctcctgagatcaaacgagtattttgccgaatttttcctattaacataatttatgcattcattatccgccaaggtgccattcagatcaccaatgaggacaatgggagaattgcaattataaactatatcacctattcgagaccagaacacctccttgcccgtattcgttggagggccatagatgcccaagaaattccatgaaacccccggagggtcagagttaattgatccataaaatacatttttatctgcttcacgaatgttacacacaactcatgtcttccaactgatgccgaagcccccagacaaaccattgggagggatgtaattgaaatgaataaactgaagcttatacattagcttttcaaatttctctttaactaaccttgtttccgataagagtatcacatcgggattggatcggcggagaatctccgtcaattgtcgaattgccgcagcattcccgagcccacgtcaattccaagctaggagcttcatgaggattctggagacttttctgggcaagtctccatagcccaaactgaaaaacctgcttcttaatttcctgagtgtcctcctccccatcttctattacttcctgaatttgattcccaccttcctgcaattccgtaatcgcacaccgagactgtttcttgtttgccttctccacaagaacaaaatgattgtccaagtcgatagttaggttgattccattagcgttccaaaggtttcggtagtggctactagagcctttagaggaggacgccctacctttcttcttaaaactttttgagtttaccccaagcctctcaagagtccctggagttcttcctcggattgaagaagcatctggagataggcaggggttacttccttttcttggtcttcctcttttccttttttggatatgtccatcattagagccaggggagaagcttgcaaactcatcatcctctcctgaattctgtgtctttgagtcattcttagctagtcgattaccttctccccgtggtgcttcagcctgtaaaggaagggcctcagggatcataaaaaacccatccatagccttccttttcttgggcccacgatccgtttctaaacacttgaagtcttcaatctcaaggattgggttgaataatgtgggctctctatggaacttgtcaattgttgccgacccaattaaaggtttaaaggcttgggcccaacacgctcttgagggccattccaacagttgggcttgcggcccaagtagggaattaatatactgcccaatttctattcttctttgtaaagtgaagttttcactttcttcagcgtctcgagtaggagtggctccagaaggggaaaacaaggcagcagacgaggaagggttcagggcttgtattccttttccaggtaagtttgcaacttcaccattcagagtggtgttgggtgtatcaggatctggaaaagtctcgagtaggaatggctttatatgttattaaaaatagtaatatttagtattctaatcttgtcacctaaaatatactacttcttaaaaattccctctaaaatataacggttacataattatgtttttgtattaggttttgtttcttttatggttaaaaaatgaacatttttattactccttaaactttgattaatgcaaaaaaatttcatttttattacaaaatttaattttaaaaattattaaaaaaatttaataaacgtattaaaccaattaacaaatataaaaaatattaaaaaacttaaattatttaaaaaaaaaaatatatcatgaaaaaaaaatatattcataaacacatattttagaaaatcaaacaaaaattattaaaaatccaatagaataacttaaaaaactaagaattttttaagaaaaaataagagcttattaagaaaaaatcaagcttattaaaatttataaattcatatacttaaaaaataaaaaaaaaataataattgaaaattcaataaaaacataaaattattttgaaaaaaagttaaaaattaaactaaaaaaaatgttatatttacttaaacaaatttagaattttcgagaaaaaaaatactcaaacttgttccccataaaatttagcttttacaaatatttaatatatttttttgaatatctaaatagttttttagtaaaaaaataaataattttttaaatctcttaattagttttaaaattttaatttcttttttaagttttttaatcattcaaaataatttttttaagatctaaattaatttgttaagatttgataattgtcaaagtttaggtagcaaagttactaatttacaaatacatgtcagtatttattttgaataatgggacggaacctaacagaaggactaaatttttgtaaatgtaaaagttcaggggaaatttttaacaatccatttattttagggggtgtattgtcgaaagttcattggggtccgagtttgggtcggggtcccagg

SEQ ID NO: 225206 - DNA, 3421 bp, Cannabis indica
aaacaggagtttaatacttgtattcataatttttgatctgcaagcttggctcttttatcacatttttttcttatgttttctcatttcattttgaaaaggttgcttgttgtagggagggcaatagtgtgtctgttttgcgtggaattttccctgtactagctcttcttcacatttttcttgaaattatatattttgtgaatgcccatgtaatttcaattttagagaggatacacattggtttactgaaagtgtcatattttttcttttgagatgtggagcacaggtgtttgcataattaggtgtctactataaaattaaaattagaaaatagatttggtgaaaatggtcacaatttgttagggattctcatttgctttcagaggttgcctaggaacaattatttaagcctatcttttgaataaatttgataaagatttagtcaagctagaacgataattgtgtatatggggtaatttaatttgtttggtactatatttcacaatcagctgaaaaattaggactattgcttcagcaaggattatttaaaatatggaaatatgggtagatatgaagttataaacatggtcagatcactactactatagattattttccgctcctacataggatattttttcctgtatttgtgctgtcttattttcccttaacaagatttctgtaaatctcctagcaagcgtttgaattgcacatctttcttcctgcctcatttataatctttgaaaccagagatactaaagttctcccacttatgcagctatggctggtttggctccagaaggatctcaatttgatactcgccaatacgatgctaaaatgaccgagttgtatgttctcgctcgccataatctttttcttagtgttcaaaatagttacattttccacctgattgtaattatgatctgatgtccttgctaatgagttttgttgcacattaattaaattaggctttcaacagagagacgggatttcttcaaaccatatgacgaggtctttgaaacttttcatataatgggtttgaaagaaaaccttcaaaggggcatatatgcttacggtacttttcttgttgttttatctttcatatatgcatgtatatgacatttccctatcttttgttgcaaacattttcaaattcatattcttgctaatctgtaagttgtttcagttaataaatttgtatatatatttttcaaggaacaatttagttggcggttgctattggggtggaattttattattttatcttggatttttttaaaaggtttttgagaagccttctgctatccagcaaagaggaatagttcctttttgttcagggacttgatgtgattcaacaggctcagtgtggaactgaaaaaactgcaacctttgttctggtattttgcagcaactcgattatgatgtggtccagtgcccagctctggttttggcttcgactacggagctggcacaacagatagaggaggtaatgcgagctcttggtgactaccttggtgttaaggttcagcttttgtgggtgggacgagtgttcgtgaggatcaacatatccttaaagctggtgtgcacgttattgttggcagacctggtcatgtatttgacatgtcgcgaaggcagtcactttgtcctgactatattaagatgtttgtgttagatgaagctgattagaggccgtgaccacagtgtctcccccacactcggtgaaattgacccaaacgctcgtgacataatcatgcaggagttctgttctgtcccctctcgtgtcctcattaccactgatctgttggcccgtggcattgacgtgcaacaagtctctcttgtgataaactacgatttgcctactcagcctgaaaactaccttcatcgaatagggaggagtggtaggtttggaagaaaaggtgttccgatgaactttgtgaccaaggacgatgagagaatgttgttcgacattcagaagttctacaatgtggtcgtgcgagaggagctcccacaaaatgttactgatcttcacagaagatctcttttatttctacgtagagggctataaatcattttgctgatctaccaactactatttatcattgctcttctctcatattcccatttactagtgtcctaacttaatttttgaagatcatatatgaccactttaaatcatatgtctctttgccccacttaaatcgtactgtttcaaattttgtttccaatttaagctttgcattgtatgtttaatttttctggtgaaattttttatatggaaatatatgttttcctggatcttatgtatttttttcatactgatctgcttcatctaatcgattctcaagatatgcttcttcgacaacaaaaaagtctcttttatatcttgaattgcataagccgtcttgtggattttaggttttagttcgatcataaaagtatactaaatgtttacacgtatatggttgaatcttggagtttaagtatgcctagtacaaagttaagatgtcatgatttttccttttttattctttttctaagtttcaaattaaatttgcttttattgccatccccaacctactttccatcttccaatatttgtttttcatacaaggactgaaatgctaaagaaatatggttagtttttcagttcttctttctcaaatttatgataatcataaatgcgcgtatgagtgtcaactaaaatgattggtacaccaattatttcagattaaaacttttgattaataatttactttaataaaactaaaaattaaaaaattaagacatttactaaaatgaagtgtgagaattagaaagacactaaaaattctttaaaaagaactatcaaatctgtggtgggtaaacaaagataatacattcataataaaaaaaacagatgaagattatggcacaatcaacaccactcaaattttctcattgtcacaacaacaaagccaacaatgcatcaaatacccaaaataaaaaacttgggggagtcaatgggcagttgtaccagtctaaaaaagataaagaaaatttagtgtagtagtactattagtataggagtagtagtagtgttgtaataagagaggtggtcccctcaacaagctttcaagtctcgagtctcaaccgcttatttttcacagacaaattttatctctgcacacttatttggacaccttttgttccctcccttttcattacaaatcaatctgtccatctccacaatttcattttattttcccatgtcaaagtttgtgattctatcacttctatgcatcatatctagattgatgattaagatctgaactagttctagttttgcacagaccaaaccagaaagaccctattggttgttttagtaaacatttagtttgttatcataccttttgtccttgcattttttatgggatctctctctctc

SEQ ID NO: 225207 - DNA, 6235 bp, Cannabis indica
aatagattgctagaagaaggaacgcacacttgctgaagtaccctgatgcaaaggtgataagccttggaatcggtgatactacagagcccattcccgaagttataacatctgcaatgtcagcggtactatatactcttattcttatatagtataggttttgctacttccagaacagaggtggccttatagtctgggcttcctaatttttgtttcattgtctattgttgattcttgacatatcgactagtttgtctttattcataagttacttttttttttctctttggttgtaattttaatgccactacaacttgaaatggagtttgacagactaactcacagtgtaagcaaaagttgatatgccatcaatctatttctcaccacatttccatatttgttttactttgacagcgatcgcatgccttgtccacccgagaaggttatagtggttatggagctgaacagggtgagaaggtattcatagttttggttactttgttattgttctgtaaaaaagtttttcagctgtagctagtaatttaaactttatagtttttgcacaatttatttgttattcttatttattttttttttttctatattatctttcttaatccataataaggttatagagggatacaaagttgccctttcctgctaatttttcatcaatagaatactgttattgaaggcttacaaattttcgcttgtgtctagccattgagaactgcaattgcttcaacattttatcgtgagtttggcatagaggatgatgacatatttgtatcagatggtgcaaaatgtgatatatcacgacttcaggtttcattcgttaatgtttctttctcttttactgaaatactgattgttgaacacattgaaatttgttctcagctgttattaacttatttgtttgcacttgtaggttgttttcgggtctgatgttacaatggcagtccaagatccatcctatccggtacttttagcagcttactgatttcatgagcaaaacattattgtaagataatgcataggattgtattgttactgaactttggtgtgacataaaggagaaattcagccatcatgacatgttaatgatgttttcatgttttacctggttaattacgatgtagaatttattctattcttatctgcaggcttatgtagattccagtgttattatgggtcagactggacagtttcagaaggatgttgagaaatacgcaaatattgagtatatgagatgtactcctgaaaatggtttcttccctgatttatcgtctatttcacgaacagatataatatttttttgttcgccaaacaatcctactggctctgctgcaacaagagaacaattgactcaacttgtaaagtttgctaaggataacgggtcaattatagtctatgatactgcgtatgctttatatatgtcagaggacaacccccgaaccatctttgaaatccctggtgccaaagaggtgagtgtttttttttgtttttttgtccatgaaacttatttattattacctttcattcagtatctcaattttcagtgatgaatggatgggtgcatgctttttaagttttaacatgtattgcaggttgctattgagacatcatcattcagtaagtatgctggtttcactggggtacgattggggtggactgttgttccaaaacaactgcttttctccgatggatcccctgttgccaaggacttcaaccgcattgtttcgacttgcttcaatggagcatccaacattgcccaagcaggagctctggcttgcctttcaccagaaggccttaaggttagtttctaagtggttgataacatcaaaaagataagacagaagactgtctacgatattagttgggcacctttgtcagttcctgtgcaagttttatggattagtaacggtccttttgagtcatatgatggttcttacaggaacatctatggttcaatgtactcaaaactggaggctttgacagtatacaaagcaatatgattcatactactgtgataacaaactttacatttagtttattgctctatccctatgcaggctatgcacgaggtgattggtttctacaaagaaaacacagagataattgtggagacattcaactcacttgggttcaaggtgtatggagggaagaatgcaccctatgtgtgggttcatttccccggtcgaagctcatgggatgtctttagtgagattcttgagaagactcatgtcgttaccacgcctgggagtggttttggacccggtggtgaaggttttatcagggtaagtgcatttggtcatagggagaatgtattagaggcctgtagaagattcaagcagctataccagtgaaccacatgatctgatatgctctcgttgtattaaagccaaatataataattaacaattatattgttggctttctttgtattctctaactagtaaacttgagctagtaggatagtactattgttatctcttatgttttggattggaataaagcaggatgccttttgttaccatttgttgaaaagcatgagatagccccggtttcagtgagttttatcttttagttctttaaaagatggtgctatagtgccataggccatttttcgttgctattttactgttttgactttgttcaataaatcatgtataacttttatgtttggactccaaatgagatgatttaacatgttttggaaaactgggaataagttctatcattttgaattttataagctctttgagaaaataatgaaaatattatcaaaaatagatttaaagatatcagtctattacaaaattcttttaagtataaatttacacacttagcgaaaatatttcaaatctatacaaaaataaatactaattcatttaataattgactaagaacgagtgaataaatgtgcactcatcaaaagatcttttaacaaaaatcatatttagaagctttctcaagaagagtttcttaaaaagttacactcaaagtaaaagtaagcaaaaccaaggaggaaattaaactctatactttttttatattgtccttttttatttttactctcatttttaaagtctattatttttatctattttttttaaaacactttaccaattttgctcctgtcacttcaatatactctccatgtgactttcttatgtcagggtattctaggccgggtatagtacatataaaaaaaaaggtatatttcaattaaatataaattagaggtaaatttgattaattgataaataaaaaaagtatttttaaatatacgccaaaacaagaccttagtgtttgaatggaaatgtgttttctttttccttttaaagaaggaaaaatggatatgtttctttaaaagaaagaaaaatggaaatgtttctccactaatgcgtaataaattttgagaggatgaagttactcattattattttatttttattttttgacaaaacatattgaagttattagtgtaaagaaaagactaatttgaatttttgccccctgaattttgacatgtaccaaattatgttctttgaacttttcaggttgtaaaaaattcccctcgaattattgagattgttggatttaaagacttttgtccaattttattaaaaaaaatctaacgtggatgaaaatttaaggggcacaattctgtacatattaaagttcagggggcatgattttgtaaatatcaaagtttgggggcacgacttagtatatgaacaatctacatattagcaaaattgaatgaaattagaaaaaagtccttaaatccgaactttccatgtctaaccatcttaacatgtacaatcatccccaagctttaaactcaccggtcctcagccttagcctttcctttacttacacatgtaaacaatatatgtgagcggtagactcaataagaaaagcattaacatataacatattaccgacttgtatttggacgcccataaacctatctacacgacttaatagacaatcaagaactttcttaacaaaaatatgacctttgtaccacatgcactaaatactcgtcccgtactagtgttggttgggctaaaccgtaccctgaacactactgagtgttgtaccacatgcactacgttcttatctgtactagtgttgttaacactggatcgtaccctttgatcatatactgtaccaatgcactccgtactgctaccgtactcgtgttggtagtatatgaatcacatagcgtagcatgcaatttacatacatacacacatatacatatatgttttatactaatcttatcttgttttttaattcatgtgtgtccgtcaacctgaatggaaattcacgtgctgaacggaggcccaatgtcccaatcacgtaaatcgggtaaacaacttactaaacttttttgaggatctaaactaaaaactagaagtttccctattgataaatagcaaagcaatgccctatatattgaggaaacacgaaaaaaaaaaacgacattacgggaaaagtacaggagtctccaaatggactcaaaacgaccccaaacttcaaactaagctctagatcacctaaacatacacaataaactattcctaagcaacagaacaaaaaataaccttaacatgcatatttcacgattgttgagccaagtttgagttcttgaactcagacttgctcaactcaagaattaaccaacaaaatcaacttaaacaagttttaaacaacttaaaattaacccaaaaatcaaacaaaagccttaagggtttggaaagaagctataatcacaaaattcatattctaactaaaataaagcctacaaaactcaagaagaaaagggtttaagcttttacttttgttaaaccttcaattggtactcaaaacctagttgaaatcttgtagaatcaccaagaaaaagaggaattttaatcttgttttgtttgatttttagagagacctagagagcgaaattgaggagagagaactaaaatgacttttttatttagttatacttatctccaaatcttgttttattcacatataatcagcccataaattaatctttaattcctaaaaattccactaaataatataacaaatctttttaagactaatacccaaaatgctctttacttcacacttaagtaacctataggtctagaaaaatggtccaaaaccataaccccacctaatctcgatatttcaagtatcactttatgattgtccccctagataaaaggttgaaaactaacccatgggactctaatggccatccgtcacattttctatcgttaccgagcaaaaataaaataaaaaaaaaaataaaaataaaaatttcacatatgacataaataatacattaagagtttaataaaatctcaaaacttgagaaattataactctaatgcccattttttgaaaatgggacccacaacaaatatattcatatataatcataaaattaagtattaattgccctactaatccatgttttaagtatgcggcattacaacctgaaaccatgcaaacaacttatgcatggtttcggagtcgacattgcttcgtggggcaagataaaacaaccactcactgtcggcactactccaaggtagaccaccatcatggccatgttcatagtgttggatgtgaagtcttcgtataacgtgatgctcgaaaggctattcctatatgactttcgagccatctcatcaatctaccatttgtccgtcaagttccaaacgacagctggtatcagttgtctccttggcaatgaaggaacttcccgtgagtgctgtattgcttcgttatcacttgccataaagaactcctctgttgctacaaatttaaaggggatgaacaagacctcctttgctgttacgacaccaagggggacaaacaagacctctcctgcaaaagcctaagagatgacggagatctctagagttcacactacagagaagaaggaggcaacacctaaagccacttgaaggtgctcccaagagggtaatgacattgactcccgttttgggaaaatcaacttgggagttggtccgactgaggaactcaaagaacttaccctcaacacagcgggcccaacaaaggttgtcaagattggaacaaacctaacggaggtcttgagcagagatgctcatggcttgcctcaggataaatcaagacatttttgcttggctgcatgaggacatgattgggatcaacccccaggtcatctgtcatgccctca

SEQ ID NO: 225208 - DNA, 3189 bp, Cannabis indica
tttttctgttttttttccctaaatataattagtaactttcgaataaacaattcataaaaattaagcatcttccactaaattagtttcaaaaccaaccaaattagatttaccttttttagcattaagagatactttttagtgtttctcttcgactgtcccattgagtcacaatggaagcacttgcccttgggttccttcttcttggacttgggcctctcttgttcttcttggctttaggtgctagcttgcctttcttgggcttgctactttgtctttaccatctcattttttttttcacttccacattgtttgattcactcttcttggatttattattgttgaggttttcaaatactgtcaattcttaaatattggaaggagattgactcaagaataatgaataatgctcacttgagtcctctcattgatggtagccccatgtgtctctccctcatgcatcaattcaatcatatgtaatacatgagttctcacaggtatatccttcttcatcttagtatttatgtagctataagtagcatcatgtctactttgaccagactattgctcaacatagcatagagataatccattaatttataagcattctccatttgttcatgcgtttcccgtagaacattatctatgctagcaagcaaaaaacacttgtccttgttgttggattgaatccaagaatctcatatttgttccgaacatttttttaagcattggcattgggctcctcaagaaactcttcaataaagaaaattttttggttctcacaaatcaaaatcaaattcaaatttgattttatttaaggaaattatcaacattaagtttttgaagcactaagaaaaaaagtaagaaaatttgacatagtagacatgagtgaaaataaataaaatagtaattaatgtatttgaaaaaaaaaatatctagttttgaaaaaataataaacgtgatgcatgagcacaataatcaaaacaataattatttaagttcttccacgataaaattttttaacaactaaagtgttgtcttatgattggtcaaattaatattagatctataagacaattcttatttttattattttgaaacttaaatatctcatatgtccttttcaaaagataaagtactgttttttttttagtcaagttagcaactaatcgcaagaaagcatagttgcattttgtgattgtaatatattatttcaaatttcatgacataacttagtaatgtctccttaggatcagtcaaactaaaatacactatatcctcctcttattcaagaaatcaaccatgtttaaaatgatggaccaacaccttttgtaagggatgaaaataaagtcatcgcgaggcatgtttcatacacaaatgtcgtcggccaataatagagatctctggttacattgacatgtactttttcctccacttactattttaagattaatgcgttttatcattaattctcagtattaatacatatttactcttttatggatgtgattaatttatatacaataaaagagccttcttttatttataaataaattttcagtcacttctaataaaatttatttaaatatcttttcaaataattaaattaattttaaattactaattaaaatttagtaagtttatatactgttgattttaaaaataataaacacaaaggacaattctaataattatgtttctacaataagatgcacgataaataactgtgtggaattttcatgtataacatattatttactaatgcatgatcatattatcaatcaactatttatcaacatttatttaaaataaatacttaaagaaacgatgaactaggtgactactgtatatttctattttacaacttttgaaaaaattaaacataataagtaattacaaaataagcccatcattgattttctctccataagggcaatgttttttacttttgtaggattgttttaagcccttaaattaattaaaaataattttaattaatttatttttaaataaaataattttaattaagactatttttctttatctcatcttctaattatattaaataaatagtaaaacacttttattatttaattaaacttagaacataatacatcataattaattaaaagttgttttaattgaattagaatttaaattaaagcacaaaataatttatcttaattaaaataattaaaattactatttaagagacacaatattatttttaaaataaataataaaaggaaaaattgaaattggggttgccaccgaataccaccatcgtggccggtggctccaagaggagccagcagggccataacacacctgacaaccaaggggctcgatgactcgagacccgttagggtcaatggcacgacatgcttccaaacggtcataaagtccatgcatgcaagcgcatcccaagcgagaatgaccagtcgggactaggcgcgagttaagtataatcagacttagacagtccttggtgtctcacatagcagaaggaccgaaggtcctacgtgttggaacttttgctagtatcttaatttactaacaattatgtttgattataaatattataatctaacatcctaatatatgaaattcatgaagcgatatataaacacataaaaggaatagaatcttcacattggttgcaatagaatagattgacttcttccgttcaatcactctaactctctattctcgttctgtagtagagtattttcgagtgataaacctggattgcttgcttaaactcgataagcgacagttttacatagacttccacaaagatctgagtaccaccttgaatagtgtggatggtactcaactcactaacggaatgaaatttgagagagaaaatagctatttttttttttatataatagaaagaaacagagagagcttgtcaaggctaggataacttggaatgacttatgatcacaaactctcatctctttctatatatagccaacatactagggttagattagatgaaatgggctaaaataaaaagccatggccaaaattcacatagaatggcccatgattataatttttccactttatttcaacttaatgaaacaaaatgtcctttaatcaattttaccatttatctaatttaattatttaaataccaattaataattaagttattatcaaacaaaaatataatttaaatatatt

SEQ ID NO: 225209 - DNA, 3625 bp, Cannabis indica
gatgaaaagcagcgtctgcttgaatggtccaatgaaaactatccttctcagtaatctgttaaaggagctgcaatagaggcataatgtgcaacaaatctgcggtaataaccggtaagccccagaaatcccctcaattgttgatgttacgtggttgtggccattccaacatggctgaaattttggaaggatctgcctgcacccctttagccgacactaaatggcccaaataatcaatggttggctgaaaaaatttacatttgttagctttagcaaagaaacaatgatcacgcagtatttgtaataccattctcaaatgttggcagtggtcctcccaagtgcggctgtagacaagaatgtcatcgaagaaaactatcacacaacggcgcaaaagaggcttgaacacccgattcatggttgcttggaaggtggatggcgcatttgtaagtccaaatggcatgacggtgaattcgtagtgaccttcatgcgtgcgaaacgctgttttatggatatcttgcggagccatgcgaatttggtgataacccgctctcaagtctagtttggaaaatacctgtgcaccccccaactcatccaacaattcgtcaatagtgggtataggaaatcgatccttaatggttatattattcagcgctcgataatccacacaaaaacgccatgacccgtcctttttctttactaacaacacaggtgaagaatatgggctgttacttgtccgaacaaacccatagctcgtcatttcgcctactaacttctcaatcacatccttctgaaaatatgggtaacgatagggtctaaccttgacaggctgagtacctggttgtaagcagatgcggtggtctgtacccctatatggtggtagttgagtgggctctgcgaaaacatcagtaaattccgtgagaatacccttggctaactcgggtaaggtggcctcgatctcctgtatctccccaactgcttgctgatggttgtcacggcctgctgccaacataaacatttcagtcacgtctccttcccgtaccgtagaacgtagctgagtaatagataattgaggagcatcggacttcgacgttcccgcgagttttatgttagacccctgccattgaaattccattgtaagctccttgtgatcatgaatgcatgggccaagtgtctgtagccattgcatccccaaaactacatcaattccccaaataggcagaatatataaatccaccgtgaatttatggccctgtaagagtagctcaacccctcggcataactgtgaacaccataaggaattgccattgcccatatatactttgaacctcttcgtttccacacaagtcaaacccaacctggctgccaaagcttcttggatgaaattattattactccctgtatcgattaatacctccaactgctccttgccatgaaaggcttgaatccgaaatatcctgggatccgttgagttagcgagagagttcaggctaacttcttcagtttgagaatcatcactgtccgttaaaactttccccgtctcgtcatcctcgtcctcctcttcgtctccctgtgtgcagagaattagcactcggtttttacacttatgaccgaagctgtatttctcgtcgcaagtaaagcataagcccttctcccttttctctttaatctcagccggtgataaccttttaactggcaaggaaggggcgctcggcattgaaaacttcgtagttgccggtgtacttgtgttggagccgctggaacccacacctattcccttctgagttaccggagttggtggatgcataaacttaggtgaccaattcgaacgtccggtttcccctctaatccgacccacgagctcgtcattacgatcctcaaacaattgtgccttcgccatagcgtcggctaaatcaatgggtttagccaatagtaattctctgcgaatttcattcttcaagccccatacaaaaaaattcagaaaatactgttctgaaactcctgtgatttgagtcatcagtgactcaaattctgtccgaaaggatgagacactcccggtctggaccagctttgaaattctccctaaaggatcatcataaatagagactccgaaacgcatcctcagtgcccgtataaatgattcccaatttgagaaccctcctcctttctccatccactgaaaccaagtcgaaggagctccctcaaggtgaaatgcgaccatggccaatcgtacttccggtaagaccccgtgtaaatcgaagaatttgttgattttataaatccagtcttccacatttgtaccatcgaagcgatgaaccttcacacgcaacaccttcagtagagagttgacctctcgagaatcaagagtagttgttggttgatgccccgacggagatccgattccactgctagcttgtccgtgaccgccaagcgatttcgataatggtgattgcaattggtccactcgttcatccaggcgagatacctgctcttccaatctcgctgaaaaccgagcaaattgttcctctgaatttttctgaaaattctgaatcatggcggccagttcttcgttcttcatgctggaggtgaagaaccaatgaaagcaccagtgatagctcagtaataaaatgagtattgttcgagtcaatacaaaactccacaagccaataagcttttacattcagcataaatcttttgaaattcattcttctgctatttatactaaggaataaaaacagagaaaataacagattgctagtgctcccgcgagttcctcagctcctctccattctaacaaactcttgcatccatcggggcttcacgcgcttgcgagttccacgcgttcccactctctctgcaatgttggtttgcccagtttctttccctttgttgccttcatcccgttcgttaagttgctggttctcctcttcggttattccctcctctaaccagccttttatgctgttctgggctttgtttgggtcaattaatattgggcctggcctaatagacaatctgactcgatacaaaattgttgaattctgttttgtctgaaattactaatttatttgagcaaattcatgattttatctgttttcaatttaaatgactaaataatcatataataaaaaaaaattgggtataatatggctttagcactgaccattaattaatcaacatgttgtaattatcaatgaccaaaaaaggtttataagtttggctagtgattttatcttttatttaaaataatttattgtagtggaaaagttgctacaatagattgttatttttcaatgacacttttagaaaaataccaagacttaaaaattttcatgactttctgcttctgctcctgctttttatttttatttttactgctaaaaatagaagaatggcaaaagttaaaacttaaatcagaaattaaactcatatgtatgctatgtattttaaaaaagagaatgtgatattgtcaataattactctacaggtttctttaaaatttggttacatcatctagattgtcaattattttaattttctttcttcttataataaatatatatgggcgccatatttgactaggaaactacttattgaaagctataatttcctaccagaccaaaaaaatata

SEQ ID NO: 225210 - DNA, 6023 bp, Cannabis indica
ttctggtgttgaatctttgatttttgttctttttatattcaagcttaaatcaagataaaatcaatctaaatatgaaaaacataggttagcaagaacttgggcttacagacacatatacacatcttcctcgagttttccattcaaaaaggcattattaatgtcaagttgacggacctttcaacctttcgtgacagcaactataaggataatcctgatggttaaggctttaataaccggactaaaagtttcaccaaagtctatgccagatctttggtaaaacccctttgccacaagtcgagctttaaagcgctaaaaaggtccatcagcattgtatttttccttgtacacccatctgtttccaacaatgttcatccctttctttctctgcactagaacccaagtcttatttttcttcaaatccatattttcatctgacatggctttgttcgaccctttgtgggcaagagcttcactgagagtctttggttcagatgtgtttcctggccactttgcttgagcagaatacaccttgggtttaaaggtaccaacctttgatcaagtgatcgtaggatgactaggttgtggctcagtttgtggtttagagacatgaatttttgttcttggttcatctcgggttggagtgtgttgttgatcaatgacaggtggtgtgccaaaatctaactcaacaaagagattgttagtgagatctacctgatgttgctgctattgtgaggaacctgacatcacagactgtagtgctgcatagtgattttcttgatggtttgtatcagttgaagcttggctaggctgagatgtattttgctgagaattactttgaggaacatttgttgttttatctttcacatgagcatcagtattctaagcattgagtggctgcacaggtagataaaaccaggagttaggagtttggactgtaacctcaagttcttttttataattgtttagaaaaccctttttaaatggaaactcattttcattgaaaacatgtttagaaatatatagtctaccatttgagcttagacacttattgcctttatgagattcgctataatcaagattgacacatttggtggaatggaattgaaacttatgactttggtatggtcttaagcaagggtaacaagctgagccaaaaacctttaggaaagtgtagtctggttgtttagtgaaaagagtctcataaagtgattttcccttaagcacaagagtaggtaatctattgatcaaatagacagaagtttggaaggcatcacaccaaaacttcaaaggcatattggcttgagcaaggagcgttaagcccaattcaacaatgtgtctgtgctttcgttcagcacgactgttttgctcagaagtgtgaggacatgaatggttgaagacaattccattttcaacaacttaagtgctgaaagattggtattctcctccccaatcagtgtgcaattctttgattttcctatcaaatgggttttcaaccatggccttaaattgagtaaaggcgataaatccaagtgtagcgattgaagtcatctacaaagtggatatagtaccttaggttggtgttggacatcataggagcagggccccaaaggtcggtatggattaagtcaagaacattagtagctctacttgatgaagatttaaatggtaaagcatgagacttacgaaattggcatgcctcacaaaaacttggattctcattagtggaaacttttacactagatagacttaacacttgatttatcactttggatgaagggtggcctaactttctatgccacagatccttctttgacacatgttcacggctaacaaaggtaaaagactgactattagactcaactaaaccagtaaaaggactgaaaatagactcaaaaaaaggctaagaagcccaagttgcaaatggctcgatattcttgacagtagaaccctccacctgatataaaccgtccttaagcttcctccgcagtaccactgtctttgttgctatgtccttcacaaaacacacatcagagaaaactcaacaaacactttgttatcagtagttagtttcgatatactaatcaaatttttggcaattttaggcacaagcaaaacatcatttaattgtaggttgtaaccacagttagagtgcaaatttcctaaaccaatgtaagtgatattaagttgattaccatcacctacagttagcttatccttaccactgtaagtagatttgttgttcatgttttcttgatccgaggtgagatgattgcttgcaccctaatccgcataccaaccctcgtgatcaacaacttcgggtgtggccacaaatgcactaggatcttttgtgttttaaaaggagttgttattgcctagagtaaatcccatataatactcatcatatctgttgtaacaatgagcagccgagtgtccataacatccacatacttgacatgttggcttggtatttcttcctcctatgcctcagccacctcgatttgaacttcctcctccatgattgttgtggtagttggatcctctgccatttcctctaccagggttattttgattgtaattagaatactccctgcctccaggattatgatgattagactgcttgttggcgagagcagcagagggacctgcaccagatgttgcaactgagttcttgtttgttgcagtcaagagatgcaatcgctccaacttgctatcaaagctcaatagtgtaaactgtgtaaagatcatttgtaatggttgagtgtaaactgtcatagaattaggaaaatgtaacttatgagatttacctaaacaacaggcatgacaaaaatcaaagacagttttattacttggggaaacaatacacgatgtcattatattttgtacaatttgagctgttgggtgccccaacctactatgccacaactgaaatttaaatggtatatgaaattgagaaagaaatacatcagattgtaagggtagtgtctttggtggtggttgaccagaggagaaaagagagtgcaggtcacttatttgagtgtgattaaacacatagagaccattgttaaccttgctaagtagaagaatcttcttggaaatgtagtccttcacaaaataagagtcagagtgaaattcaaaaaagacattattatctttagtaaattatggcacactcaaaagattcttagtaattgtggcgatatgcaatagattcttgagaactagggattttggatgtaaaggagaattaaaagatgaatgagcaatgttagttatgtgcaaacctgatccatggccaaccaaaatttgttcttggcccaggtactctgaattgttgatcagattttaagcatcaggtgtaaggtgatttgttgcacctgaatctagataacaattcaaatcttggacagtgtctggtgtagcaaccatggcatgcataacttgcatggggttactggtggcaagtgttggagctgaactagtgaaggaagttggtccaagaaataatttgtcaaatttgtagaaacattgaagaacaacatgaccaggtttctgacagagttgacttatggttcgaggtggttgctgccaagactgatttatccatcttcttcttcctgagtagcctctaccaccacgattgttggagccaccataagtatctctaggagagttgtatgagtcttgagtctgctgaccattacagacaggtggatttgtaacatatcctcctttgttgtgttgaatgcctccacgactattatgtgctagattgatttctgtagaggatatgtcaagatccttaacaactttgtcaatcctagttctttgagccataaaatgagcttcaacttcagcaatagcgagcttctcctggtgcatattgtaggatgtgtagaaaatgtcatattctgatccaagaccataaagatggcttcgacatgatctgcaatggtaacattatggcctatggctttcaacagatcaacaatagatttgatctttaacaaataatcactaatagaagaggaatttttcttaatgttacggagttgagtcttaaattgaattatctttgagttagtttgagtactgaagaattcttgaagcgcgatccaagcttcagcaaaagtttcatgtccaatcatacgagtgttcatctgatcattcatgaaggacaacatccatgacagtttgagctgatcttgtgtttcccagttggtgtagtcatgtgagactctatttgtggttcgatctttgagtgtatcgtactttagaacagcagaatctggtttgaagaactgttgtaagcgatggccacgaatggcagtgagaatctagtgtttccaggataagaaattattttcatcaagtttggatgaaagagatagcttgaaggagatcaattttctgtaaagaggatctttgttggctgaggatgaagcagccatggaagaacgaaacaagaaaagggaagaagaagaagaactcaataacagttcaaagagctttaagctctgataccatgttaagacaaagaacaaattgaatgaaatgaattctgttattgattaccaaggcaaaagtatagagtttatatacatgacctaagcttaggtaaagaaccaccaactaacaactaaaaaataatagaaattaactaactgtacaaaataggaaaacatttactaactaactgttctcaacacagaatctatttagtaattcatcatgccaaagtacttggaatatgcaagtgataaattataacataatgattcacttatgtataaaaatgagcagttaactcattattgtctcatttattttatgtgcagagtaaatttattgtgaataatagtaatgactacacaaataagatacaatgatgacagcaattttaaaataatcataattacaagtaagatacggtaattatagattgacgacaactttaaattcgtagttatattggaatgtgctacaaaacaaagttagattggcttatatttttttattctaaaagctatatattcttatgtaattaattttgttcgatttgcaaactctcttgcatactatcacaaccatagatttcccacaatatagtaacatgtctaagtttattaatatttacatcattcgattaaatgattgtaaaaaattaaaaattaaataatttgattaaaaaatatctataacataccatataaaatcaattttgtttagaaatacaattatatttattttctcattataattaatggattttatacaaacatatattcttttagaaatatattttaaccacttataaaatttacattaatatatttgatgatatatatattttgaaactaaaaataattaggaaattcttataaaattaaaatttacaatatatattattttttttaatacaaaaatatgaaagtttattaaaataattactcataatatcattaaaaaaaatatatataagaaaatatcaaaatttgaaagttgatattataatacacatatgttatatcaaagtttaaaatttgggtaagatacagtgatgataaaaaatgagatataatgaaacaacagataagatatggtgatgacaacaggttaaatgcggtatatcaatggcgcgtttactagactctatctggaatcagaataatcaatgggagaaatgaattggtttaaaatataaaataatcagaaacaatattttattacgttatttactaaactgagcggaaaaaaaaatcagttacatattattttatttacataactaggaaaggtaatgagaatgcttcaatttgataaaattgccattatttgaacatgtaattatattctatttgtagatttttaaagggaaaatagtggcataagtacccaaagtttcatatttgtatgactaagtacccaaacttttttttttagtggcaaaagtgcacaatgttcacttctgttagtatttgttagtaccccaattcaattctgtcaatttgtgtacacgcgtacaa

SEQ ID NO: 225211 - DNA, 3638 bp, Cannabis indica
taagagccattcattccgtgggtgtaaggacctaatggaggcttgaagcggggacgttacaattataattaaaaaaaacttcaactgaatatttttttttgaaataatttttactattttaattatatttacacctattttttgagactattaataaaaaaataaaattgtatgctacatgacataaataatgattctcgtaaatacattgcaggataggtcgaataaacttataactcaactgtgaggtaacctcatctaaataaggatgataaagtttatgaataaaggtatttcggcgttgttgggatatcatttcactaaaacattcaacatcgatctcatagtgcaaagatcttgtagttgatcgtaatacaatgatcatgaatcacctcgtattacattatagtgatgcatcatcttgtaatacacaaccagtgggcatcacctcgaattacacaacagtgatgtatcatctcgtaatatatagtcagtgggcatcacttcgtattagacaacatcacctcgtaatatacaattagtgatgaatcactctatattacacaccaacaatgcatctcctcgtagtacacattcagtgataaatcacctagtattagatagtagtaatgaattaatcacctcgtaatacatagtcaatgactacacacaacaatgcatctcctcgtaatacacactcagtgatgaatcactttatattagatagcagtgatgaatcacctcgtaatacatagtcaatgatgaattaccttgtattacatagcaagaatgcctcacagtaatacacagtcaataatgtattgcctcgtattactcagtagcaatgcatcacctcgtattatgcacacagtaatgcatctactcccaaataacatggtcttaccaagtcaatgaccacttgaaagaccatttttttgtatatcaaatataaacagtaatttaatacttatcaaaatattcagttatatataaaacataggctttaaccatccatcaattgtaattttttactaaaataaagttgagtaaccaccatcctatttctataaataggggttcactcatagaaaaaaactagaactcaaaattaaatagactcacaaaatatgtagatttaaattacaaaactatgtaaaaatattaggtgtttattatttttatttttttaaaaaatttatttttacattaataattttatagattaaattgacaaaaaaatcgtaattaatcaaaaaaactagttacgaaacacactataaataagttaaaaataacaaagtaaacttattagatagatgtagagcaacactttaacttagctattcgctatagctattttataaaaaaatagctgagatattagagttttaacataagtgctcttaaatgcatatttgaattggatgactttgaataagactctcctgatcttgatctcatttaattagtttatcatcatgtcacatcatcactataatactatatataatttagtaattttaataactgtattatcaaattaaaatcaataagatcaaaattgtatccattataatatgacattaaggagagtaataccttttagtaattctcatctaattaataaaacatatataattgtataagaaccaaagttaaagccttcttttctaatagaaaggatccaataaaagatttcacttgtcacaacatattacaaaatttgttgtgattgaaaacacattttgtgacaattttgttaccacattacacacaaataacatattacacaaaaattaagattctccaaagtttctttagccatgttaaattctcacccaattattattttctttttttaaaaaagaaggggcccctccattaattctcaaatatgggtttgctttgaactttgagcacacacgtacacttgaacacacacctcagtactattcaatcaacacactcctctttctggtccagtccaagtccaggtgataatatatataaaaatataaaaatataattatacataaaaaaacacacaaacatttgtttcatttaagctttaatgtttcatgttgtaacaagtatcgaaaagttaaaaaagtgaaaagagaatctaaataggtacgtttgaccaatctactaggaaaatgaagccaactctcttaattaattcacatacatacatatgtatatgtatgtatgtataaaaatcccacacccaaaaaatgggattccactacactattcaagtttcaactagctttcctcattacttagtataacaatttgtagtcttcgaggctataccctctcttataaacaagtctacatacatttatactagcctattggacactactttaccattccaagttttttttttttttttatataagatgcgatgtttaattatattaatatcggtatgatactaaaaataatactaaacaccaataatatcttttaactaattctatttttgtataaatataatgaaatgatgaaacacacacaactagtactcaacaccacttaaaggtattatatcgatttttgagtgatttaatataagatctcgtaatttaatttaataactattataaaatattgtaaactatttacaccacgctacctataaatgttaagaattatggagtttcatctcaaaactaattggtgatgagtggagtagcccatgttatatgtggctcaatagtactctaccacttagatggtgattattttttgctcaccaatcttgaaccatatcagagtggacatggtcactatttgatatcatgttgagaatcatagagtttcatctcaaaactaattgatgatgagtgaagtagatgttattatatatgagtcaaatattctaccatttattctatgtgggacaatgtccataataggtaccaatattaatgttgatttatataaacatttttatatgatagagaaatgttaaagggcactttaaaaattcaagcaccacaagacgtatcatactattattggtaaaatttaatatcgggtctcacacattttgatttaataaatagagaaatgttaaaagtcaccagtgtaccttgcacactcctatgtgtaaatatcaatattggtccaattaagtatcagatctcatatactttaatataatattttttaagaagtatcgttagtcaatcgcaaagtgacatgtctagaagtgctagccacaagtacccaataacaatgctttaataaataatatagaaaaacactaaacactcacaacacgtcacattggtgtaatgttggcaccttaaagtaccaaataaatagagaaaatgctaaaaagtgcctatcaaccttcatagtgtcatatcgttattagtgcaattaagaatcgagtctcatataattaaatgtaataatttttataaaatatcgctaaccaatcacaagacaccatctctaattgatgctatacctaataccaatgctttaataaataatatagaattgagaaaagataatacatattttaatttaataattattataaaatatcattaaccaatcataaaacaacatctcgaaacagtactagccaccgctaattaataattgagaattgctaaaaa

SEQ ID NO: 225212 - DNA, 5360 bp, Cannabis indica
aaaatacatggtccattttgtcatttaacaaacgcaaggtccaattggtaactttgtaaaacagagggtccaaaatggtatttacccttctttttctgatacttttgaaagctgcaacattgtttttgttaaaagaaaaaaataccttgctggtaaatcacttggccattgaggctagaaaaggtcaaactcctctaatcaatgtaattggggagggattagcccctgtgaatcccagctctttcctttgttaatgaactcgaggttctttacaaaaaaaaaaaaaaaattacacaacaaaaaatcacatgtaataacccaacatgtgaacaggaaggactccatacaccatagtaaattcaataaattaaagtttatatttaaaagttaaattacattccaatttacactaataatttttatatgcttatttagtgctatgacttatgttaaatttgataacaataaaaagaccataaatgctatcatgttcccatgtggtggaaagaatatttgcttgcataattatccagctaacgaattattttgagagtgtaatctaaaactttatataaatatatttataaaacttaagaaaagtaatttatataatttgtttttttaaatgtaaaataaaattttgctgaaacaaagcaactttattgaaaataccatagacaaactatatttgaaaaatagacaatctaattatctgaggactcatgctctctgctgaagcaaaagaagattagaaatcatcaattattataatttttatttttttttcctacaatttttatgcaaagattttcttcaatcatcaacattttaggaattacttttgtttttcctttttcaaatttttacaattttacatagtgtctactttatgattttaacattcttttattgcttttagaataacttacaaacaatttgcaattgaattatcacgaaatcttcaagtgtcagacttttatttaaatcaatatcagtcacatataacaattaatatttacttttatttcttctttatatatagataatatataatatcagaatccaacaaggctttggacacccgaaaatacacttaacctattacccgacttagccataagatcatggaaacgtactattttgataactgtgtttgttttcaaatcataaacaactaatttgtggaaatcaagcatcaagaaaatctgatcattagtagtgttgtagtatttcaaaggcacaacactgaggttactgccaaaaacaccaggcacaaccgagaataacatactccaattacaactactattctctttatcatgatctttcatcacccatatctcataatccagtagtggaccaatatctctgtaaataggtttgatgacacaaactgagccttcaaattccacagctctaaacgcgttacccttactttgaaatggcaaagacaaagtattgtgtttttcagtcttaagatcaaaggcaaaaattaagttcataccacttgattcactcttcactactatccaatacaaacaattgtcaacaaaggcacaattactcaactcataaccatagttttccaaaaaagcatcgtgacaatcaagccttttcaaagtctgagccttgacataatacaagtggtacttactcacataattttgtcttatgctatcaaatcttgtgtgagctacaaccttatagtcatcgataagaggatcgtaacccaatccaataactttcgcatagggtgataatctataactataatgggataagggtgtgtgattttttgtaaatggattgtaaattgaaggacgatcttgggttattatgaggccattgtaacaacaggagggtgtgccgaatgggggtattgatgatctgattttttcaattgagcagcattggttagtaaggtcgagccaatacatgtcttttttgttggtttttttcattgttgatgaagataaagagtccttgtttggaagatttgagttgcatcttgatgaaatgtggagcgtcgattagagtgcgccattctttgcatactgatctgtaacggagcaagtctttcacacttaaatggcaaagtatgttcatgaggatatcactgtgtatgtctacacttgccattattattcttttaatttatttttgctatggtctattgatgtagtcgatttcgattatatataaagaaagataaaaaaaaagattaatgttctaattctaattgcaaaataaaagattatatccgatatttttaattcatttttttttaagtaaaagataagtattctcctgagatataggggagttagttcaattggggatttgttatttgttttttacgaaattaaataatcacattcattcaaaaaaaaaaaaaaaatcatttgaatttcaattttatttttaaattatttaaatgagattttcttacccttaatttcggttagaagaggaagaagaaaaaaagtagttgaaaccctagcctggagctatattttgaagttaaattttgctaatgaaaaaaaaaagatatatgtaaaggaaatgtaggaaaaaaaggatgaagaataaatcaaaaataataaaaataaaaaattatgtttagtagaaaaaaatttgttgaaagaagtttttttttcaaacaattttgcattccacaccaaacaaaacatgagaatttgtttattttgtatattttctactttcttttcctaacattttccttagtttttctttttccaccaaaatctaactactgatatcgacgaaaacatagacataaatataagtcaaaagttctcaaaatggcattagagaaattaaaataaaatatatcaactcttctaatgtctctctctcaaattgtttaatagccacaagtatagaaatataaaaactatgctacaataataagaaacaaaagaaccaagggggattcaaacaacatagtagatcaacttgagggaggtggtggcgggaggttattaggaggagggggaggaactaatccctgaggcatatgaggaggcctttgttgaggcggtggaggtagccgccaattcggctgttggcctcccatgtgatggggctgttgttggcctcccatgtgatggggctgttgttgttggcctcccattcccattcccatccccatgggtggcggaagaggcctttgaggaagttgaattccctgttggggtgggggcggcatgtttggaggtggtcggtattgttgaactggaggtgggtgcatcatcggtgggggaagaccttggccgggttgctgtggctgaccctgccaagcttgttgtccgggtacttgcatgtgttggaaagccaaaccttgtggcggtggtggacgcattgaaggaattgggtttggaggaataacaccatttgcaaaaggccgtggtggcactggagcacccataccaccattaacctgaggaccgtttggaagcgttggaggcccgctggcgaacagtgtgtgaggcctgctctttgaagtaggattgctagcagccaaaactctctctgcaagcaggtaatgttcacaaatatgagaataattattatcccaacagaacacaataaggcatatatccatggccagaaaaaggaaaaggaaacaaagcaattcaagcatgtagtgcgaatataaatgaaaagtcagtgagcattcttatcaaaatggtctgattaattgcagaaatacggtgaattgatgcaaatggaagtaccatacagcatcatggtgaaaagagaaactgacctgctggagtaccatgacgctctcccttggtgtctttcttataggcatatgaaactgttatttgacggttgcaaagatattggccattcattgcctgaaagaaacaaaatgaggattaagtcttcgtcagtatatacatggtcagcacagttaagaagaaacaacatgacaagcattaagaataaaaagtaaaattgtacagccaagccaatccatttgcattaaggcatctatcctgaaaaagagtaaggtgagccaaataattttgatacacgctgactctatttcaattaggcatggccttgaccaataaaaatcaaatatatttataagtttaaatatatatatatttaaattaagttgttcgttgaaattaatcatcatagaaaccaactaatcaactgtttaattcatcaattcattagctgaattttacaaaaaaatgcattatcaatgtaggcaacatacctcaatagctgcatcagatgcctcaaaagaatcgtaactaataaaaccgaaaccacgagaatttcctgtgtctggatctctcataatctggaaaagagaagaagcatttattagactcagattaatttcttacatactataccacgtctgagtacaaatgaatgcagaaactaatatatttaaatttggaataacaccattcttagtatttcattgataaaaagaaaatgtattggttcaactgcttctctctttttctcagagagtaatcgagtgcattcaacaaccaatcgtgattaaaaagattaatgaggataaacaacttcatacctacaattacaaaagcatatgatgtacagagcaacctgccaattaagtaaaaaaaacgtatacattaaactttcaaccattccatatgtattttatttgattgtcattttattctttggtttggtaagatgcattgggcagtaatctatatcttgaaattttgaaaagattaagctacaaaaaaaaactatttccattacaatacacagacaagcaagtagatcaataggttcatgcatgttctaatagtttgtatttgtagaataaatcaaagaattattcacactaatttgcacaaatttcttgaacacaataatatgtctctatccattttatgttcttttcaatgaaacatgaaaaaagaaaaaaaaaaaaaaaaggaaagctccactatgaacaaaagacaaatgcagtacctttggatttgtgacaatgactccaaaagcactaaaagtatcataaagaagtttctcatccacatcctgccagaaaaaaaaataaaaatctgttaaaaacgagaataccaatgatgatatataatccattttttctgatagtgtctaattaacttacaggatcaaggtttccaatgaagagattagctccaacatccaagctctttttatcttgtgatgcctaaaacaatacaaatcacacaatctattatagccataaaaaatacatacaaatttactaatgttgcataattttctacatattcatacgaaagtaaaagacccgagtaacctttggaaggaaaaaaaacaatacc

SEQ ID NO: 225213 - DNA, 4810 bp, Cannabis indica
gtaatagaattgttgttttaattgacacggttttttaaagagctcaattttaaaattttgcacaaaagcccacaaaatgcttgggccgaccctgtactggaggctcggtttaacgctaggatcatttaagcagatttggtagagaaatgaccattagctttgttagtccaaacccaatggtccttatactgcccactaggtccaatttatccaatttaaagattgaagtttttgttgttaacccaaattttaaggtattcgatagtgttgtaggaaggtatagatagagtttcccaatcagatgtcagcaataatagaaatcttttataagtaatatagcatgcaattaagtaaacaattccttaaacatgtactcataaaccataagcattattagttttacacgtaaattttccagcttattatgaccattagccatcatctgctgttctctatgaaaaaagaatagaatccttctatatataatgttgttactatacagaaatccacttaaagcttatatttccttgaaatggaaaaattaattctgaaaacacacaataaatataaactatatatagtatttttatgttggtatatatgcaattgaactggttcccatttgtcatctcctctggaagttgaaagcttttattgcaaaggcaaaaatcaatgcaaagaacgcacagaaaccaaccaccataatacctgccacgcccaagtaatcgtgtctgaaaccaaacacttctttgagtaatgtttttatagctaccttgtgaactccatctgatagtttaacaagcccattatcatctccatattgcgaagcgagcagcccataaagactccaggctacagggttcgcccagtagtaccatctccaccatatgggaattctctgaagaagtaaaacaagtcattgcagtttataaatatattgtaccttttgaaaaggaaatgggcatatataacatgttttgcatatgtaatatttttttataaaacccacacatcttgttgtgatttgtttaaagagtcagtatagatggttttattagatttgttttattgtaagaatcaagatatggcatgcttggttagtttgtgtgtggctcatctcatgtatactttgaactagattgtcctgtaatgattcggcataaaaaatgtgttttacaaaagagccagaagttataagcaggactatttaccttgtgaggaatcataaagccgctgaaaagattccacagcatataaaatggagcagcaatgatggcagcaacattgtggtttggcgtgatagcagtagtcatcattccataaaatgtaaagtacagcatcgtaaaatacatgaagaatatgtaccagataaatttcaagaaagtccagtcaaactgagccatggagtagaaaactgtgctatagatcattgattgtgcaaatacgtaggggaactcaattgcaacctgcacatattcattagttaaatgtacatgattagcttacagttcggaccaccatggtaatcagtaatcactaaaagaaggatatttttatcagaaaaacctgagccattgcaaatggtaaagccgagtacatccctgcagccctttctctgtaagagacgaatctttcaacagaaacaacaggttgaactgcagtggcattagtaattccaacaaataggatagctgcatacatggatcccatggcattaaatatatcctgctgggtctccctgtaaggaaacatgacagtttagagaactcctagaagacacaaatagacagcaagattaattaaacattggtttagattaagttattggcactaatgatgtacaactttggcattggtctagtttgctgcaattacttcaaggataatgcttttcatttgaatatgaccattttttgttaatgtgtgacactcagaaagaggacgctatatagtactctcccctactagtcatacacactacttgatctcggccataaatagcattatgcttcagagaaaacaagctacaactaatgttgtacatgaaccagataacctgcaatgactacctcatgatcaactatgattgtgcgtgtgtgagatttctgatagtctctagttgttgaacaatgtccaacccacatggagtgtcaattgagtactttaagaacttatagcaggcagtaaaactatcaaatgattaagaaagtgaaaaaaagaaaaccttctagcaccaaatctccagcatattgtcccaaacatcaatgagatgatgacagtgtaaaagaaacgaacagcagtatattgggggtttctccaatacgacaagttttgcttccaaagacaagtgataaattgttcaaaactggattgggaatacttggttgggaagtttagttcttttgcattagaactaggcctgcttaggttttcaaccaaatctctgttacgtctggaacaggaaaagagcagagtcagatgaagaaacagataacggaatataaatctaaaagataagtccatggaaaacagtcatactgaaataaacttgatcgtcggtatatttctgcaaagtctacttccaaacggctttcttcagctgaagaagtaacatcaagcatccatgtagcaggattatatccaggcctaatcggtgtcaccccttcaattgcctagagaaagagattttatgaggttgagttttgcatttaaagacattaactgttatataaaatataattctttacttactgacctcaaaatacttgatgagctcacatgaccttggaccaagaggaccagcatatatgagctctcctccacgcttcataaacaaaagctgtaaagagagatgagatttagaactcagtacaagttaaggtgttttagtacacttgtcaaatgaatattacaagaggggataaggacaaccaacaatagatgcaggaaatcattggaaagcataatgcacaggtagaataaacagcagggtgatgagtgctatagtaaaatactttaatttggagtgaacatactcaaactagtatacaatacctcatcaaaagattcaaatatgtctatgctaggctgatggattgtgcaaactattgtgcgaccagtgttaacaatattcctcacagttctcatcacaatggctgctgatcttgcatctaaccctgatgtgggctcatccataaatacgattgaagggttggtaactagctctactgctattgttagcctttttctttgttcagttgacaagccatctaccccaggtagaccaaccaatgccccactcagcgaagatagttccacaagttccatcacttcatccacaaaagcctgaaaaatatatcaccttaaaagttattcccatgctaagattgacaaaaagtgaaaaacaatacaaataccttctgtgtctccaagtcaacatccgatggcaaccgaagccaagcagagaataatagtgattccataatggtcaagcaaggagaatgaatgtcactctgctcacagtaacctgatactcttgcaaatgtttcttgccttttgggataaccagatatatatatgtccccttctacaatcccgccagtttttctaccagctaggacatccatgagtgtggtttttccagcgccactcaccccaactaaggcagtaagaataccaggcctaaatgccccagtaacattaaccaacagttgcaatctgtcttctacaactccttgttgcttcagttcctgcattgaaacttgaatcagataaacatatataataaaaaagtttctcaaagtaaatgacaccaataaatggagtaataactcaccaaagggacatcgacataataattgatattactgaaagccatggaaagtggttgaaatggtagaaccatgcctctttgcttaaaatgtttacctgcaatgaagtttaggggaactgaatttaggaatttgtcttgagatatcatattagaaagaccaatgtaagaatagcattaacaatagcatgtcatttacgaaccattcaaagaccccgagtgctccaagtagtgtctaagctcaataacaacaggttctccttttcttcttttctctctttctcgtaactcttgcttagagactacagcctgttgccttcccaaagctgtatatataataaaaagtgcaaaatcagctttaattccttttaataatcttgtttgtttgaatgtactataggaatcagcattttgtccaattttaactgaatgagattgcttacggttaaggtaagaaaggaagaatgtgaacatcaaattgaagaggagtgtatagccaagcaaagcaccaacaccaatccaataccagtagctctcagaaaacaaactgcgagcttttagcaatgcctctcctaatgtagaagagctggtagcatttccaactacctacatatatatgggaacaaagagccataattaagttaggacgatgtggaaaatgcaactcgtgccttcatatatacacatattactttaaagaaatgaagaatgagtaactaattgcttgtgttactaagtttactttcaaaaatgtatgaacaatatcatttcaaattttaccttatcccaggaatgtccaaggaattcattcacagaagctgcattttgtgcatacatcaaaggagaaaaccagaaaccccatatccaccaacttggaacacgatctgtgtccagaaattaaatcaattcatgaacatcaagaaaagttattgagatcgaggctctgtcccctgaatttatttagttttattacctcttgag

SEQ ID NO: 225214 - DNA, 2516 bp, Cannabis indica
gtacgtggcaaatgtaaatatatgaggtaaaataaataaaataaaattttggtgagatattttaaaataaagaataggagtgctctaatagcaaaatgatctactgacagaagtagtaatatacaataactaaaagtcagttgatcatggtacttgatgaatgtttattaaccaatgtcatattgctttgatgaatattaataaccaatgtgaggagttatttactataaagactagtttttaagatttttttttaaggatcagaaaccaacaacccctgccagaaaattattatacatttactaagtaaaaacacttcattcctggattatatggagtgttaatacattacaagttctcacaatgaaaacccttgaagataatttatatatacatgtgaatgtgatggtcagcaattttctcttcctgtacaccattggtgtggtttgttagatcaaaagaggtactcataatacattacaaatagggcatctggtatatccttaggcagactattaatgaaaagaaagaaccttaatgcatcatcctttaaagcggtttcggtatcaactacatcatttccactagttagaacccacaagtcctctgaattcactctctttatgcttcccctgcaaaatgggcatgactctgatcttgtgttcctgtaatgcaaatagcaagtaaggaaacataatcacacactaacgaatgagaagacaaacggtcgaaaggcctattttttcattaccagtcgcggtagcaattgatgcacattgcgtggcagcagttgggcaaaaccattttggtacaaggctctaagcaaatcccacattcatcttccctatccgaatctgcatccaaacgcttcctcttttcttcatacctctttctgattgcgatttctgagttaaggcttttctcttgagtgatttcaaactctgatgaatcgctgtggagacgctgaagtgatgggagtataacagctgcagtttaaaacaaaacgattggcttaaacttaccatactatttggtcaaacttaagagaactagaaatacaaaagcaaacttcaaagagtagaaaactactgagaaatgtctacattaccatagaattcactaatggatgcttttcttccataagaagcgatatttgggcttccatccgatcgcatctgaagagacaaggattcaaacaactttcactcaaacaattcaagctgctaaccatagcttttgtttgaaacacataaacagggaattggagactcatttcaccttatgtacaacaacatggaaaaggttcaagtagcttgagagtagacacgaacacgagcaatccatccattgtaacaaaaacacgaaaataggtgccaattcactgtaaaccaatttcatctgaagatatttaccgccttttccccttggaatcgaagctgccctgcaaaaacatttgatgtacaaagaacaatgaaaagcctgattttgtgccatgtaaaagaaacattatggatcaaacaacattgcaacagtatactgcttttttttggtagatcatttgcaatataaatttcaaatcatggttgacttaaatctataaattgcttttacacagaatctttaaacccaatagttgtgtagtttgactagcataaaaaagtctgaagtacaaaataaattaaaatattacaatgataataagcttttgtcaatgtaagcacactggtcaacaaacaacagtatcagattaaaccaaacacaaattaaagaaagaaaaaaaaaagcacttttatacacattccatctccatttaaaattttaaacccaaatagtttgctttaattttttttccctttttctaactcatattcctgaacttcataaacattagagattggacatttggttcttttttttttttttaaggtaaatacttgtaagataaaagcaaattccaaaaaatgaaactcatctgactgattgattctctggggtttcataaaataggattcttttctgcttcatttaaagcaaggaaaccccacaacaataatacatttccaatataatcttatttagaaaagcagcttaaatttatctctacaaatgaaaaaaaaaggtgaagcaatatttatttttttaaaaaaaaaatagtaagagagagagagaagagaaactcacagcatattagcatgatgaatatcagcctcaagaatcttaagggagtcttggtaagatggcctagcagcaagttgctgataacaccccaacatgtttgtcactcttttctctcctaaaaattgaagctttgtttatttagtagaagaaaatgtgagcaaaaacagagaatgaaaaaatcaaagagatgagaaacccagacttactggtctataaacacaaacccaatttataaaaatctttggtctttgataggaaaaggtcttttttggagtgtaaatgaagctaggagcgttgggttagggaagatgaaaacctgaagagagagagagagagag

SEQ ID NO: 225215 - DNA, 3667 bp, Cannabis indica
tcttaaaaaatataattgatttcttccgctttataattagaaatacaaaaattgtattttataataaaattgagaaacatataaaaatatgatgaattacatataagtaattttttttttcgagttaccaaattaataactatatatagttttataactaataggcatagctacacaactaattagtaaatttagctcaagggaaagctcattgatgataatattaatagtaatttagtttgttgattcatacgataaattattatatttagttttattaattagataaatgttatatttattatttagtatgttttatcaaagaattattggatttggttgaaaggtcaatagcacaaagttgtcatgtgttgaattatgtgtttaatttttcatttaacactacttctatatttttgaaaaaagaatggaaaaaataaatcacattaatagaaagataatttacatgatgaatagagaggaatagatggggaaagaactttatttttaaaattattttatttgatggtagctctttttctttctttttaagatactgtattttgtttcttatttttttttttttataatttctaagatctaggtaattcaaacttagaatatatttttatgaatggaataacatataagtcttagttggcttgatttttaaaaattggttttgagcttctgaagctctaaaagtacttctgctactagttgggtaactaataaattttaatttttactctaaatagttcttttaacaaaagtcaattttactaacttgttcgtaaagaattttttagaagttaaaaactgaaaaacagaaactcaactaaataggactatgactactagattatgtttaagaatttataaaaattttaaaaagctaaaatgaaaatgctttaactctctttcatattagataaaattcaaggacgacactaataagagcagtcacagctgctgttttaaaataaagaaaattaaaaaatatgaagaattggtcccaaaatcctactccaagagatgctttatattatgagctattatacacatcagctctattccttcgctacaagagtttttttaaatcatttttatattatatttatattttattttttcaattttctcttcaattggatgtttgtttgtttatttttaattttttattatttcttctaattctttaatattaaaaatatgttaaaatataatatttaaatgaaataaaaaataaaatagaaaaactgatatatggtgtaatataaaaatttgaagtaaaataaaaaagaaaaaatgttagtgatgtattttaaagaataaaataaaaacagtgctctaccactttgtctaacacttcaccaaacaaacttatcctttattatttgaaaaataagtatatagaaaacttagaaaagtaacataagtagtatttcatttaactttccgaacttaatcgtatgttggtctttaaatcaatgcatatgtaacttaaactcataaagtcaaatcttctttcctatatatccaaaataacaatattatttattatgagacaagatcaacattcaacaccacatactattatttatttattttgtttaaaattaataaataaaacagcacctactaatacaaatgtaagtaatactgcaatagcatcacaaatttcttttttttttttttattattaaagtcaatttctttattacagttgtcataatatcattagtggacattattatagccaatgatgacgtggtagttaagctccaataagtcgccaaataacgtaactgccttaataatgattatttgattattatttagattacagccaaacaatgaatcatatcaatgctattgctagctatacacatatttttgattatgcattattattgggttaattaatactattttaaattatatgtttttgtaaaaattaccaattaaattttaacatatgggaaagttacttattactatgagtaatttttaaaattatcaccaatattaattgtgtaaaaaagttttacacattttaatttgaaattcttaatgctttaagagttatgttgtgtgcatgagttacatctctttatttggtctataacattcatggattggaggttatgagttcgaattttaaatggtgatatcttaaatactatataaagaggtttaagatgctcattttgagatgaaattttctatcaaaaaaaatactttgctagaaaatcataagacttgataatttccaaagctattttcatgagagttcccttagttcttaagaataagggaaataagattttgaacaaacgtgataatactttattcaagttacggtgatcgatccccactaatctacgctaaggttgtgagtgaggatatatatatcttctttttcatacactcaagattatggtgatccccactaatatctatataggcatgtcaaaaagatccatttagctggagcgggttgaagctccgacccgacggatcacctctgatccgaaacattcagatacttattggatcttagatcagatctgctccgccccgcctaacttttttttggatcggatctgaaccgacccgatttcaatttattatataaaaaaacttataaaaaaacttaattcaagactcggatcccttaggacctggacctagacgcggacccagactcagactcagattcagaccggatcgggacccagacccagacccagacctggacccgaacccgaacccaaactcacccgggacccggacccagaccttgacccggacccgaaccggtcccgggttcgagtcgaaattatgtatgtccgaaaatacgaaaaatacctataaatataataactaataaacaataaacaaccaacaatttatcattatacatatataagcttgtgaaacactcatattgcattacaagtcttgtgaaactataattcaattttcatatatcatacattacaatcattgaagagattacttttcaaattaattaacttaaacctctttccatggcgccggctaattaattctatttgaaccaatcaaaaccacacgtttacattaatattctataattaatttaacctaattctatgccaatcacttaggattggataaccttataaataccttattattatcaaacaacaaacaaacattcattcattcattatattcttcttctcttgtccaccaaaaatggctttaattcattattttgttaccatattatcaataattttcgttcttgcatcacctttagttctagccgagcctcgatcagactcggcagttctattgagagttgaccaatcaggaaaaggcgatttcaccaaaatacaagatgccattgattcagtcccgtctgataataaagagcttgtgtttattttggttaagccgggaatatataaagagaaggttgttgtaccagctgataagccctatataactataagtggtacaaaggcttctgtgactattattacatggaatgatagtggtgatatttttgactctccaacttttagtgttttggcttctgattttgttggtcgttatctcaccattcaggtttgtatgacaatatataatatttatgttaattgtatatataaaaaaa

SEQ ID NO: 225216 - DNA, 2819 bp, Cannabis indica
tttttttttttttgtttacactactccactctactttttttttaaaaaaaaaaatattgttagtatataaactggacatcgcaatcggaatgtgtttatctttctatctgtctgaatagaataataaagaaagagagggaaaaagagatgggtcagcttcttcttcagaattcactccaagagcttctcttttgtggaaaatttaaccgcccaaaggtgcacaactacaggccatgttggtttgtcgacgggtgtgttcaatctatgcgatctttcacatgtcgcagtcttcattattccattcaaggtcttttcctttccccttttcctttttttatataatttatgtgttttgtatttgaatttcaaagttacttggcaggaagttggaagttggctaatcattttgaagacccaattactcataataatgtaacaattttcttcaagtattaaaatgtttttttatttttgggcttgtggttggagtttggactgtgaatttcatatcagaactgggttttgctctcaggtctttgattgtagtgaaggagagtcagacaccttaccttacgttcaaactcttagaaaatttccaaagcaagagcttcttagaaaggctgtattggttaggtttgattctaccattttgcttcaagaagaggctgatcatatagctcaatcaccctccaatgcactcttaactattaggtatttacttgaagctggagctaaagtcattctagttagtgattggagtgtgagaaataacttaaagctctttgattcagagtccattgcaggtgaagttttgagaagaatgtctttgttatgcgttttcttttctaatctcctgttattgctgttttggttcacatatacaagaaagttagtaagtgtatacaattcgggagtagtattacctgagcaaagttttacagttcatggacagtagaagtagctagcattaaaacatagttcaatgctatttatatttcagatatcttgtcatctaggctgcaatataaagttgttcctgtacggcacatttctcctgtgagactaccagagatggaaagctctgagagagcagatatttttcttctagataatctatcagagtttaaattggaagttgctaactgcccaaagtttgctgaagaactgtcactgggaattgatgtttttgttaacgattccttttcccattctcataaaattcttgcatcaactgttggtgttacacgcttctgcgatgtgtgtgtagctggttttcaatttgaagagagcctaaagcagcttagaaatgtgaagggaaccaaaaaaagagaaccttatatggcaattgtaggttgctatatgtgccaatttgttttataatttcttgttttttctatccaatttgtcacattggcaaatttttctcttctctaagtgagcttataataaacttccacttgctttttattatgctgttttcatctgtagattggagggggcaattttcttgataaagcctctgcattgcaatttttggcttccagatgtgaagcattgatctttgttggaatgatgtctattcaaatcatgcatgtcctggggctatcagttcctttaaatctggtggaacatggggcacttaaagaatctttagacgtagtccaatctgcacaaagtagaaatgtacaaattgtatatcccaaagattttttgtgcaagaatgttcaacttccaaatcaattagagatatttccctctcatcgtgttttggatggtaagattgcacttcacagttctttccttcaatgcaattttcttgccctgaatcttatcatcatcattattattattatgtttaatttaatgagatgcacatataagcacttgcccctcaagaaaatcacacacactcaccctccaactactcgggatttgggctagcctcaactcacttttcgttaaaaatgctcgaggaatgactagtcatataattttatccctgacctgattctgctggttgtgcacctattattatcattattattatatttggtcaatttatcctgatattcagaataatgtgatattttatttcctatgctaggatgggtacctgttgatattggacctgtaacattggatgaaataaagtccttgcttacaaaatgcaaggtaaattaaaactattttcacgtagcactttaatgtgggaaaccactttttcattacaaatactgttttaaaatcgaattgacatatcaaaactccaaggacataatatgaagcagtaaatatatcacccaccgtacggtagtttacttgcttactctttatttcttttctctctcaatgctcgtgcagagaagattggctgatgccgtattcttctataaaaaaatagctcttctaaatgcatctaggacagctaactaagactaggagccttagaaagtaaactatcaagcatacaacaaaaactgaaagcagtttagcacatcccgataaatagtcttctttatatttatgcacaaattgtattattaccgcctataactacgagagttttatgaatcgtaacaagataactttattattgttgaaaacatttgagctttatcctgaatgttgaaatgattgcttcttatttgagctttattattatttttattatgattattattatttattaggctgttctttcctttttttcatttgtggtttctattgcaaaaaggctcgtcataagaaaatcaaaatgcaaatttcttttgtactgataattccttgcactcctacagaaaaaatcaaaagtgtaaaat

SEQ ID NO: 225217 - DNA, 3988 bp, Cannabis indica
aaaaaattaataatttttttaatcaattttgtatgcattctaaattttattccattcccattcctattcttatatttttattcctccctactcatttctcaatctatatgcagcttttccattcaatctaaaataagttaaatgaagaacaacaataacattaatgatgacaaaaaataataataataacattaatagatgaaagggattgaagattgtgtccttgttattcatcccaaatcagctaaatatttatctcataaacaagtaacttttttttttggctttttacaaaaccaaataacttgttagtgaataatatgatatgcaaaatttgtttatcaaatgttctctacttgggatttttcactatgatctcttgaacatatagaagtaaagcaaaatagatttttttaattatatttgtcagttttacttatataggaatggaatggaataaaatttagaatgcatacaaaattgacgccacccggcctctatgtgggtccgctcctatttttattggccttaacaactttgtgtataacgtgcctaccaaactttaaagaaaaacaagattttactttttcatatgaaagaaaataaatttattttattttttgtaagatgtaagagaaattacaaatcataataggtgttgaagataattattaagaaagctatttcactcgtaaaaattttcataaagactattttcacaaaacactcataatgggaaattaacaacaacaacaacccaggtgaatgcaatgatagcttattcttttcaaatatgtttggaagtatagcttcagatttataagcataccagtagtgaagtatgtgttatatatctttgttctttgatgtttttggcaacatataagtgaaacatgttttgccattcataaagagggaactgtttttgtctctgactctctttggacaatgttatgcaatgatatgaaattttgtacttgtgtttatatattttgactcactgacaaaaattccctccttccattaatgataagactgtaattaaggattgtttaaattctaccacatatttctttgtctcctcccttgaaccttattgaactaagattcccactatctgtctaacttgtcttgttatatagattttatttctaaagctgtcaactttttccactctgtgacactaggaaacaatcttcttcatgctctttttactctattattttttcacaagattcttcaagatggtacatttatataatgtcaagacaaattcataaagcattatcagtttttattgctctgttaatctacatatagctacaacatactgaaattcttctgtaatgcttgcttttacagaagggttttttctaaaaattatgaagcaaatggccaaaccccataactctcccacttttttaaaaaatttaacagtacataaccacatgttcgatagtcctttgtacttggctgcaacatctctatttacaacccaaatctattgctactcctagtcctagtattgcattgagattcagaagtagctgaaatgccaagctaacaaagtaccttttttgttggagtttttggggactttgtagccagtaataagaatttgtatgggattatcttatcaagctctgatatgtgaatatggattatccagttgttttgatttgagttctcaaatacttgggacttggacttggtctttggctctgaaatctagtgaagccagaggaattcttaacaagtggaattagtgactgtacaacatcagtcattagaggtctataatctgcttctggctgtacacacatggctgcaatagcagctatctataaaatcaatgaaatgagaagaaaataaagttagttgtctgaataataatgggaccattttcaaaggaaaaagaaaagtctggtgttagtgggagaagcaggctttacctgaattagatccttctttgagtagtggccttttaaagctgggtcaaccatctccactagtttttctctgttggttaatcctggaagagcctgaaaacacaaaccaaacaaaaaacttacacaaatcaataagtgggaaaaacagaaaaacaagaaccacatgagtccatgaccaaggctattaatgcttctacctgaatttgtacaagtcacaaccaataactaaataaacatggcaatgtattgcattgattattagtttttagtattattgttgttgttgttgaacatgtactttatatctttagtaaaatctatgccattcaaactgatactttattcagaagaaaaatgaccagttgtgtaaactaacccaagaaacaaggacatgttctccagggggtcttttggtatcaactggaacacgacccgttagcagctctagaagaacaactccatagctgtacacatcagattttgttgtaagcttccctgttgaagcatacctacatttaccaaaatcagcttaatcagttcacaacttaaccatatagctttctttgtttgtttcaatagaaaaaaggtggcagtttagtcaaaagggtagctagctgtgatttcttagtagacattaaactattttgtttctatctttttttttctataattatgtttcatgtcatgtcatgtacatggttttagttttagaacattgcattcatgatgctataatgataatgagaaaagacataggctctcactctggtgccaaatatcctgtggtccccaacacacgcgttgaaatctgaccgttgatcttatccgaccccattttggccagtccgaaatctgatacttttgccctgaaattagtatccaagagaacattgctgcacttgaaatcacgatggatgattggtgggatagcatgctcatggagtgtctcaagagccatggcacaatcaagggctatcctcaatcgagttccccaatccaacggctgatgttcttcgtgaagataatggtggagagttccactgggcatatattcaaatataaggagcctatgatgttggtcagcacaatagccaagcaactccactaagtatggagagtgcaacatgcttagcaagtctacctgcaatgacaagcatctttaggcttcattaaaatacacttttcattcacatccatgtgcatttgcattgcatatactatattactattaaataatgtggcttaagagaaagaaaagcattaaaagtcaaacatcaaggcttgtttttcaatttcaagtgaatataatacactatattatatactagggaaggtaggaggtttgtgagttttgttttcttgtataaagatctattctgcatggggtatcaatctcttctaatctatcttaaattatttgtttgaccttctgatgaaggtattaaactacatatctaataatgacaaaacaacaaaagataacaaaagctaataaatgaagtgacttacctcaaccctgaaagcacgctctccttgcttaccagccctatgaagcatcttaatagctgcctctgtaccatcactaaggacccccctatacaccaccccaaaacctcctctgccaataacatttgcttcactaaaacctgttgtggccacttcaagctctttgtatgtgaaaatttgaactgccttgtatctttgtggttgagtcttgcctaaatgacctccatagaggcaaccacctctcagttctgcaacattttcaaatacccagatcagaaatccgtagttaaaatgaatggaaaatatcaaaaatggaaaaaagtttagacctttttctaatttagaaatatgggtttctttaagaagggtaaaataaaggtgtttcctttatcactcatttgtggtccatattatgtttgtgttctgtattgggaaataaggaatgataataataataataatcttacttgaaaacaatggagtaaatttaattcatctaccaaattggaatataaaagttgtgaaaggaaagg

SEQ ID NO: 225218 - DNA, 1952 bp, Cannabis indica
aaaaaaataactagttatgatatgtatatgtgactatgcttatggtttcatcgatgtcttttatttatttaagtatgctttttaattatactatttaaacacactttactaaaatagagtttaaaaaataagctcttaccacacaaaaacaaaatatttctctataataaagaatgaataaagagctcgaagctcccaatttttttgctaaattttttgaataatattttaatcaaaattactattacttttttattatttgagaaattaaaattatccaatattattaaaataatcaaatattaactataataggaagcatggttggagcaacaatataaaattaactctctattttactttttagctattttagcaaaaaaaaaaatagaaaatatcattggaaatatgacaaacgttattggtgtaatttaatatcggatctcatacttttttatttaataaataatataagaaacaactaaccacttaccacgcgtcacaatcagtatgcttaataacattcaatagttttgttcaaaaagtctacttggtcacaaaggttataatagaagtaggttttcttatgtttatatagattcttaagatgattttgtgaacggttttatcctaataaaatgtattagagccttgatctagccgaaagtatgatcgacgaggacgtcggaccccaaagggaattgcgacaatcagaatcccgtgatccgtaaggggaaagattgggtgcaatcccacacgcctgggaaggtcaagtgataattcttaaattgtgtaggtatgagactacatagttgaagagggcttaaatagattgattggtactaccaatattaacaagatacatcttcttttcggtattctatcatgaaagaactctaaaattaagcgtgcttgacctgtgataatttcaagatggttgacttcctaagaataagttttcccaagaagcgggcgagtgaggacaaagcacgctggaaagactcgtgttagtttgcagggtcagtcgtcattctatgaagcaactaagagtgacgtacccgtgtataagagtcattagtccgtgggggaaggtctaatgaaagcttaaagtagcttaaagtaggagcgttataataggttgcttctatacaatatgtatcccctaaaaggggttttgatatcctaaataatcttttaatctattttcttatagtcgtgtacgttatagttgattaagacattttataaaattttgaaaagtttgaaataatttacaatatagaaaatataaaaaaacagtgttcaaacagtttatttcatacccgtataagactgtttggatcctattttcgacatattaaatattttcgaatttgtcaaatttttgctaaaacatattttgttctttaaactataatctactaaacctccacaatcactttcaacaaaattatgcaaaaacataatggggatgttgtcggtggtgcctgaacagaaaactattcatttttggggtaatcaaaattagtataaattaagaagataataataccaataacaaccaataatatatattagtaaaaaaaactcttgagcttaactaaaagaaagaggtgaacatgcataataatgtgaataattttcatatggattgaattgtagttaaggggcctcatcatccttaattcttattatgtcacaaaaatttctatgtagcataatttgaggatgtcatgagattatagtcaaagagctagctttgaaatataatatagaatataaagcatttagagtgagaaaatagaaaccagaagtcaaaggggcacatacttaagctttctcatgtttctttcaaggcccactgacatgagagtatatatagagaaatgctaaaggataccagtggtgcctaacatcctcctatgtattcagtgacgaagccaaaaatttag

SEQ ID NO: 225219 - DNA, 3033 bp, Cannabis indica
ctggttatcttgatcaactaattagcttatagttaaactataatttaaaatcaacacttcataataagaaaagtggggaataataaatactatctaattagtctgcgcagtccttttctatggataaaaagagaagttgttttcagtttctagaaattattaacgcgtctttgatccaccgcattatttgcactgtttttgtctgaattgtcgccctttgctgtaaatttatatccagaaagtctgttaatattagtcaacttgatccaatatacatatgtcaatatttacatcttttaaggtagcatttttgtttgctttcaaaaagaaaaaaaggtagcatttttctttaaatatacatatagtcaatatttacatttggagttttagaatgaatgaaacaatgtcaaagtttgaaaaacaaggctaaatggtatgtcccaaacccaggtttcagaagataagatcataagtgctaaaatattataactcaatctcaagaaattacaaccctggaaataaaaaaaagtgacattcctctgtgttttttttttaacttcacaccaaagaacaataaaataatattataaaagtacatagaagaagtgtgtatattggataaagtttaaggggacaaacgaaaagaagaagtatcaggacttagatcttgagctacctgaagaaggtgttcaatgtcaatgtctggatagtgttgtaacaactttaagttggctataaagtcaccttttaatagtctgctctttatgcataacaacatcgcacagcacactcttagaagcatgtcctgcaagaaatgctagactactaagttttttgtacaagtaatctaaaaagcaatatgtatatgtaagtataaaggtcagtaattaacactacacactaatatcatatggcacatgtatgcatgcttagaacatcttcattgcactctttttcattttggtttgaatgagagagaggaagaaagagacctgaacaccaaatgggttactcaatatagtatcccatattctcatgatggaatgaaaactgaactcctgagtaagtagcaatgtgatccacctgaatgcgtagaactgaggtttcacctgcttagaagggtaaaaacttcagaaatttgtctggttaattaagcagttgaaaatgataaatttgtaataaatagtagtgcatatgtatccatttcgttacaattctctacaaaaatagtactttacacttttgatgagctttgtgagaactatgtaagccacatgactttggtgaaagcaatgatggatttagtgttgatatattacctttgtggtgaattcaagatgcctccaaagctcctcatcattggcttttaacaactctgacaagcgagaaagagtagaaagtattccgactgaactattatctagctgttgacagaagtgatccactgaatcacttaagactctaacaaaacagcaaaaactatctgcttctgcatttccctacacaataacatgaaaacaagaccacaaaaaactagtatatgttatgacaaaagtgacagaaaaataaatccatgttttaagatatcaaggaagttcgtacagcattttcctcattcgtgtcagtactaaacacatagaatattggtgccaagacctcattcatgccttgtacgtagcggattgctggatttagtttcgcaaatacgaggagaatatttctcattgcttcctaaaagaggtaaaaagaaacagaacactatgtcgattcagtaattcatgaatgtatgagctcgtttgagaaggcttagaaatttctaatgtgtggagaagatacccttttcttcttactggatggtgagtccccagaaaagaatttcaagttgggatgtgtgcgttgcagatcacgatctatttgctcagtaatttctgtatgctgcaaaatgattgtgcctactttgataatcatcatatgaaagcaagacaaaaatcagattttataatggagttttttgctttgatttcttttacctcgaagtactgattccaagcactagatttcccaagacttaaagggtgatcttcatgggatatttcatgtcgtttaagaggtccatcaacaccaatgtcagcaggctggccatgaggacttttcgaatctccaccttttatccttgtgaattcggactgtctagattaatgattatgattagtcaaagcctcaaacagagcaagaagttcatatatatcacttgagaaatttaacgagtaaagtcttacaggacttaagagaagctcctctttaagcttagcatatttggctctgttttctttcagctctttttcccacaaatcacgacaaggtggcaaataactcaatagtagctactcacattgccatgcaagaaaaatcagtacacaaaaccaaaacttatcatatatatatgattaacaagaaccagtgttatttcacataatttccattgccttattttagtccaaagctatctaaactgcaggacatttcaccttccatgtcgttgatcgcaaacttcctccatccgggagccctgtgcttgcaactctttgcaacttttccaaattgatttgtggcaaggaaagctacacaagggaaataaaatggccatttagggatttaaaccctttcaagtttctgatatggtaaataatactgttcagtatttcaaccatgttttcatggcttataagcattttaatttccatcactgaaaatcaaaagtggtaaatcactcatccatccgaaaataatgaaataaagttataaaaactcatattctataaacaaaaagctccatcctgcctggttaacctggtttcaaacactcgattttttgttttattgcttataatgtctcttctccaattttctcagtctcaccaacaaacacataacaacatatttcatgatttataagttttttaacactgttaatcagttgattatttacgtcatttcaaataaataaaaccccagatttgatacgaaagcaca

SEQ ID NO: 225220 - DNA, 2592 bp, Cannabis indica
atagttattatattcgggtggagaatgtgaagaatctcattcgccaaaatgagatataaaagagcattcttgtcaacatattgattgcagtacctgcaatgagatgagatgtgattaaattccatttatgcatgttttatgtaaacattcatgtttatgaaactaaagaagaataatcttgttgattatgaaactgtattagttaatatttcactctcatttaaaacttaattgattcaatcagaatataaaggaaatgccttactcttccaagtcaccggtaaatgaagcaaaaccgttatgagtatacatcattgaagcgagtgaatggaactggaaaccgtcgatttgatactccacagcccacctggattaaaaccgattttaaattacatatacagtgagacagatgataaattaagaaagacaacaccaatgaaactcggtaattttgaagctagaagaaatttcaccatttcaaacttgaaatttaccaattcaaattcgagagaaggtaatgtagaacatcgtggtcttcgtatttgaacatccgtgtaccccagtacttgtgatgccctcttttacctagtcaagaagaaaaaaattggaaacataaaacgatcctattcgagaaaataggtcctatcatatcaataaatatggaattaacagataccagtatgaaagtagcagtcatttgatccatcaaagagagacaatccaaccatctcgtctgcagccgagtaggaatggacaatgtctaagaaaacaagcaatccaagtcctgtagaacaagtgagaaagttgactgtataagtttactgtgtccaataaaaataaacacagccaagaagaaaagtaaaccaaggatgtgcaaattctaatcagtgataaaaaatattgcctaatttgccatctatcagaactagcaaattgatatgtgaggcaattaaaatataatatttttaacaattagtatagcttttgtgagattattaaaaatttctcctgaactatttaaattgctggatttcagaacttttgtctaattttactaacggaaacctgacgtagataaaagttcagaaggcacaatttggtatatgtaaaagttcggggagcacgatttagtacataaacaatcggcgggctagttaaacttaacataattaacggcttgaaaagtttggatatcatgatttggaacatgtcaaagttttagggcgaaaatcctatccttaatgaaagtattaggattcaagaattaaagtaataacattagatgaagaaaaataaccatgtgcttcatcaaccaaccgcttgaaatcatcgggagttccaaatcgactactaacagcatacaaattagtgacctgcatttcgaataaacagccactgataaatgcatattcatctccaaaacttattggcataagaaatatatgcagctgagtaattttagacaaaatatagacgatgaaaagaacgattgactcactctatagccaacactgaaataatctttgtgctcaataactccaatcaacttgatagtgttgtagccagcttccttcacatgaggaaggacctgaaccaaaattaaaacacaaaatttaaagttaataaccatgtcacaatatagtgaacctaaaacattagaacaacaattaaaaagttaccttctctataaaatcactgaaagaagatatttttggctctgaaccacttatcccaacatgacattcatatatacgcaatgatttcggtttttttggtcttgtgtttctccacttgtatacatcttctggtggtggttcccagtgtattgcataagcttgttttccttccgcctctaaaatgtaattaattgcattcatatggagaaaatgttagtgcaacatgccatagttgtaatgtaaaacacaacgaatataactgcagattatgccgagagattacagaaaaattaaccccgaataaattgtaatggtggatgcgaaaatgatttctaggaaacatgaaagtaagcttacctggttgaacataagtggcccaagcaggaactctttccagtggtccattaggagtgttgaaatagaccctgtatttgcttccatgaggaatactaggagcatactttttcatccaagctttccttcctttacgcgtctcaaaccagtacgccagaggaggctcctttgctttaaatctctcgtacgattcaggatcaccaatgacattaaaaatatcatattccttccctttatcaattacatcatatgaaggtaagttactcggtggatcatccttatgctcttctttccatgctttatatcttgtttctgcatcgggtatttctcctaattcttctaaggtttgaggtccattaggaccgaaaatttgctcatataactttgctggtacttcaaaacggttttttacaaaccgatcctcaccaggctcccaatactcatcatttgctttcttaaagagttcttctattgtaacaccactatcacctttatcatagtcatctacatagttatacatctggaaatacaattcatctggtttttctccatctcttaattt

SEQ ID NO: 225221 - DNA, 5597 bp, Cannabis indica
cagttacatagtttaaatataaatataactcctgttttacttagtgtggttaataatttctgtaaagataattttataaggtattgaaaataaatttttttgtcaaattaggttataattatacataaaaaaaataaataacaatttaaaaaatataaatacatgcatataaactaaaaagttagactctctttgaccttgtgtgttctatgcttgtttttgtagccctttatttgatcatctatattaactatggcaacctgtgagaggagcaatgtaattgtggaggacatttggaaactgtcagtgataggacgaatcatttttaaatgtaagtgtaaaagaaattttattaagacagtatttggtcaaatttgagaggtctctgagtgttaggatgttcatgtgcttgctttcgaggatgacatcacatttgttggcttcctaaaatagtttttgacaaagcattatggacttttaagaggggactaatgctttgtgagttgtggccctaatcttggaacttgtgtgacgcgagactgggtagttttggttattgggttcgtttgacgaatttccatccaaagttgctcactaaaaataatgctatgaaaataggaaaaatggcaaggaaggttcttgacattaaatgtgagaatattcaagtaatgataatgaaacaggaagtcaaaatttggatttgatcttttttacatctgcctttgttggaaaatttttaccaattgatgggaagaaaattgggtccagttcaaatttgactatctccctttactttgcctccgctatggatactagggtcatgaacaaaaatcttactccagtgaaatggttttagaaaaatgtttacagtgtagtcttgttcccttatatggtgaatggctaaagtccaaatgataagagaaaggattgcttcacggttgaagagccactaatgcctagaagtcatacgaagcagcagaattagttcattcttgggattggcttcattcatggtggccagggaagttcaagtgcctctaggtcgatagcggatataatttctccacgatctaagggtgctctaatcatgggtaaagaaatgggagtattattgatgattatggaaaagatcatgtctataaagttgatgtgacaaacgatgatgtaagattgaaggtaggaaacacggtagaattgagggatggtcaatggtgtgaggtggtagtgggctgataggatgaaggagatgttttaatggatggaccttcagatataaataatattactcatgggcgtgaatttctattctaagctttgaagaccaatagtccactctctaatccaaagtaaaagaataaacatagttactttggggtgaaagttcaggaacaagttgacccaacttggaagagacagtcatctcgctcaacgaagaaaatgacttcttctcttgcaattttggtagaatgaggtaaacaaaatctaggtgaggttattcctgtgggatttgttgatatccacagagagcaaaaaaaaaggtggtgcgagatggagatgtgcatagaagacccgctattggagatgggagagaaattaaggggtttttgtggtaggaagctcaatgaaggaaggtgagttgatttcagacgatggtaagaagaagaaactctcgatcaaataacaagcaagaaggttgaggataaaggttgtggatgataagaggattaatcatgatgaccgtgcttttgagttacacgactctaatgatggagctttgaaatttgaaatggataatgctaattgtgactctgaaggtactttctattcttaagaattgttcttctcttccccttaattctaaagaggcaatctttggtgtccaaggccaccgagaataatgaaaatattatgttggaaagtacaaagtttggggaattattgtacattgtttgctcctaattcccactatgagatattgaaagcataattgatttttatttctgaaagtaaattaacttgcagacaggctaaagaggtggtgaggaatcttggatttgattttttatttactgttgataaaattagatagaggtgggttacttttaatgtggaaggcaatactggaagtgagtattgagtcatcttgaggttccacattgactctattattcgtaatactaatggcgtatgttttagattcactagagtgtatggtaatccagatgcttctcgaaggtttttaacctagcagttgttggagcatattggtgatagtgtgcacgggccatggatatgtggaggggatatgaatgaaatcttgtctaattctaaaagcagggtggttcgccacaagtttttgaagtgatggcaaggttctaacattctctagattattcttctttcgaagatttatggaaggaccataataccttctcttggtgtaatggtcatcgtgatgttgctgtttttgtattggaaaagtttgatatattatttgctatggattgatgtgatacttttctaaatgaaaatttttaatacttggattggtggtgttctaatcataaagcaatgattatttctttttgtcagaatattgttcagtatggtgatggttcttgaaaaagaaacattttagattttattttgaagagacctggtatgaggaggtagagtgtgagatggttgttaaagaaaaatggaattatgggatttcttgtgttacccctaccatgttgaaagctaaaaatatgagatgtatgcaaatgtttgcttgggtggaatattgctaaaaggaaggagatgtttaagaatattgatgtgagcaaataaaaaattgatgagttatcgctaacatcaatctaggcaattggaaattatcaaaaaaaaaaaagaaaaagcatcttaatgggatattagggaacaaggagatgtattagagataacgttgtaaggcagtgtggatgaagtgcgacaagcataatactaagtacttctatcataaggcttccaaaaaaaaatcgtatcgactctcttatggatgagatggtaatcgaacaaaagactggagaggggatctttaaggttatacagcgatattacaacttgctattcacaactacaaaacctggaatggcatggattgaggaagtggtttggtaggttcctactaaggtcacagatgagattaatttagctctcatggctttgtttaccgaggacgattgtggtgcaggcagtgaaaggtatgagcactttaaaagctcctaagaaggatggttgcctactttattttataaaaagttttgggacactacgcgaggagatgtttgtcaggtatgtctagaggtgttaaataacggagtttctttacaatagcttaatgaaactttggtagctcacagttaagtcacttaagattgaagagttttgtccaatcactttgtgtaatgttgtctgtaaaattatttctaaatacttttgggaataatgttatttttggatcttaaagtgcatttatgagtgaaagattgattcatcataatgttattatagaatttgaatgcatgaattgcatgcataaggatcaaattggtaatggtaagaaggtggcgcttaaataggatatgtccaaagtgtatgatagggcggagtggttgtttgtggaagtgatgatgaaaaggttaggttatgattagagatgggcagctaagattatgaattgtgtcacctcagtttccttttccttccttattaatgggacgtgaagggaagtcttattctaggaagggacttgcgccaaggagatcctttatcactttttctctttatgttttttgaggaggcttaatcttgtttgattcaagcggtggaggcccgtactaatattaatggtctgtgatttggtaggaatggagtgcgggtttcacatttatttttgtggatgatagtatcatgttcttgaaagctaataatgaagaatttcattgccttaaatggttgagctactattagttaggtagtgcactttttaaagtcttaaatatgccttggtagtcgagttaattaattcacattctcatggtgctttggttaatatttttggggtgaaaattactcatcttacacgcatcccttctttaattactctatttacgaacaaaaccttcatctccctcagcagcaagagctaaatctacaatctgaggataagtcttcacaacccctggttgtttagctgccataatgacatccctagcaatatattcctccaagcttctaacgaatttggcttttcttgcagcttcagcggccacttcattagaagaaaacttggtcgacatgtcaaacttggtagcacatttaatcatagtcatgctatgtccctaaactaaccgtacaaaatcctctgcttaggcgacatggatggaatcgttataataattctcatacaatatttcctagaacatgtctcaagtcatggtattcagatcatggcctttagatacgatctcccaccatattttggcatcatcacgtaacatgtatacaacacatcggactcgatcattatcctcaacctacataaagtcaaagatagaggtattcatactcatctactgctctacctttagtgggtttgagccacccttaaacacaggtggatttggtttcctaaaccgcttataaattggttccataagatctcggccctcatatttttttgcactacatgaggtgccagaataagtgcaggacgagcctattgttctctcaggtctcaaatctgcttccttcactgcctaattatgtcatgcatggcagaaagcacttgttcccaattatgaggcaatggaggattctcttcctcaccacctgcctcgagcctcagctcacgattcaatcgaccagatcgttgttgcatgatctaatgcacctgcgatccagaacttctaactagatatcaatatcaatatccatatatcacacatatattcctatcacagtcatcattatgttactttttcagcatgctttgtaataatctaggcaagaaatccaatagcaaataaatacaaaacacttactatactacgagtccacatgtctttgcagcaaatgcacatatccaaccagccttcaggacctttaaaactatggctgctctggtactaagttgtaacgccctaacctataaggacaacacatgtgtgtggttttgtaagctggtttagtgatagtagattaattgattatcaaaattcgtgataatataaaaaaatccacgaaaataaaagcctaataatgaacaacataaggacactaaaattttgttgtggggatccttgttacaaaagttttacaaaaggactatatacaatagtaagtcaaaatacacggcacatacagcctaaaactgttgggttttgtgccctaaataaaactctatttcaatgtaatctctatcatttaattatcaataaagagacagaagtattctcatcacttatttaatgtgtcatttggttcatattatcatttatatgtttatttgatttgtaaattcatccaaacccttatcacattaatattcttgt

SEQ ID NO: 225222 - DNA, 3080 bp, Cannabis indica
tttgtaccacgtgatctcttagttttttttttttttttattgaaaaacatttgttttggatatgaaaaattgcaaagtataattacaagagcgaatctagcttggacaaaagcaaagccactttccaaaatcaaccaattatgatagatattcaaggactaagatcatgatgatgatgatgattaaattgatattagcatttaaattttcttgatttgttatacagctagacatatcatataaattaggtgtcactctcccatcaattagtggaaactagatttttaattttacttgtttcttttcaaaatatatcacacaaattaacatatctcttctccactactcatgaatgattatcagatttgactaataacaaattatatcaaattttaccatgaaattatttttgattctatctagatgcccaaattgtcctctattttgcatctacttgtgttagggcttatttggtccatttactatagttttaagttatattgtgtgacttttatttagctaatttattttcttaataatggttggtttctactactacaaaatcattttttttcattcggtttacaattgacataatcgaatatagtgtcgattcttataatcaatgcatattcgatcaccataaatttgggagcaaatgcattgataacgaactaacggaattgagcacacaccttagtgtgtaacataatttcctagactgaagttaggccatatgtgtcatacaaatggtctttatactgtcaattatacaatctaacacataaattttgattaggaggaaaatttacatttcttagtgtccgttagttgacggaattattctttgcaactaggacccacaaatgcaacggtcatcttaatacacaatattttaaatttaaatgacacatcactttaaaactgacaaaattgatataaatcggtagacaaccgacacaattgacatttaatagcattagttgtactccgacgcaaaagtctatttttggagtagtgttcattgactgtttgttatggcgagggaagatgacgttgaccccttttgggtaattagtgtctcatcaaaaagtttggcaaggatcctcaatttataagatcaagggtcattcctgcataacattaaaattaaatgtaaatttaaattaaaatgggacatcataagatcaaatgtaaatttaatttaaatttcgacaccactcgtaactatacacactgtatcatttatttcaagctaataaagaattaaatcagtcgtaatttcatatgaaatcataaaatatataatatgggcattagaattaacataatggaattgaaatgataagataagtgtcacattgggctgcaaatagatttattaagtagtagagtagctaataagtgatcataattaaagtttcaacactaagaagaaaaacatttctcaattaatgtggctcttcaaaaatgaagccacttggtcataaacaaacatatattgatatttatattaagaaaaatgttacgggacatcttaaaatgttaaatattataagagatgacatatcaatatcagatcctatacattttaatttattaaataatatagaaaaacattaaccacccacgaagcgcctactaatatatatatatttttttattttgttacgaaatttgttgtatgttttttattttcttaaattttacattacaattcttctttaataaaatttaaattttcttatttatccattttttttataaatgcaaagcttctaaccattctttatctttcctactcaatttcttaacactagtccaatctattacaaaaattgtaaattatagaattaaaagtaatatgagctattggtaatttttgattccaaagcacattatttttagtctgtcaaatgtaataaattgtggttgaaataacactcaaaaagactctttgtttacctcttgtaactgtgctatttcgtgtcgagtttaagacttcaaatagctttgattttcgggtgttgataccagcccaactacagacttattgcaacattacttactggtgctataatagcaactaaaaaaactgatgaggatgatcctccaaaccaaggtcggctctaggctaagcctaactaggtctgtacctaaggcccactcattttagggattaaaatatttttttttaaaaaaaaatatacattttttaataattttttaaactatcatttattcttatgataagggtttaacttttattttcttaggcctattttaacttaagaccgaccctattccaaactattcctatttcccacacattaaacaatccaatgaaatagcataaccaaattagcaaagcctatcacaagtagataactatttttcaaggttagctaacttataaatttgtagagtttgcaactattattttaaaaaattaccttttaattatttttagtaaaaaaaaaattattcgtgactaaaaaaatatttagatacaaattgttattttagtcaaaaaaaaaataattaaaaatgataaatacttttaatcttttaataccttttagtgattacacaaaaatattgatgtaattatatttacaaattttattaaaattaaaagtaattttttaatttttgtgtgagttgacactaaagataataatgcaaatgcaagaggggagacattgcattgtgcttattgacttttgtccaaatgaaactgttataaatgagacaaaaattaataacttattatttaatattttttagattataagctgcattattaataattaattaataaaaaaattatgaaatggagaaagcactttcatatttggtggaaagtgagacccaacccacataacactaattattgtatctaaattaacttgcttaataatcatctatataaatgactcaataacatttcttcctcctttataaaccaactaataagtctcatataacaagtaagttttactaaacattatcactagtaaccatcttttcttttaattaatttcactttttttttttatttcaagttctaattcatttat

SEQ ID NO: 225223 - DNA, 2782 bp, Cannabis indica
ttatttgtgtaattaaatatcgagtttcatataacttaagaaaatatttttgaaaaatattgctagccaatcgtagaaagtcacctatacaaggtattgggcacctggtgctcaaaagcaatactcttttttaaataaaaaaaagtgccgccagccaatctaaatgtagttagtgatgatattaattaaactttttgtgaatggtttacccattgccatccctatccatctctctcaaaaataataaagaacaatcatcataaaatgaaaactgtcagcactgtcagagaaaaactagaatctgtatctgtttttcttttcctttctatcaagtaagcaatcatttggtacaaaaatatctcactttataatagtcactacaatagcattcggtagagtacagtccatacaaatcccacaaagtggatgacataaaaattatttaatctggccttgaagcatgctctgagatgaaaaagcattctaagagactgaaagaacctcgtgatcagtgacgttgtaactctgtaagacaatgatgaacaaaaaatgaatctgaggtttgaacatccatggtataatttaagaattcaagttctacatttgaagccataccattaaagtattttcaaaagaaagaaaatattaaaggcttcacttgttctcatttgggggatcatcttctttcttttgctcagactagaaaacatggcatgaaatctattgtgagttgcagatttagaagcataaacagtagttccaggagaaggtaataacaaagatccacaccaaaattgacgctaatatgacaagaaaagaggggggggggggaagttaaaatgtccactttgaacgcacctcggactaagttaaaatgtccactttgaacgcacctcggactaattttgcatagatgcaagaagatctttgactgctggatcattagggtcaacctaggaatggccatatgcacccctgctctttaagtaatcacaaatgtgggcatggattcttaaaagctccacagtagtagaataatatggatcaccgctcaccaatttttcattaagagggacaaactcttcataaggaactcctaaaataggcaaactaccaataaccttcaagtcatacaaagatatactcatttcaccactactatgatggaaggtgttgggcaaaggaccccaaagttctgcaaaagcttgccaaacatgaaaacccataaaaaggggtacctggacacagaaacaacaccataaatcctagccttacttaagacaccttggtgttgaactaaaatctcaaaattccataaaagttcatccacctatgaatttttctaaattttcaaatagcaaagaattcctgaaaatggtcatctaccagaattcttatattcaaattcaaaaataccatattctgaactacaagtggcttgatccttcacaaagaaggtatgtaggcagctcggttaattaaattgactcagttcagaccgcaattctaaattcaccccaaattttgagtaaattacattatatacccactttactttacatgttttaatttttactttcatttttatattcttcaagagatacccatttttatagatgatgtccctattatacctcttaagttaatgtaaattatatcctagacttaagtagaaagtaagagtatattgggcaatcctctcacaaaagtaagtatattataatgaaatataatataaggatattttttattaatgaatagaaaaaagaaatattcctcaacttatcaaattttccccaaattatttcaaagtttaatatcatcataattagaatcaaagggtgtttcctttgtaattaagacattatttttataatcttgaaaggatcgaacttaagaaaaataaactcttatgctgtaaatttagtttaggtaaaattatgtttttacatttatttttaatactttaaatgtgaaatttttactgaacaattataatctttaagtaatttattttttatgtggtaaaattattaattttttatgtggtaaaagagaatataaataataaataatctaaaagggtgattttgctacaagttttaaaataataacatttacgaacataatcttatgatttgaggccatttactacaattttccatgtaataatgaaggtgtaatgggatgatagaaagagcatagataagcttaaaaacaaagcccatctacataaaaagctaaaagaaaaatcttgaagctccaaggctttgtcatcttttttcctcatcccacttgctctttggtatctcccccgaatcagcaataatcaccttcttcctgggttttccgctgtaggttccagctccaccttcaatggcaaacacagtgtccatgccttgaataactttaccaaaaacaacatgctctccgtctagcctggaaatgtcaaagctataattagagacaccaatacatgcatcctagcttgagagaaagcataaaatcaaatcacattctccaaacatctactagagaaaaacaaattcaaaccaaaagaggttgtttcacagtccagaaaagttcaagctggcacctactgattgtcaacttgtataaacagtgaagatgttatttttttagacgagactcccacaaccggatcctatactatttagggaccaaaaaactacaagctatataaatatccaagaaagaactccaatctcagacattgagagagcaaattatatgtctaactaaccatttgaactacccctct

SEQ ID NO: 225224 - DNA, 5273 bp, Cannabis indica
ccgatgcatcatgatgaaaaaaattgaatctgagctgaagacaaatgcccgatataaggcccgatggcctgcccgatagtcagtccgatggggcccgatggctgtgtaaaaaaaatagaatttaatatggcccgatggtgggcccgatagtgggtccgatggggcccgatggctgtgtaaaaaaaaaaagaattaagtatatataagcataaaaaatcaaatttcctaaataataattatcacttaataacttttaaataatatgactagtgatatatcttaaaatacatcaataataatataaaatatctccatgttgaaacacaagtccatgatgtccgagtaattccatgttaatggtaagtttaaagttattatttcccctaatctcacagtttccgttaccaattaatttttttttttttacaatcgttaccaattaattttattataatattaatacccaaaattaaaatttggattgaaaatggaagggaaagacgaaggacccaaaacctcactcttccctcttctctcccaaccttcagattcaatttcatctcaatctcgatctcattggctctgcaatcccagcttcaccgccgacctttcactcctcaacgacgccgtttcatctcacgtatcgaaaaacttatctgaagaagatgacgacgaccctgaacctgttacagctcccgcgcgtgtctatcaaacgctggactccgacgaccaagacttggacacagtcggcggcaagatcaagaagaagaagaaaaggaagcatcgaaggtcccctgagttggaccacgatatcgggagtttaaggaggtccaatgcccctcgcccatggagtagctccgattccaaaccctccaattccaaaccctatttcttcgactctaaaggcgatcctgacaattttgtcttcggctctctttacaggtacctacgtttcttcttttttttgttttttgtttttgctgaaacgaacatgaaactttaaactttgataactaaggcgtttgattggaggcaataaaatcgaatagaatggaaatgaaacaatttttattttaatttagttgcatttaaagtatttgaattattcttatgtaataatttttcctatcattttggtcgaaagattactccatttaatatgaaagagtttaataattttttttttatatatattttttaaaatttattccattcttattcttactggcattctcatttctagttttcattctttctaaccaaacgtcacctaatttttcggttttctatttcgtatacatttatgtatttacgaatgaattcagtattcttacttgtgatgatgtgtagaatggatgttgctcgttacaaaccttatgcatttcaaggattgtctggacttgattttcgaggtttgagacaatggaatccaatgctttatgcattggatatggatagtgatgtggatgcattggacaacaaattaaggtccggtggtcgttattggtctgcaaaatatatggccgtggagtctcagaagagcttaaagcgtcttcgtattgttgctcccaaaaccgaaagttcctcagaaacagttgcgggtggtgatttcattccattgtcagatgttggttttcaaactactgaagaatcgtgggaagatgaactcctacgtaaaactcgggagttcaacaaaactactagggaacgaccccatgatgaaaaagcatggttaggattcgcagagttccaagataaggtggctgctatgcaatcccaaaaaggtgctcgtgtacaaacacttgagaagaagataagcatattggagaaggcagttgagcttaacccagataatgaacaactactgctttctcttcttaaggcgtatcggagcagagataacattgatgtatttattggtcggtttgagaagatacttgtgctgaattcaggaaattataagctttggaaagagttcttggtgttgtttcaaggggatttctctagtttcaaggtttcagagatgagaaagatgtactcaaacgcaatacaagctctctctgctgcatgcagtagacactctaagcaggttctcaagtttatttgaaatttagtaacttttatgtgttttttctactgtgtattcataaaagtagttctcttaattactgcttttgctggttatctacaagggagcctggttttcttgatagtacctacacaaactcgagtatgtgtccatacacgaccatgtaattatactgtaacttccaaacagatcctaataaaaaaatcatctaacttacagaaaaactgcataaaactgtaacatattgatatagtacagttctgctgctgctactactactactaggagatataatagaagaacaaaaccccattatggttgtttgcatttataaaaatttatgtggattcttgaaacagatacaaaataaatatctcttgacatcgaaagaaaatggatggttggatcatacaagtacaagcgaaaatgaggatattggcttttaaagaaacaaaattgtatgtgtcagatcattttgtttagcttaatatgttgacaacgaaggtaattaaactcaaaatgatttaaagtggtcgtttccacagcattgtcaatctctaagaaaccagatgatattgataatggaataaaatgcggttatgtggtagttgcaatatctgggttgtatcgttgcagaataatgtgatattacttgttcagtgtgattaattatcatgtatgtattaacttaaatatttattatgtaaattagtactttcataacatataaatcttcaatagtaataattaattataaacattctgaataatacacttgttgttgaatgctgttccttcctttgatgcaggtccatcatgcagctaaatccttttccctggattctgctcacgttcaattagaacttggtctcgttgatatatttctcagcctttgcaggtttgagtggcaggccggttatcaagagttggccactgctttatttcaggccgaaatcgaatatagcttgttatgtccttctttacttcttacggagcaaagtaaacagagactctttcagcacttttgggatagtgatggtgcaagagtaggagaagatggtgcctttggttggtcaacatggttggagaaagaggaagaaaatagacaaaggattcttaaagaggaagcctcaacttatgtggaggaagaaggtggttggacaggttggtccgaaccatttgccaaaaataagatttctggtggaaatccagataatgtcaccaaagatgatatcaaaggtgaggagcctcaatcagaattagaagatgaagacataaatctggaagatgatactgaagtgttgttaaagaagctaggcattgacgttgatgttgcatctagtgatgaggttaaggatgtctcaacttggaacagatggtcaaaagaagagctttcaagggattgtgatcaatggatgcctctgcgcacgaaatctggaggtttttatcccttcccgttttatcttcttgtgttctgcagctgttattttattttgccaattccacccctaacctttcatacttcttttatttgaaagaaccttttcatactttatctatcctttattaacttccagttttgtacttaatttatgacttcaaattttcaatatacaatacaatacacatacagatatatatatatatgtgtatatagatattggtgcatgacattgaaggacatatgctgactttgattgttacagttgcagttctccgtgctgatgatacgcccaatgcagaaacagatgagcaacttgtgagagtaataatgtatgaagatgtcaatgaattcctcttttccttgagctcaagtgaggctcgtttgtcacttttgctccagttgatcaatttctttggtggtaaaatatctcattggtaagaatctgtttcaataattgtacctgctgaattcaactcttgctgcagcatagcgtgttttcgtaatgaaagtgagttacaattgaagtgtgtggactgacagcaaccgggacaatagaaatttaaatagctataggctaggaacaagagattaatcaaatgagagtcaagtaagttttttgattaaaccattctagagaaagtgagagtaaaaagggaagtagctaaatatgaaattaaagctgtaggttataagttcgttattgtctcatgagagtaaacttgcactaacaatttgcactattgacttgtaacttctgcatataaaactcatactgtgcaatactttccagctttttccagatttgctgctcattatgttccagtgtatttgttttgaatgatcattcatgggacctctttttcttcagaaaatctcagattgagaatttgtgttgttgagtattggaggattttagagaatggagaacatttgttttcatgctctttatttattttaaaagaaaatgtaaatatcttttacattttctggttggtctcattctatttctttttcagtattctttttattttttgttttgaaggcttgcgtttcatatttagttaaaagtgtttggttggttacttggtactgagatgcttagccttcatgattgcctccctctattttcgctctacttcatgtttcctatttctaaacacaaaagtagagtgtctctcgacattgtttgtgcataagcatgtgtgtttgtcttttgcttttttttttgctttgtttgctgttcataatgtgtctctttttgtcctctgtttaaacttgaatgttgttgttgagcaagtttaaaagcaacaggatgcagattcacacatgaacatgtaaaatagtggatttgattctggcaataatgtataacaatgatattcaactttgaaatgtgattttgatattgtgcttggaatttgagagtatttttagatcttttgtgcattctcctaatgcatatttggaataaacaccagaaaagcctttttgattgcaattatgcattttttttgtgtgtgctaagaatgtgatacattactgtgcttgttttttcaaggattatgcaagtttcattatgttaagccagccctagcattttggggccttaggcgaaaaattaaaattaggccttttataaagaaaatattattctaaacccacacatgctgggaccacatacccactttatttaagtgcacacattccacttattaaacttttgttaatgtatataatagt

SEQ ID NO: 225225 - DNA, 3740 bp, Cannabis indica
ttttttttttttttttttaacatgatgaaaattttcacctataatgtaatcaaaacccacttgcataaaaagtaaaactgtaatcaccacaacacgttttttttttcgattggtacattataaaacataacacagtccaaaatttaacgggactgtaacatatgtaaatatataaaatattatttatttttattttttaatattttttcgcataaaattaaaaaaaaaagctattttaaatttttgcacatccacgtatttattattatgcttctaaacttttcaatccattacaaataatccttcaactctttacaatattgtaaatttgtcattctgtcaagtattgtcacacatgttaaacaaaatggtgacatagctgcttagccaattatcacatgattactacgtgtataatttaacatttaaaaaaaaaaaaatactatttaggattttcactcccaaactatgacttatgtattattgtgcctcctaaatttttcagctcgttaaaaatgatccctgaactttttagtccgctaaaaatgatgtggcaattagccaagcagttatgtcatcattttatttgccacgtgtgaaagatacttgacaaaagaactaatttataatactgtgaatagttcagcgaccatttgtaacgggctgaaaagttcaggggcacaataatgcatatgtcatagtttggacttcacgggacaaaattcctatatagccttttaaaaaaataaaattatgtattttaaaaaaatcattaaattaaaaattaattaatgattaagaaaattacgtaaaattaatttacttttttttttaaaaaaattaattagacacgtacatgacgttgacatgacacgaatattgtaactagctaagcaaccatgtcattattttatttgtcacgtgtgacaaaacttgacagaatgatcaatttataacattgttagtagttcgggaaccatttttaatggattaaaaagtttagtagagaataatacataagtcataatttagggaacaaatatcctaagtaggctgaaatttttcgaaaaaaattgggagccatggcaccctccgcccctgtcaatcctcaacttaacaatcaatcttttaagagtgaagggagaagaaaataacaccaccatcgttacttatgttatatctacaaatatagaaatttgttagccttattaaacttggtttgaactcttctgagttttctatccaaaaatatataaaatccaccattgaatactttagtggcaccaacatgtctccaaaatgtgtggatgattccaaatccaatgcctgagaatttaattaggatatgattctttttaagttcaaagaattagatttaaacttaaacaagcttagtccttagtatggacgaagccatcttagactgaggtagagccattggctcacctcaaattttagaaatgtgtatatgtgcataaatgaattagggcccaacaattaattgatagaaatgttaaaaaatttcatcatatatattgtttatcattactaattaaaatattaaataaatttatatgtttatcacatataaatgaatcatttatcttcattacaatttttttatcaaaaaaaaaaaaataattcatcaattatcaaacaaatacaaaaatagtgccagaaaagccaaagccaaagcccctaattacagtataacctcaacaaataagttctctcctgattactgaatttcttatttttaattatttgtaatctgtaataaattatttactagctacattttgaaagaacactatatcaatatttatcattttttcaacaatatttaacaataattaaaaaaaaatatatttccttaacttgtatttgtttttttgctttaacacccatacccattcttgcataaattattattgggtgtccaactaaaatcccatattgaccaaaaattaggaaggatcatgtgtatataaggataaaaaatatttctattaatatgaagttttttgaaaaggtacccaaaaataaatctgtgaagatttaggcccaaagcggacagtattatacgaatatagatatacatggtgtctgacgattcccaacaagtggtatcagagcttggtttaagggccatcaagaacaacatcaatgtttaagaaagatcaagacttaatctcaaatggctttctcacattttaaaatggataagttcacggaagctaatgactttagcttatggatgattaaattgaaggctttacttgtgtatcaagggatttcagaagctacagatagagaagagcttaagaatcttagggatgacaagaagaaggtaaaggagatagaatcgaaggcacatagtgcaatacttcttagtctaggatctgaggtattgagggaagtgttgagtgacgatactgctgttggtctatgggaaattgacaacaatctatatgaaggaatcacttgccaataaactctctttagaagaaactttacactctcaagatggatgacatcaaggaaattagaaagcatttagatgaattcaataagatcatcttggatctcaacaacattggggttaagattgatgttgaggatcaaggtattctcttactcagttcattgcctaaagtttatgaacattttgtggatactatattatacggaaaggataccttgacaatgtcaaaggtaaaggctactttgaattcaaaataaacatagaaaatatccgtggatgtgcttatttaaataggcaatgtgctatggatggtctaagaaagaatatcaagaactcttgaggtagtagtggtgctccatgtaaggcgtttaccccaacgcattggagagaagtatacactagttggtggagtgttgatgaaggaggatcatttgaggggaggcaaggtggtcctttttttgaggggaggattgttgggtgtacaacaaaaatcccacattggctagaaatgggaaaagatcatgggtatataaggatgggcaatatatccattcgtgagagcttaggcctaaagtggacaatatcatactaatgtggagatacatgatgtctgacgattcccaacaagtggtatcagagtttggtttgagggccaccaagaacaacatcaaggtttcaagaaagatcaagacttgatctcaaatggcttccgcacggtttgaagtggataagttcataggagctaataactttagcttatggaggatcaaaatgaaggctctactagtgcatcaagggatttcagaagctattgacagagaagagcttaagaatcttggggatgacaagaagaaggtgaatgagatagaatcgaaggcacatagtacaatacttctcagtctgtgagatgagatattaagggaagtgttgagtgaagatactgctattggtctatgggagaaattggcaacaatctatatgaagaaatcacttgtcaataaactctatctcaagaagaaactttacactctaaagatggatgaaagcaaggaacttagaaagcacttagataaattcaacaagatcatcttggatctcaacaacatcggggtcaagattatgctagacatttatatgtataaactgaaacatatatgattaagtataaaatgcggaattaagtcaaacatatatacactatgaataaggatcgaaatacctccagccattgattcttgagctttaaacccacata

SEQ ID NO: 225226 - DNA, 4470 bp, Cannabis indica
ttcttaagtcaatacaactaacgaggattaggctattaccgaactgctcggggctgaacctctataaaatttctttgtcttactattattattattattattgctttactacgtattcatattaagacatattgtttatcacttatcaaaaagactcattgtcgttggctaaaagcgaagtcgacaccttttattttggacataattgctttcccttttccaagcacgggagaaggcggccgacaaggcgagatgggctccctaatgcgaattgcatgttcaataggccggggcggggccggaagtttcttcctcctcttgagcagagtcacctactcttcctcagcgtcatcttcaagattcaagggctcctcagcatactgtttggcccttgcacctcccttcaactcagcttcgcgcttaagttgaatgagttcattctcctgatgagctcattcggccgatccagcatcatcttcggaggtcaaccagatcatattccggtcttcgctcagcagtcgagcaagcctttgggctctatcctggagagtaagaatgagggagggttgtgatatgtcggaatctgctggaactgagttcgagtgatgcccgcgccatccaccatgaagtactcatcaacaaaatgcccaattttgctgatggccgagtcattagtgcccgtcaaccacttgaagtctggttgagagaaatagaagtatcccgacctgccttgcttaggggtgaacttcaaatcaaagaactagctgacttcgtgaggagaaggcatccccacttctgggaagcgtagaggacgaacagggcagacagatatttaatgcccttaggaaagaactgggtcaggcagaggccgaagaagtccgccacattcttaaagttttgatgcaaaggcataaattccccttgcttggcatgggcacccaaccaagcgcacatccccttttcagggtttgtggctcgattgttgtgggcgagaatgtaggaatccaattcgcccaggtagccacccaggtcgagagtctgaaggcacgcctcagtaaccctggacggagggcttacccacctggcgcccaaagcaccttgccttctgtgaggaaccgcagcagtaagcacctggacctagatctggacccgaatctgaacggggacctacactaggaccgtgacttgtgacctagacggggacctagactaggacccggactgggacccagacccaaatactaactaggatgtggatgcagactaggatccaaaacccgaaccaaacccaaacatgaacctagactgggacctagacccaaacatggatggtggacccaaactcggaaacagtgcccaaaaaccgagaccaagaacctgacccagacccggacttaggacccaagttgggacccaggacctagaatctaagacccaaggattggacatgacccgtagtcggtgtctagatctaggactaagaccagaacccgaagccggacccaaacccgaacccagaccccaactcagacaagaacctgagacccaaaactggaacttgaaccgtaaccagaccgggacccaggaacgggacccaggaacgggaccggcaccagaacctgggcctgaacccacacccagactgagacaaaacccaaacccaaacccgaaccaagaattgcacccgtacccaggaccaagacctggacttgggtctaaaattggacccagacctggacgtgggacttgggacccaaaccaagatcagaccgggatcgggacccaaacacagactcaaacctgaagctagaccaggacctagactcagaccttgactcaagaatagaacatgaacccgaacctggacccaaaccgagacttaggataagaacctagatgggggacccaaacctaggacccgggccccaaacccaaaccttgacctagaccgagacctaggatccggacataaatgggggacctacaaccaagaactgggactaggacccaaccccgaacctagaccccgacctaggcctcggcttgggacccgtggcctgaactggaataagatcgagatccgagatcgagatccggatctggacttgaggtttggaccgaactcgtagtcaatgtttggatctgggacccaaacccgtactcagacccttacccaaacccgtactaagacccggacccagaccggaattaacaccaagacacaaactcaaattagaactcggactctgacctaaacctagtcctgaactcaaacccaaaccctaaccaaaatcgaaattgaaacctgcattgaacccgaactaggaccaaggctcgaacctggggccggaacaagacccaaacctgaacccaaactcgaacaaaaacccagaccgggacattgacctacaccaggactttggacccgagacctaaactcgaattgggacctagactcgtaactggacccagacctagacttagattgggacctgaaactcgagatcgtatttgagacctaggactcagaccaagacccagacctagactgggaccgagacccagacccgaacccagagagggacctagagtcgtaccaggactcgggacccaaacccaaacccaaacctgaacctagacccagaccgagatctaggaccaaaatatagatgtggaacttgaatccaatacatgggccctcgagctgggtctgaaacttgggcctcagaactgcgatcaagacccgggactcaaccccaaacccgaaccttgacctagaacccagctccggacccaagacctgaattaggagtaggatctaaacccaggatctagaaatcaagggttggaccgacccgtagttggtgtctagatttgggacttgaacttggacctgaacccaaagctagaccaaaactaggagccagacctagacttgggacccgaaaccgcaacctaaattagaaccggagctggaccctagaatgagatcgagacctgggatccataaccggaacctgaatcagaactggacttggacctggaacgggaccgacacccagtcccaaacccaaacctagaactggtcccgcccctaaaccaaaaatgaaacaaaactcgaacccaaaccccacctcagacccaaaatagactcagaccgagatcgagatctggacacgaacccagacctaaacttggagtaggactcaaacttcaacctgaataagaacccaaacctagaatcataattgaaaccagaacgagactaggaccaagacccagacctgatcctaaactagaactagattgaaaccgtgacatagacctagaatcgagacagtgacctaggcaacaaaatagggacccggaccaaggacccgacccagacccggacctagacctaagacccagcagcctaagactcggcatcaaaattggaaccagatcagggcttggaccacacccgtagttggtgtctagatctgggacctcaacccgaacccaaacttggacctacggatagacacaaacccaaacaaggacctggctccgaaccgagtctcggacccaaacttggaaccgaacccgatccctatgacccaaaattggaatcaatactggaagtggaccgggactaggacctagacctggatccgctgccggaactggactaggacccacactcggacctagaccttgaccaggatccacactcgaatccaaactcgaactgagactcgagaccaaaccgaaaccagaccggtacccgtgactgtgatcttggatcttcacttgggattcgagaatcaggatgatacaaattacaccaacagttgtgatgaaacccaacaaaaagtatggcagaacctaagaattctcaaaattaggaagtggaatcgtgatccagtgcttagtttagcatgaaccttggtatgaaagaaaaagccacaaacggtggtggaaacccatttgataagtcaggttgaacgccacaaataatactccttcaaaaataatgtgaaaataatgtgattttccaaagtgtttacaaggctttatatagccaatttataaccaagaaaaaaaggaaactaaaagaaagacaagtttccaaataaaacaaatgcagaatcaaggaaataaaattaaaaagaaagtttccaaaagccttaaaaaacgtgatcaaccacaaaataattctaaattaagtcaaagttgagtctactttgatgagaagcacaaatctttgatatgcttgagtgttgactgcggactcctcttgttttaaaactatgttgactaagttgttcagttcttctttgaatctcttggctcgtgccctcatcatcgaaccaactggaacatgacttgtttcttttagccttggtgtcctcgtcattccccccctcttcaaaaggatttgtacctcaaatcttcacttgcatcgtaagggctcaaatcaggaacact

SEQ ID NO: 225227 - DNA, 4833 bp, Cannabis indica
tatatatatatatatgagagttttagaagggttttggaagaagaatttgtaatagagctaccgctcttggcttgggagagccccgggtttctcgaatacccagtaacactgttatcaccaccatttagatcaatatatcatccactattttcctgtattgctaggagattcctatcacgagccttatgttacaaaagaaaaactcagtaaacctatggcattactttgttttgattgattggtgataatctggctgtgtaattcattttagctttgggagaaaacaaaccagctacgaaataatgaagctcaaaagggtgttgaatgtaattgctccgagtcttgcatgattttgtgttgaattatcatgcttgttaatggtagataccatatcaagataacaaaggttgaccagaccaaaccgtgtctgttacggtacaatgtcatgcatcttttattgaatgggtgcaggagtatgtttgcatgttatttggagttcaaatcttgtaatttttcttgcattgtgttccctatctgaatagaaggacaccctgtgatgatttctaacttagcaaatgatgcatgagacagaagtaaatgttatgtaagaggtggaccttagtacatatcacatttgctatttagtttgtttcgttgagcttaccatagaagtttttcggtgaagctacttgttatcatttttcgtcctactttttacctgcaatgctgtgctactttggcctttaatctgaatttactggtgggaatttactatgctggatggatggttttctgatagaacattaaagttttagccttagtacgaataacggtagcaatggtcaaacaccgacgaattatgatagggacaactccatgtaactccctccacatgatccaatttccactacatttagctacagatatttcttttcttgctctctaattttatctgctcttttgaatctgaactcacaggtaggaatgagaagcacattcctcgaaaacaggtggtagttctaggaggaaattcaaaagccaagcagcaaagaagggataagtatatcaggaatgagaaccaagttcctacttataatcactgttagtattcacagccactaaattaaactcttcacatcacttgttttctctttatggtgaataagagtgtaatttggttcttgcaactttttcgggttgttttgcagatgcaaatggtggtggctggtgggactccaacatggagggggttgacaatgaagaagttggctttagtgaggtatgggaaggagttggttccacaacttttggagggagtctagattggcattgatcttcaacccttgatattgaaatgtccctttactaccatatcatcaccatgtttgaactttgaagctcaaagtgattgactatcagacttttccaatggtgctggtgctttcattagagccttagcctgtacataactgctttatgtaacaatatcgtcttagtttgttcatggttgaacactaatcagttctccattttagaaggaaaaatgatgtaaaatgcactttttttcccctaaactgtcatcaccttatgaattagtaatttatttatttgtttttttctaataaatcttgcaattttatgaatagcaattagctagaataataacatgcaatctaatcgggacatctccctgttggaaacaggattatgattaaaattaaaaaataagttaaataatcagccgcgtaattcttgaattgtttgacaaaaaaaactaaaaataaaataagataaaaaaagttatagcatcacagttaattttaagaacacttataatcacaggaaacttattattttcaacgactaacaatgatttgatgacaagttattaaaggaaaaagaagaaacaacaatgaaacaaacaaaacaaaatcatattacacaaacaagaccaaaacactcaaaattatgtcatagaggcaagactaaaatacttaaaatcatgatacaaagacaagactaattgcagtagtaaaaatacaattgcaattgtaaaacacaactccaactaagtcacacgagaaggatggcgagcctgaccatgaattagttatttttagttcaatgtgaatcttaattcaagtaaaaccattgtaaaaataaaaataatatatggtttaaaagtttaaaatatggtgatatgtgaatgttaacccaagcaaaaatctcaatagaatataaatagcccaaaagaaagaacatgaaaaatattgacttgaagaaaaagactgtttggggtgagagaggctcgaactctcgacctcaggatcactcaatgtagctatgagacctacgcgctagccaactgcgccaccacccctatgtgatatttcatttcacataatgatatctatttttaaagtttaaaattagttttagatatttatcattttgggaaacaaatcatttgttaaatttccccttcattcaaattagattttcaaatatttaaaataaatgttttaacatgaaaaaagaacacaaattagacaattttgaaaaggaaaaaaatgttgcaattctttatttttgttgttcataaaatattattatgtgtgattcatgagaatataatagctagactcaataaaaagaaagacaatacaattttttcttattaatagggttgaccttgaggtgagacgagcaagacgtgcgccttgagccccgaacgctcaggccccgtaattgaaaaaaaaatatcagtattatttaatgttattttaagttaagaggttatgagatcaattcttaacctataaaacaatgaaggatttttgcaattttttcaaaaatatttaatgtataactataaaggattcttgaaacttttaaaactaattttaaatttttttaccactataataaaatacttgaattattattttaaaaataattaaacggacttcaaaattaaattttgtcaaagaccacataccattgccctaattgattaaaaaaaaaaatactctctgttttttctcttcaatattaccaagatgaacaaattgctttcaaaaaatatataaaataattaaaaaaaaaaaaaacaaattgattagagcaaagataaattttgaagaatattttttaaaaaaaaaatgtcaacgtacatttttgttgacaaagggttcaaagagattctctacaaataataaataatttaattaatcaaagtaataaaaagaagcttgtaaaaattatggattaaactatctattttgttaaataaataataattcgaatcttgtattttttaaaatagtacaaaatagattatgagttaaattttcattaattatttttcttaatataatcaacttgaaactaatttttagcacaaacatatgaaaaaaatataattattcatgtcataacactttcaaatttggttattattaagttttaatttgaccaaaattaagctcaagatctattttgtatcattttaaaaaacacatgatctaaattgtcatttaagaagagaaaagtgttatcgtcaattgtgaacctcctattacaagctattagtcaatctccctgttctaaaacacataccgtaataattttttcaattttttatagccgtgtttgctatagttaattatttttatttttgaaaattttcaaataatttacaatgtcctaaaattgtttaaagtcgtttgaacacatgtggtaaattagaatttgtggaactttgtaaactatttgaaattttttaaaaatttacaatgataatattgtaatcataactgttgcccctgtttttgcccaaaatacgtggaccaatgcgaccacgacacgtagatctgaggagtatggcttcggtataatttgactaagtcttttaaaccaagaggatcagctaaagagatacctccagagaaggcatgaggggaccacgcatttccggagagcaaagctatagcaaagcacttccgaaagatatcagaccccatctgaacagtcatctcgcatttaatgccgcatgggagaaggcgtattggtactgccataaatattaaagtctgacggcgtaaccccccttctgcagctattgcgctatgattaataagcttagtgacggctactttatgagggatcacatcaatcaagaagggataaaggagtatatctacctaacccctaaaatacctagggtacggaccatgcatttcctattttgcatgggctaggaatgcatgcccctactgaagttacacagaattatatatgggacaattttagggattaccccagaaaaaaatactataaataccccaaacacattaagggaggggtcgagatttttgggtttcagaagaaccaaagagaaacattctctgtaataaatactctcataaataaaaaagactcgttgactaagacttattaatgcccaaccacgtaaaaatttcatgcattagaaataatattgtaactataataaatataaaaaagaaaaaattggaaaaatagtgatttttgacgttgagatgttgatactttttttaacaaaatagattggtcattcaatatcttttgtaaaacatagaattcaacgcaattatttccaaacaacttcttaagtcaacaattgactccaaaattaaacttccttaataacaaacaaagaaaaacaaagaagaggaagatcaaagagaaggatcatggagattagccacttaccacaagagtgcatcgctttgataatatctctaacaacaccaagagatgcttgcagatcatccttggtatctcctctcttca

SEQ ID NO: 225228 - DNA, 5601 bp, Cannabis indica
taagtactactaattattgtattgttgacactttaattttttttttttcattatttattttcaagccttatggtattctgacaagttttgctcaaagtttattgtatttgtgatagtttaattatttagagatagtccaaaccgcataaaccacaaaaatcacactgcaccgcactattttttgcggtgcaggtgcagtttgagaaatttgaaaaaccgcatgtgcgagttagtttgaaaaaatagtcaaaaaccgtactacctgtaccgcaaatacccctaacaatttttatctattacattaccattctcattacatcacattacatcaaagcaaacacgaagagagaatagtttgcgaaaacgaaaaattgagagaagacaataatagaacataacataggttggcacaaaagagaaaggcatgctatgcaatgcaagggttgataggagccactacccaagccatagctttctccaaagcatcaattcgccatttcaactcacctactactcataaactcctcaacccttctcttcttcatctacccaacaaacccttattcttcaaccttcgaaccttcgccataatggcaaccctcgacaacttcgtcaacggaagcgttcacccgaacggcgtcgccgtcatcacccttgatcgttccaaagcgctcaacgccatgaatttaggttcgattttttatttttatatatattttcatttgcttcgattgatacactgtatgtggtcgaattcgggtttgaagcagctttactttgtcattttcctgagtttaagtatctgattgattgtatcaatttcttgtgtaattcgagtagtatgtgcattatcttgttgtagtaaccaacatctgagtgtgagtaggtttgcacaaaatacaatttcatttatttgcaatacactaccatttgtgtttgatatattaggatttgatttagaaatgaccttaaaattgtttatttatgtagaaatggatgtcaaatacaaaagttatcttgatgactgggaatctgatccaagggtgaaatgtgttctggtcaatagcagctcgcctcgtgctttttgtgctggtacgagtagataaatgattcaatttccttgtttgttataatttctttcattttcaggtttgttgtttagtttggcacttgatttaatgctattatattagtataactttgcttgtttcgggagaaatgtttgttccaaatggatgtgagaatttcaggatgaccaatcatgactaatgcaggtatggatattaaaggagttgttgctgaaattcaaaaggacaagaacactcctcttgttcagaaggtttcttcacgacactcgtttagtttagtagagttcttgttggatgctagtttgatcattgtataatttattctatgtacattgattttgtactgtttccttgaatagcgattggaaaaatattaatgatgctctttgtgtgttacttgcctaatggaacttcaatttgataacctagatcttagtttatctgcaggcggtgatgtgaagaagatcacaaataataaacaactgtcagatataattgaggtcttgttgtgttcttctaaatctaatattatggattcataattaatttacacatcaataattaaacttatacgataattatatgaccgacagaggcatatacgttctaattttcttgacttgtgcaaaatggtttgggaagttctggttcatttatctataattatttttatttcttatttttcctagtattcatagaaagaaagaaaatacatgctcatgcaattttagttcttgatgtatctcttctgccaactccatgatttacttgtagtgtaaatgagtagtaactttttttttttttttgttattttaattgtcatagggagataactttaatcttgtataattagaaggaaatttagaaagatgactgaacatgcaactgggttttggttccattgttattcttggttatcattatttttgtgaatgggggatcaagactttgacgtagtaataaagaaattattttatttatctaacataattggcatctataaaattttccactctgcatgagcgtaaataccttttattttatctgttcattttccagggatacttcattcatagtttagtatacctggtaaatttgtttgatgattttctttatgtttttttttaactataacttgaatcattagtattatatcatctgttttttttagccaacatgactcaaaggttattgaattccaatacctgctgatttgcttttgctgtaatactttgcaggtttttcaagctgagtactctctgatatgcaaaatctctgattacaagaagccttatataagcttcatggatggtatcacaatgggctttgggattggtctttcaggtcatggtctctataggattataacagaggtacatttgctttcatatgctgaggtcatataatccttataagctgcaatgtcttatgaaatttctctaaatctgacttcttgctgatgtgctctagagaacacttcttgctatgcctgaaaatggaattggtttgttcccagatgtggggttctcatatatagcagcacaaagtccgggaggaggagctgttggtgagtttttttttaattctgaacaatactttgtttacatttatttaaggatttgtttagctcaatcatcatatgaaatttccaagaaacaaagagtacatggagtaatcgttaagtatctatggaagcccgaccagttacattatctgtgctggtgttaatgagaaacagattatcaatttcttgtttgctttgcttatcagctctccttgttttttaactttcaatattaatgtttctaggtgcttaccttggattgactggaaaaagaatctctacaccctcagatgcactatatgtagggcttgggtcacattttgtaccgtctggaaacttggcttcactaaaggaagcccttctttcaacaaacttgtatgttcctgatttttaattgcaaagctattaccatgtgcattgcttggaattttttcatcttcagttgttatcattctctcacttaaccttcttaagtacagttctgaggatccacatcaagatgtgaaagaacttttgggaaaattcggtagcaaccccgaggcggaggctcaattaagtttgcttttacctcaaataatatcgtctttcggttcaaataagtcagttactgagacaattgaatcactgaaaagttaccagcagagttcagatgaaactggtgagttccaaattgccattttgtttgtcaatattcaaagaaagctgtataatttaccctgaattcagacactaagtgctgggttgtgagttttttaactttggattgtgttttgtttaatcatccctgctgatgttcatgctccttctgcagtagtggagtgggcaaatgaagctcttcaagggatagctaaaggtgctcccttttcactttgcttaacacaaaagtacttctccagagttgcatctgcatatggaaaaagggagaatgaattatcttcggtgagtttaaattatgtagctttattattctatatcaactaagattatctaatgtaacttttacatttggccttgtccagcttactggtgtaatgaaaactgaatatcgcattgctttgagatcttctttgaggaatgattttgctgaaggtgttcgagcagtgttggttgataaggatcaggtattcatatgatatttaggagattatttttctctacttgttagaagaatgtgaaaacaaggttggtagaaattatttatctacatgcggctctctcactcattatagtggaaggaaagcaagtgctttactgatgcaaaccatttttacaattgtaatttcttagttcttctattgaatcttgattattaatcccggtgttgctattgtgtctgcataggtgccaaaccattatgtctcttttttttttttttcctttaaggagaaaaaatttgatcatattttacacaccgagctggatgtttcaactgctgctaaaataatttgttgattctttcagaaccccaaatggaacccgtcgacgttggaggaagttgatgagaaggaagtagaaggtgtgtttgaagcactgagcccgggagttgaggaactgcgtgtttgacttacgttaaagaaatgcttcgttttgttggtaataactagcatggaaaggcaataatagacttttaaatgaatacattttggtaccatctttttattttctttgcatattgcaatccctcgacagtgaatgaacttacacataaataatttttatcacaacctagtgtgatatttatgaaaaagtttcatgacgatatatatacatatatattttctagctagagagttacttttttcatcaaagttgggacggaaatgggactaaattggattaggtacatatgatgggtttggtattagattggactattctttttataaataaaaagtcaatgaaatgaaatgatgttttaagaataaataaataaaattttaaaagtttggattaatatttaaatgataaaagaaaattagaaaggataaaattggcattgtcttttttatcttttaattcaagacattctttcttttattctttaatatttatattttgaaacaggaatcattcattagataaacaatcagtattcagtacattaggatttggcatgtctagcttcacagcaatgactatcacatagctctaaccttcttatgcctaatctataggtcacttggttggcctctccaataatcccacaatattatttacgctgaaacatagtcctaatttgatacaaaagactatctatgtctcgaccacccacatcagcacagcaccaattatcaactgcactacctcaaggcaataaaattcaatatgaactgattgccaccctctctgtatgcccataagaatacctagacggattgctagcaattctgtagtcagcggaggaacatttgtttgtaggatctgagcttccaccattaaaacagtaccttgggcatctctcacaaccatttcgaagcttgctcttcctaggctatcattcacacccacatcaacattgattttagtgttgtctacctctggcggtatccatttgacaacctgaggtggagacagagctgcgatattcattcatgaacttaccacaccattccacaatgtcaatcgctttgggtttggagccccatgtatatcagcattccttatataccatagttgttaggaaataataacaaaaaaattcaaaggtatcatcaaaccattcctagtgtaaggttgtcaaaatatctacgacaccctcgttaacaaatgtttaagcttcttccacacaccactttgtttacaaacatctgtaacagtctgacatatgcatgatactcttctcttgctcattattacatctgttgtagcaagaactctcagagacctttcgcttaaacatcgtagcattggtaggaatccatgaatggcttacccactagagaaagtgtt

SEQ ID NO: 225229 - DNA, 6573 bp, Cannabis indica
tatataaatttcagttctttgttcagggtcaaattcgaaagagaaaaaacgtccaaaattcatatattaactgggactaacctccttcacattagataactctgtctgtaaccgttgaatatagttcaaagcttccggggaaaggttcccaaaaatctgaggactcgttgtttctaattcttcaatactcgtctcaaaaacaatttcaccgtccttgttttcaatctttccttcttccgaaaccccttcccgcgatgattgtttcaacttctcagaactttccgtcggaatatcgaaattcctcatcaacgataaccgatactctgcgttccacagtgtatacctaattttacaacaatccaatccaatctagtccaatcaaaatcactatccatgaacaggaaattccaattccagctaaaatttgttaaacgagctgacaactaaaatcgaaaatcacgagctaaaattgtgttacccggtaattatggaagacacgagaaggtgatcgagaggacctttagaaacatttatcgtcactgagaattgatcggaaggaagcaaccctagcatagtagagatcgtctccttcatggaatccttagctgaatcagaaacacccttggaaataacggaagtgtctagaggctctattcgcctaagcatattagcaattacagaaaagccccggtcaaaggtagatctccgagtcgaaacaaactcgtcggaaacaccacctccgtcaactccagagatgagggagcaaaccttgaccacgggcgatgatgacttagcaaaacgacgccgttgtaaggaaggaagaaaacgttgaaaagaggagagcggtgacggaggtggtggcggttggggaggctgtcgaggccgtagagataggtctgtgaagcgagaaagaacgaaagctcgagctgtggctgccatggaaagatgagctaagcgcgagagctctctgactctctttctctctctctctctctctatgtctttgtttgttttgtgtatgagattttgccacttcattcagacgggtcgcttggtttcggcgatgagtctttttcttactactctcccattgggacctaccaaactctggttgtttttgtaacttgtgctgtttaatgactataatacccctgcttttaaatcattattacggattcgccattagaataagaatagtgttaattaggaccactattattatgagggtaaataggagtataagtacccaaagtttaagtttgtaagtgacataattttaatgtttatttttagcggcataaatagccaatatctgtgaaattgcaatttttctctaatttcgtcaatacaaactctgttattttcttaaacatgtcacatataaggtctagattcttgatcattaggtactaaacagaaacatgtagtatcatttacttccaaatatttatttaataaattcaaaatgaagtctgtactgacaaaactaaagaaaaattatagttttacaaactttacaaacttaaaattttgggtacttataacgctatttacccttattataatcaatggcagaatcggtttaaaataaaaaataatcgaaaataatattttattatgttgtttactaaactatttacaaagaaaatcagaatcatattattttgtttacataaataaaaaaaaagtaatcggaatgctttaattttaaaaaagttatatgagaatcaatatcataccattaattatcattcccttaagtaaacatgcccttggagttggagttactaatcttcgatagatagtagtaaaaattgtgttatatttaagaaaaaaaaaaaattattagtttaagttttagtattgtgctctaatacaaagtttaaagttttagcattttttcaaattataaggcgattgaaatgcactaatagcgttatgacatttttttttcaaaattcaaatttgaaagaattatgagacacaatattaaaatgcactaataacagtatataatatcttgttgctgttaacacttaaactacccttaatatttttcttatatttgactcaacttttagcgtagcattagaaagaaaaacatcttagaagattgctaatggctcttggttgagctttgattggaaggaacactcaaaaaatggtcaagtataataacagctgtggttattaaggactgatacgattaggtgtggggtactcactatctattaagattcctttccttgtaaaattaaataatatatagcaaagataaagttagctaataatgcactagatgattgattataaaaggtgattttagttaaattttttttatgaaacttttgacagtataaataaataaataaactttttatgtatacaaagattttaaataattgatacataaagttgtcaaaaagaaacataaataaataaaaagccctgattaataaataaaattagtgattcccattaattggtcaaaattttaaattggagtgatttatgattaataattattcatatgttcacatggaataaaacaaagcatgtatgaaaaaaaaatgatgagaaataaaacaacttactttcaaactcaatatatgcagagacaaagtaataagacatcactattgcctaccaaaattatagttgaaactcagaaaagtgtgtttattattcaaaaggaaaaaagaaagttctggactttccacatcatttagctaattaaataattcttattagtcactaaataaggtgtctaagtagaaattgacaattaaataaggtgtctgagtaaataaattgaaattccaaatcaatatatgcagaaacatagtaataagacatctccaatggctataaacacaagagttgaagcttcagaaagctactgaattatttattattctaaggaagaaaagaaagctctcaagacattttccacactctttggctaattaaataaatataactcttattagtgaatgacaagaagtgattgacaataaaaatgagggcttttaatgtatgattagtgtaggaagtgatgatcacaatccatgctaccatagcaagaaacttattccttgaacacctatatgctttgtggcaagaggaagaagaagaagaaaagagtaatccacagtcaaccatggggttgagaatcctaaatgaagttaacaacagattattctacagtaatgtcagcgcaccttcttgcttctctacagcatccacgaaccatgatttccaagcctccatgtaatgagcaaagaggtcacatagagctgccatgatcatcaacaaaacgaaacccgtctctaaaatttagtagctgccattgttaaacacaaccgggtcgatataaatttttcagaacatgcaacactacttgaccaccaaggatggatttactaataatctaaaagcttaagttgggaaaggcaagaaagctgagattaatgggaagttccttgccagaatgtggacactagacagcttatatggacaatttgacaagagaatatttacataggaattgttctaatgtagatagcatatagataaagttgggaaactagatgtatcaaatcaaagaaaacagcaaaaaagccaaggttggaatcgatttgttgttgttcctgttcagctttttgtagctacactatcaaagattgtcccaataaataataaaaaaattgaaatcctacaacaatggtgttaactttgacaatgttgatgtttttgtgttttccactaaattgagcatcaccaaaagcttagttccgtgcattgtagttcaaaatgtaccttggttccgatactgaggacgataagtagaagccaaactttcccaatcttgaacctgtctcactcttttatttgctgcatctccttccatagccaaactaataggtgcaaaaggtccaaatacaataccctttgaggcatattttggacgcggcttcacttcttcatcatcacagacacattcattttgttccaattcagacaatttacaaattttttgcttacttttctcttgatttgacttgcaatcctctgtggtatcttctctttttctcttgaaattgtaatttgtgagatcagcaccaaatattctctttataggttggttagaatctgtattatcaatttcattcttggtctttgctccccaacacaaccacctatatgctggtttcccactatcaggatgacgaatctgcaaatcaatttaacaaaaaaaggggtggaaaaatgtcataaacgaagctattatatggttaattaatcctacattctcatgtgctaaggtttctaagattatcttttaccttctcaatcagattcattgaagataaaacatttgcaatatcatacagacgtctaacctttgctggaaaataaaaacacaaagaaagcattagttttggacttaattattgtctctatcagaattaaattattgttaacatcttataagatataattacttctcaaagccgttggatcttctgcatcacctggcaatcctttagctgcattttcaagcaatatcaaatccatctaaacaaggaaactaaggtatcagcttgctataattaaggaaactggttagctaataaaagatcgtaaatttataaacttaactcacatttgaacaaagaaaaagcttgataaagttctgggtgagaagtgatagagacttgtctctcttgttttctgcagcaacaagtgtaaaaacccccaaataagtcattcatcagaagattgagaattctaaactatccccaccataaaagtgagtccacctcacatgatcaaacacacaggtcaaaaaaggcaatggtgattactgtttttcgaagacacagaagagtactcctcctctttcgaattcagactcagaaccccactaagctctttgtcatttaaaacctagtaaaatgggcaattcacaaattagatgatatgattagttgaaacaaaccagcaattggaaatctaaggtaaaatctacaagtaacaacatactctagaagagctgcagctaactgaggcactaaaattctccttcaaaccctcatcctgtaaggaaaacaaaactaaagtatgttaaagctatgggttccatataaactcaataggagaagaataacaaaagctagatttaccttcaactgctgcaaagcacgtggaatttcccctaaacccttccatgtatactgatttttagcttttcttgcgacaacctaaatgagccaaaagacccatttcaggaaattaagatgcgaagaaagagtggatcaaaaatctaagctttcaaattaaatgataagaaaaccaaatttcgagaactgactccaataatctccaatatattgacaacgtcatacatgcggcgccgctcaactcctgaaaaaaaaaatacaatattggcaatcattaaactcaatgaagaaaaacccagattcatatcatagattagagtaagagcagatcaagacctaattgagaagcagcgtcatcgagaccaatggattcaacgccttcccgattatacaacctcaagaaactaattaaaacgagaaaattaaaagcgaattaagatcaaaaacaaaaacttgtatctatatatacagctcaaaagaataaccaaacaaaaaaagatagcatttttacttggaacacaaaactccaagagatttttctttacggcaatatacattgggtctagaatcggactccataaacataaaagaagaagacatttttgtttcaaaacagctgaagctgaactaccccaaaaaaaaaaaaatactaaaattatcaagttcttattttttttctctttataaactgaaaatcataaggataaagtattgaattgaaagttagatgaagaagaatatgattcttattaggcgggtttacaaatttcgaaaaatgtcagttttcgaatttgatcgatctgaattttttatttttattttcatttttttttttattattattattatttttgtttggaatctaaatctcaatcaactggctttaaaccagtcggtcacggcgtttttgagaatgtaaaggcgcgggaattcaaattaacattgctcagcgcggttagagttgaattaccgatttgaccttgctaagtttactttaatgtagttggtggaggggtaaactgggtatttcgcaacctaatttgcaggaaaatgataattacagtaacggcagatgattattaatttttaattttttgtttagaataattatttttagagcagtggacattagtggtgctcaacaagtttaaaagttattttcttaaaacaactctaatgataaatgttaaattaagtgttaaatcaatacaaaaataataaaattttgaaattaatttttttattctaatcacaacattaaaagttacactaaaatcatatttctttattattatattattttgttaaattataaataaacactataatgtctttttttattttagtgtagcgtaattgtattttataatcatttaatagtttaatagct

SEQ ID NO: 225230 - DNA, 4985 bp, Cannabis indica
tgctgcagtcgacaccggagatcaaggtggaagagggacggtcaggaattgcagttatccctgtcatgactgagatgggcggccaggcgtcggtacagcagagagagaaggaattaataaataattatgggagtgcagttttcaagattgatagccaacctaggaatttagagctggtgccgattgagagtccccataaaagaacaaggaacgagagagtcgattcctcttccacaggtttttaatcgtttattgagaaatttaaatgagccacgtgtaaatagaaatccagaatcccatcttttggaacacgtgtctctcttatgactcaatatatggaaataaattgagaatgggtgtgatgggccgagcctttgttgaaaataataaggaaatgggtcgtaagtcttttgggcagagtaataatatctctaaaaatagtgagataataggtgtaaaagctattcagcttagtggactatggtattaccaaaatggcccatttactcttattttgggccaaaaggaggcaccccctgcaattctaaaagaaaaaatggtggacactctcgtcgatggatttagatggaataaaagcctggagaataaagataaatctgaaaggtgaaaaaataagttggcagtatacaataagaaaaaaccagaacaagtgatacatgattttttcaacggaactctgaggaggattcgaccaaagaagaggacagaattcagagcggctataattagcttctgggcagattttgaagatcaaagacaagaaacacggaagtcaattctgcataataatgaagaagtgtagtcaacagaggctaatgagaatgaaaaacaactaagagtgtatacaaggaaaagaaaatcaacaaccttggttggggaggaagctactatcaacataatggaaatattggaagatgatgaagacccaagagaggaagcaatcggagaatacttctcagaaagtgaagcttcggatacagattgtgaggacaatctaaaagagatcaatgaaaagtatgaagacattttgggcacattaaagaattatggagtgagaaggataatctggtgagtggaggaattgggaagacacctggtgaagagcaacttagcatggagaatactttcgtttcatggtcaaagatggtggagtccatggctgatttggggatgaaaataatcccaaataggaaatagtgccagtaaaagagtccaaagaagctacaacaagagtggtccacgccataagcgagggttgttatttatctcaagggtgggggccaatcttagtgagtggtccctcctcccttttttcaaaaaaaaaacaagaagaaaatgcagggaattgagaaatttggactttaacatcaattatggaaaacataataaaaaatcagggctggaaaaacatgtaaaatgaagatacttacatggaacataaggggcagtggagataaggagaaaaggagggctattaaggcaactttctgtaaactcaattcggatattgcaataatacaagaagtcaaaaaggaagtggtagatagaaattctgtgggaagtatgtggagatctagatttaaaacatggattctactcccatctattgggaggtcggggggtacattgttgatataggacactagaagtatcacagtgttggacacaatgataggagaatagtctatatcagtgctaattcaggcagaagaaaaagaaccttggtggttctcgggtgtttacgtgccttgttcatataaagcaagatctaaattctgggatgagttggctggccttaattcgctttgtggggagtcctggtgcatagggggtgatttcaacgtagttagaagagtacaagaaaagttgaacagcaactcatgtatgagaagtatgaagatttttgatgaattagtgaatgaactgagattgattgaccctaaacttaacaatggaagatttacgtggtcaaactttcgagaaaaaccgatatgtagcagattagacaaattcctgtttactaacaagtggaacatcgcctttccatatgttagacaggaaatggcagtcagagtagtttcagatcacagcccgatattacttgactcagacccaccaaagtggggcccctgcccctttagatttgacaaccaatggatggaacacaagtctttttccaagctcttcgaacaatggtggaaagagacatcgatgtcaggttggccgggaaccaaaatcatgagtaaattaaagaagattcaagagaagataaaggtgtggagcaaagctacgtttggagataaccgcatgaggaaacttgctctagaaagaaggttagaagacctagataaaatagaaggaagcaatgattggaatgaaactctgaacaaagagagaagggagatcaagaaggaatggcaaaggttagcatttgaagaagaaaggaatgtgtggctgaagtctaaatgcaaatgggctaaggagggagatgcaaataccagatttttccacaatttgttgaatgcaaggaaggccagaaacacaatatccaaaattgagaaagaagacggatccgtgattgacaaagaagaggaaatagtcgaagaattgattggtttttataccaaactctacacctccgaaagaagagaggagctagatgtggtaggaattgcttggggacaaatacctgatgaatcagctggagaattagagcgaccatttgacgaggaagaaataagaagagttgtttttgactgtgaaggtaataaagcaccggacccgatggttatagtctagcagtcttccaaaataactgggatctaatgaaagatgacctactggaagtcttcaaagaatttgaagatgaaggaagaatcccagacagcataaatgaacccttcttatgcttgatccccaagaagattgacagttgtaaggttaaagactatagaccaatcagcctgatcacaagtgtctataggataattgccaaagtcttggcatctagacttcgaggtgtgatggaagatacaatttcaaagactcaaacggcttttgtagtgggaagacaaatactggactcagttttgattgccaatgaagcggtggaagaatatagaagtagaagcaaagagggaatggtattcaaaatagatttcgaaaaggcatacgatagagttgagtgggactttctcgatctagtactggaatgcaaaggattcggagaagtgtggaggaaatggattaggggatgcatctcgtcaacttctttttccatattcgttaatggaaaatagagaggtaagatactgggatctagggggcttaggcaaggtgatcccctttcgccgttcctttttactctggtggcagatgtattaggaagaatggtgaaagcaatagagtctgggaagttatctggtttcttggtcggtaaggagaaggtccaagttagccacctacagttcgcagatgacacggcactctttgtaaacgatgagacgtcattgaaaaatatggccttggcggtgaatgctttctaagcgatatcaggcttgagagttaacatgagaaagagccaactcttaggtatttgcatggatgagactgtgatttcgaggtgcgctgcttctattggctgtgagataggaaagtggccaatgaaatacctcagaatgccattggggggatccccgaatagaattgaattttggagaccaatcatggaaaaatgtgctaagaggatggatggatggaaatgctctttcttctctaggggggagattgacaataatccaatcagttctttcctcgcttcccacatatttcctctccttattcaaagcaccaaaggcggtaatccaaacacttgagaagatgatgataaactttttatggttgcttgggaggaagtgtgtagaccaagaaaagaagggggtctgggaattgggtgtctagacttgcgaaataagagtctgttgatgaaatggctatggagattccctttggaaacagacacgtggtatagagttataaaaagtcgatacggaatgtcagacaacttttgggatactaaaacaagtgaaaggatgtcctctcgaggaccttggaaaggaattgcaagcctacatggtgaatatttgagtttggtttcatttcaggtagggaatggggagaaaattcggttttgggaagatgtgtggattggacagaactctttgttgacgtcctatccggaattagcaattttggctaaatcaaagaataagtgcattaaagacatggcaattgttaaagaaggtggcttcaaggtgattaattgggactttaacttcaaaagaaatctgttagacagggaagtcccaagtttaatggagctggtgcagcttttggaacatgtgaacatagctcattcctcgattgatagtaggggttggaagccagaatatggaggctctttctcttgcaaatctgcctttggttcacctcaagtcacggatcgagggacttagattggaccaaaactctatggaaatgttgcgttctggtaaaagtaaaagtttttggatagttggtggctctagggaaagcaaatgttcatgaggtaatacaaaagagaagaccataaatggccatatctccgagatgatgtatttgtttcaagtccagtaatgaaacgatcgagcatttgttccttcattgcacatacactcaaaaaatttggtcattactttataaagaattagtctggactgggttttgccttgtttggtgacacacgccctactaagtaaaccggtgggaagcaaaagaacagtaaagctttggaggactacaatgttagcactattatgggctgtgtggaatgagagaaatagcagaattttcaaaggacaagagaaatcagcaaactttgtttgggagagaataaaattttggacagccacatggatctttaaaac

SEQ ID NO: 225231 - DNA, 2510 bp, Cannabis indica
gcacctagtctatgcaattcacttgagattcaagaaaacaaatgtagaagagtaacagagtggcatgttttaaaggaagcagtagcttaggtcggtattgtcactattcacaatgcatttctagttctactttcctgtgttcatgcttttcatagatttggaagccagaaagaaatgtccaaggtttataacaaaacgctaattagttagccataagctacatacacgcatgttgaacacaacaccaaaatccgatcccaaacaatcaacataatatggtcaaataaatcataaacatttattgggtacatacagtaacagcaattaataatgaagactgaaatagaagctcttatcttagtaaagaaaagaaacgtccaactgaattatcccaaaatgaaacttgttgcctttttagttaggcagcataaaaggcacataagaacaattcagaacaattgatgaagcaaatagacccacaaaatctaaatgctacagaaagcattgtaaaacgaaaaaaaaaaataaagtaatagagtgcaactttgtaaagaagatgaaagactttcaaaagaattctctcttaccaggagagaactcaattggaaggttcttgatggcactcaaaaacgcattgtctgaatcctccacaagctctctgtagccaggattgtagcaaggaacaagtactgcaaaaccattatcagactcatcctcttcttcactctgaaaaccagggccatgaggttccatccagccaatagacaagtcagatccatcggattccagccctgacaaagaatcaccgtctgatggtaccatcacaaaatcgcactccctctccacactcctctcttccctactcagccactttggtttcacctttccattagaagaagctaccttttttcccctaacagaagggtactggactgtttcgggttccctcagaccaaaccccaattcaaatgaagaatttagggaagttccattaggggtaggctctttcttatctttacccctcaaacaccaccatgaaaaacgggtgaaagagactgccattttctgaatctgggattgttgataaagctttaaaatgttgaaccaaagaatcgtgggaaagagttgaaagccagagagatttggggcaattgagttcgatgtggccctgccaattgcagtggaccactatataaggaaacgatcacttgattttgtagaaaatatcaaatagggaaaagatgcaattgtgttcaatctaacacacccttaaacttaaagatatcaaagaaaatcccaaaagtgttaaattgcggagtaaagctaatttggtctaaaagattactgctgtttctttctttcacatatccacaaacaaatcattaaagctataggtcataatcaagatagaggaaattagtacacaaaatttacttgagatctctcatgaccatctcaattatgttaagccaaaaaaattccctttaaaggaaccctttaagatcaaagatcaacgagcaaagaaatcaactttaagaaaacaacagaacaatcaacaataacaaaactgaaatacaaaagaattctactcgattactttcataattttctttcgttcaaattcacatagaaaaggactcaaaagtaccgaagcgtacttaaaatgatcaacgaaactcaataatgacaaaccaaacaaagaaaaaacaaaagaacaactttttttgtcccttttcttaaatttcttctgaaaacagtccttttttcttggatcgaattctcgaaacagtagttaaaatccaacaaagaccactccaactagttcttatgcactccaaaattcaaaatccagaaatatactcttaactcgaaaacccacaaagagaaaattgggaagggcatgggattgggtaacaacctcaagaaaccaaaattagggatacccttctgatcaaactctaagcatcggccctcatcaccgaaagaaaactcatagcggtgatatcacagggtaattacactgaaaatcacaaaattttctggtcagaaggagaaattccaggtcaaatcccagaatatcaatgagcttgaaacccctaattacgcttctctctactcactgggtctgtgtaaccaccaacaatctcaccctcatttccttctggctcttctctctctctctctctctctattgtgaaaaagaaccaactgatcatacgccctagtcttgttctaaatttataaaacgatgagataaacggtactgattgagtgaaactctaccgagcttactgtggtcgtacatgcagagatgaaaaccaccaattgtgtgaaatatcgttattagattattctcaacggtgatttggtgatcaagcagaactatgtatatttgactatcgtccaaaattgctgacgtggacatttccaatacaatcattgcgtgtgtgtgtggttcaagttactgacacgtgttcattaggtcagccttaaaattattattttttttt

SEQ ID NO: 225232 - DNA, 3824 bp, Cannabis indica
aatttctatgtagaattaccgtaaaaatagtaaaaaaaaataaattaattttaaaatagtaaaaaataaaaaaaaactcatattctatattagtatgcaatgtaagaccgaaaaaagaattaaaggaaaaagcaagaaacaaaaaaaagtgacgtggttaatcacgtggttgagagacagccaaaacaaacaaaagatttatagcggaaccgggttgagttgagtgagggatatggggcgggttcacaggagaaaaggatgagccagaaacggatctgggtcagcggtccacgtgcttccttccacacgtgtaaagtaagcgtgaaccatccaaataattgcttgttttggggtcttcacgtgctcactctcactctcacatcacatgccaactagctagtacaaatcttctttatttgttggatttaccaaactttttatttttcttctactaaattaattttatttcttttaaaggaattaattacacacaaatataccaattagaatcgacgatccatatatattaaaagagtaactcatcttataaagtaaccttatttgatccttggagcgaatagggacatccccattactcatcacctctcccactctcggtggctatctatgttgaacccaagactcattaaaaaatgttataattttaattaattattcatcatagacaatacatagcataattactaataattcttcacaaattaattatatttatgcacgtattcctcgttcaatttttcttttaattaattcagacaaatagaaaagaaaaatggtaaaatttaactaaacttggacaatgtatcgagatattaatctatctttactttcgctaataaaactgaattctatatgttaatattatatttgtggattattgattttataagatgagtttatttaatttaaacgttttttctgtctttttttttcaactaattgtgacaagttgaatatttatagtggaaaatttgaaaacaaatagattcagtagattttatatcacgaacaaagtcaaggaagtatgatattttaaataagctgaggttatactgtaataatattagaccttagtcgcgccttggtagttggtagggtcttcataaccttgattattgaaacaaattagacttgtgagagggatgactttcttaatcaagccaattaataatataggtatattatatatatttttgttcaattaatattgattgacatatgagtacgacagtggaaggaaaagtttttaaagattgtcttttgttttatttatagttccctattcaggttgattttgctgggtgaaattaattttatctataacttcttataaataaaatatattgtttaagcattttgacatttccatcattataaagtgattattattttctttaagaggaaccacttttctcctctaattaaaactgttttcatgtataattttttagttacaatataatctttttgtgattaaatattatatttaattacaataaaataaaatagtacattttgtcataaaaaattataatttttatgattaataatttaaattactaatcttttaggaggcgtttggttggtttaaaatgcataaaaaaaaaatgataaaaaaataattaaatttttttcttgttacattggaatggtcattccttcctttttaaaatggaatagccattccaccaaaatggtggaaagagcattctattggaatgtcattccaatactttaaaatgcaaccaaacaaaagaatagaatgaaaattgtttcttttctattccattccatttcattacctccaaccaaacgccacctaatgtaaataatcagacgtaatcactacaaccactttaattggcctcaaatagagcacattcatatatacttaaattggccccaaatagagcatgtctacaatatacattacatacaacacaaacttcgtatatatataatatatatatttatatcatcttaattcaaacatcttaaaagctatcgtcacaagcatttgcagtactacaaatcaattttctttttgtttgttttgtaataccaccaaacttagacccctaattttaagacacatataataatggacctaaacaccggactgttttacccgtgaatcaacgcatatttgttaatcaaagccaaagcattgctagtcaattgggcaacattcacaatcttccctctcaccacagttttcaaattcccattcatatcgtttcctccaaacccatcactgcacgtactctcatccgtcaaagcagcactaacccaagtttgaatgtcatttatcatcaccttaaagtcacggctttccttccctaccttgctcatttctcccatagaccttttcagctcatctaccgagtcactcagctcttccacgcagtccttcatcgcagccacctctttcagcttcaagccctggctcaacgacaggtttaacatcatggctgatgtcgttttggccgacgacagcgtcacctcgagggccgtgctagcaatgaggtgagggctcgtttggattgagtttgcgtggctcgagagtgagctataacaaagtttgggatatgttgtggcaagacaagaagttctaatgaactctgtgtttattttcgatgttggatatcttgctgctgaggttgagtgtgtatatgaagaaattaagattagtgctgtgagaaggaatgtggtcgatgattccattttttttttctctaacttttatcaaatagaaaatatttatttgaatttggaaggtagtggagtattgatgaaaaaaaatagagaagttgtgatcaatttatagagccccaaaagaaagtaggattaagtaagcgcgggtaaaccttactatcttagattatgtaagttgaagccttttatggggtccctagctaactatattagctagattatgatagggatgttttatgtaggaccaaaccaataaggatgtgtatgaacatagttgagttcttatctttgtatgaacaatttgaacctttttttttgttggtaaactccattaattagagtaatttgcggcattaaattttgagttacaaataaatatctaaatctaatttttgtcgctaatgatacttaagttatattttgaaacttaagtacttaatgacgtgtttaaaaaaaaataaaaattcataatctagaccaatcaaagattaccacgttgcaataatttatttaataattaacaatcagatacctattgaattccaaaaatataacttaattactattatcgcaaaaattaaacttaattaaatattaatttacaactaaaaattaaacttaaatagttatactacaaattactcttataattattttcactactttgtagtttgtactatagttaataataattgcactagagttctaattctttggtcattattatacatacaatgtaagataatattatacacacacattgcattgggatggtaataataattgtcactaacaatacaaagtaccacattaaattattgtaaaattgtcaaatacaattccgcatgtgattgtgcttaattaaagtatagatattttaagatatatagtcacgggatgattattatatataattttaaattaatataaataatttcatcaaaaaaagttatataaagaatgaaagatttgttggagatggagttggatgggccaggggtgggccgccggctgagagtgaggacgaggggactgagggtggcgcccaattatgcatgccgacatatgatcttttgatatttttcttt

SEQ ID NO: 225233 - DNA, 5600 bp, Cannabis indica
tggtctgtagggtcagtcatcagtccatgaagcagccagagtgacgaactcgtgtataagagccattagttcgtgggtgtaaggacccaatggaggcttgaagcggggacgttacagtgcaagtgatgcaactgacgacagtatgatacctcttggaataggaaagatagcagaaaaaggacaatttgcttcgaagtgagcaagacgcctattacataaatcaaaatgcgaggattaaaatgctaccccaagattaagggtgaaacaagtcatgtacgatggaggcaagtgtggaagatatccaagtatatttaaatatgtatataaaaataaaatacatctaaataatagaaataagagttgaaagaatgatcttgggaaggatcgaacccaagaccttttagacaaggtgagaagaatttaccactacaccaaggtgatgattgtaaagtgaaattcaagcaaaggaggccatctatatatagtggacacatcctcaaaaaatgtgaagaggataaggctcccacttcaatcgagcaagaaccctattaactcagtcaacaagaacacttaaaagaattcttgtagactgggggacaagtactaaccccaaaaattggtgcttataatttttgagttaatctgaaacaccacgaggactggccccgtgacgactcctgaatagagaaagacatggaagaaggccaggagcagggtgcggtgtgagggactcacatgcgagctgtgcgaagggctcacgtgcaagtcgtggtgtgtgtacattgtgcgagccgtggtgtggtgtgtgtgtgtgagggctcgcgtgcgagcccatggtacatgggggctcgcatggaagcccatgtgttgtgttgtgtgtgtgtgtgtgttgtgtcgggtgtggtgttgtgtgtgtgagggctcacgtgcaagcccatggtgcataaggggcttgcatgccatgtgttgtgtcgggtgtggtgttgtttatgtgagggctcgcgtgcgatctcatggtgcatgggggcttgcatgcaagcccatatgttgtgtcgtgtcgagtgttgttgtgtgtgtgagggctcgcgtgcaagcccatgtgttgtgtgtgtaagatgaagcagggatggaatttgaatacatggtgaagaaaatgtcatcagaggaagaatatcaaaggacaaggtgtggaagaaaaaagtttacgaccacgtcttttggaaactctgaaagtaaggaggtacaaatagtggaggcactacacctgcaaggtctgaggacccataagggtacgttgcagccaccacctctgcgacctaggaccacctaacaccaaataagggtacgagacgcaacgaccacctcctgcacttgtagtttgcagatcaaaagcgacaatttgtctctttgggaccactatataattcaagttattagagcttataaatatcttattttcaagtgtgagagggggttaaaaaattaagggtgtaactcactgaatgcaatagaagaaaattactctcctactcaaaaattctcttaaccatttaaatttgcattttatttcacttttattttatttatgagtttaacgcttagattttaattttccaaccacaagattagttaataaatttttaccgccaacaataaattataaaacttgtgagaagactcatcaatatattaattaatatttgtgactctaaaattgttgtgaataatttttactatgaagtaaaaaataaaaataattcatataatttattgtgaaatataggtggacacaatttattttaagaggtatttaattattttctatttattggtgatgtgataagttgccccactaattaatggaatacattattgtccttaatgcatgaatgcatggggacaaaacgtacggcacaagatattaatgctaaccctaatatatacgtagggtggtaatttgtgattgtaatattatattaattcctattagatcaacaatacattttctcgtgtaaaaaaatctcaactttaatccgatttgttatatttaaatgttgattatggagaatattgttccacatggattaaatgtaaaaatattgagccatatataaagaacatggactattccactcattgtcaattagttttgagatggaaccccataattctcaatatcgactatactcatattgcatatttatcaatacaataaataaaattattaatatcaactatacattatttatcttatattcttataagtaatttttttctaatttatatattttcctataaaataaatattaatttaactataaattattattttttctaatatattagattataaatgagtcaattcgtgtcacatgtgttaactctagcctaacccaaataaagttcgatccaattttattttcataaccctgacccgcaataattcataccaatttcatatcgtattgtcatgtcaaaacttaaattgccatccctatatagtgcctatcttttctctagtctttgagtattgctattattaaatcaaatgatgtgcgatatcacacttttaaggatgttaggtatcattgtgttctttaacatttctcaaaatgttgctataagacactagtagtgcctaacactacctaaagacgacaccttgtaattggtaatgatattctacaatagttattaaattaaattaatgtgaaatccatacttaataattataccaataataatacttaaattaaattatttttatgaaaacatatgaataagaatatgaatgaaataaaataaaatttaaaatgcataaaaaaattaataaaaatttattaaatattttatcatcatgtattagaatggtatttttttcattttaaaattaaataatcattttattaaaatggtgaaaaggtcattcaattggaatgacattccaatactttaatatacaaccaaacaaataaatagaatgaaaattatttcatttccattctattctattttattacctctaaccacacgccgcctagatgtgctagactgttgcgtgccttttagcatttctttatactaataatttttttaattaagttcaataataaatgtgtgtatagttttggtaaaaaaataaaaacgaaattagcttagcgttagacaattgcaattataatagtgattattagttactacctcaattaaccgatttaatgtattataaaatataaatgatgatcacataacaagaacaatataatacattatagatcatatatatatatgagtatataataattgtgataataaaattatataatgaatgtgttatattattaatcttaattatatataattagaagtacttttattacatggttaattaaaattaaatacacattattgttatgtgtaaaaagtagaatagtgtaagtgatatctttatatatatatataataactttatatatatgtatagctagtgtatatatatatatatatagatatattagttggtacacaaatctcttaataaattttatttttataattaagttaataacgaagtagtagtacacattgaaaggtgctacattaacaaaacacacacactaattaaggatgatcataataatatataaaaattaataataaaagaaaaagacaaacttaaaaaggttggtcttgttctctatatggatcactttattattaatactctctctttctttctaaaccttcattcacttgatgctgcaaaaaaaagaaaaaaaacaagataaagataaaataattaataaaaatattttttaaaaagtatatatttttgtacttaaaaaaaaaagaaaaaagaaaaaagatttgggtatataataattatgacaataaatagactatttctaatcactaaagcacattttataagtttgtaatctttttttttcttcctttatttaataggtaatttttttcttcatattaattagtgaccttgagaatatatatagtgtcaaaaatgaaatgtatattacttaagtttaattaattattcttttatattaatctaagcacttaaattaatatatgatacatagagttaagtagttaaaaccctcaataatgtgaacacataatattgcaacatcatatatagagaaaaacaaaaaccaaataaaataaaatgtattctacctgttgcagttggtggaggtgctgattttaaaaggaagggaaaccccacaagccgaagggaggccaaacgagattaggtttaagtccgggaaaattgcctgcagcactaaccaagcacttgcacacagcctgacggtttgctgtgttcgaagcctgactatttaggctccgaaccccattacagcatcccgtcgggacagcacccccagatctcaagtaggggatgcatggtgctaccgagctagccacttggccacatgttatggcttgggctagcggtgcaccaacaaccatgcacatgagtaccacacaagtggtgagcttcatagctaaggacattgccatttctctcaaagggccaaaagaaagaaagtactatatagcaaaactaagtagtgtatagattttggtttttgggtaaaaggttttgagttatttgtggtaagagacttgggtttttgtggtgtttatataggaaaggaaaagttttgagtgtggtaaatgaatggacacgtgtcgtgtgtgtgttggagaagagaaatctgtgtaaatgtcggtaggtaaattgactttaatgagcaatttttgtttttttactagtgttgtacttttttttaaccactagtgttcttgttttttacctatctctaataatgctagcggttgggataattaattgaatgctctaaatgcaaaagggtgttgtgttaatataagagttatcaacaatctcttttggtagatttactgtaaaaaaaatttacttttactcacaagtttgtgaaaaaagttcttatattgtgattaaaaaaatttgtggctaaatatattagtcacaaaaattatattttattgtgactaaatgtgattttagtcacaatacttgttgtgactaaaattaaattagtgacaactttatctaaatgttttattttagtcactattaagtttttgttgtgactaaaaaattgctatcaaaataattttttttaatagtatttgttaattattattccttttcaaataaataaataaataaataaatgaaataagagttgtaaataatatattaattaatgtgcacatgtattcaccaaaaaaatttaaatgacaagtcaatatataacaggtcctattctaaataaatatgatttttataaaatttattggaatttttacacactcaaaatatcacatttttaatttttactgacaaatagaattttaaatatacttacggataataattaattttttaacaaattttgtttttaattgcattttttatgtaatttataaaaataacataaaaataatgtaaaaacaatatctattgtaatataaatatttttgtggtaacgacatatccataattttgtaataatgttgtttttttttttttt

SEQ ID NO: 225234 - DNA, 4692 bp, Cannabis indica
aaaaaaatgtagctagaaatcgtacctagctaattgttattctatttgtcataattaatgctaaataatggtggagtatcttcatctcacataagagaaattttgagctaaaacattattatttggtctcaaaactttattaactatactattttaatttgaagtaaaagtcatactcgttaatttcaacatgcagggttaacgtaaaaaaaaatactgcctaattaacgaagagtaaaaataaaataattttgcaacttctttagtcgaaaatgtaaaactctgttttcacaagctacattaatgttgcccccaattttcaaaatattagatttggtgaccaaagattttcaaactgtacttaaaactcgtacagaatctgtaccacaaaagatcaataacttgacgaagtaaaattgggtaagaaaaaaaaaattaaaatagtaataagagatgccttgtttgtacttattcccttttggcactgaaacgaaaccaagaaacattcacaagcatgatgaattacgttagtatagtttagcatttaggtgtgatgtataaatcatccagaagagtatctaattcagatgtattttatgtttatattattggactattgagacagtgacacttaattaagagactaaaccaaacattttattacactgaaaaaatttcgaagacaaatgaatttttattaaaatctatcatcatgttgatcagcctagttgataaggctacccacttagtccttaataatgaagcaaaccaagcagagttaagtgcctctgttttcaaagttgttttgtccaatttatccactttgcaatcaaaattatgccagaaaattaagcaaaaaatagtggtgaaaaccgttctcagagtcaacacaaaggagggagtgaattcaatcatatatatatttactagttgctagaaaatgaagcaaaaatttgtggcagacaagcctgtatagaccattctaggttcgactttagaatttgtggcaccaaacaaaacttagtgtaagtggcttaaagcagcccactgagaaacttgattttagtatatgttgtcttattacaacaatggttaaattatattttctgcaactacaaacgtattggtaagttaagttgcactgtcactacacgaaatccaactctgagagatcaagcatggagtaaaattaactcaattggttcaatgacactgcaagcaatgagtatgatatcatcttcaagatttcaccgacatataaatggaggcttaagaactataacccattattttatttttattttttcaatttttttttatctatatatataaaacaaatatatacacatttatatatgcagaacatggtttcttttaagtgcatcaaacaaaaacttagggtagaggttttcaattgtgagattagtaccaacagttgttgagctaaatagaaagccccaaagctattaaggcctaccccaccttccatatgtttaacacatatggaggccttaataagttggaattggtctgtaacgcaatacatcgaaactaaatcatcaatcatgccttttttttcggaattgtgagatggaaaaaaataaagtttacttattgtgtaaaaccataaatggtcgggaaaaatcccttaatagtcatgagaactattaaactatatttctacatggtatactcaacagtataatttaaagcaacaaagaatttggaaccccaaataaaggggaataaaagaaaaaacaaaaagttgcccacagaggcataatattattgaatcattaaaatacaggagctacaaaaatgggatgactgcatttataaaactttgaacactctcttatgtattgctttatcacgtctagtgtggttttgggacatacccatcaacagcaaagttgcgagtagcggcgggaatagctaaacgaactccatctagttcgggttttgcaattacttggcaaccgagacgagacctataaaatattaaagatgattttaatctttgcttaacaacatcaaagtatagaggaatgaaattactaggcaagtttgtgctctcacgtttctgtgagtgcaaaagccaaatccaacatgtcattctcctcatctgttggctcctctaatttattatagtactccatatcctacattataagcttcatagattagcattgaaaagcaaaaatttgcggataaagaaaagaaaaacaagttaacaaagcaggaatatttatatcgccaaacataccatcacaatcacatgacaagttgaacatgcaagtgagccttcacaagctcctgatatcaaatttgaagtagattgttagacttatatacatgaactaagaacatgctagcattagaataagtcaattcttatggtggaaaacaagggatgtgcaataactaagaactcgctaggattagaataagtcaatactatggacaatagtagttgctgaataaaccaaagtggcaaaaaaggaacaatgcactacactactttagacaggcatcagaaagacagaaagttcatgccttcaagttcaatgtcattttgatgagcagcttctaacatagacattccaattggaacctttatatgcttttcctctccatctttatccacaaatgtcacagaaatcctgagaagacatagagaatggggaaaaaaactaagaaaactgcaaatctcaatcagacaataatgtgtttcaccaagaatatttatgcaccttattgaattgatgtatattacagtcagggacggacccattaagattgatgtgggggctatagccccactaacaaaaatattgccttttaaaaaattaaatgtaaattttttaatttaaaaattaaaggcaaaaatagtagaaaagcccccacaaaattagataattttggtaagagtgattataatgtagctataaatattttttttaataaataagcccccacaaagtaaaaattctgggtccgtcactgattacagtgaaatcataacaaaatatttgagacttaaattaaaaagagagtaacagtgcaaattacaccaactttaatatccaattgaaaactaattttcaatgtctactacggatgatacgagacaaatttcttaactatatccttcaactaatagtgcctcctgaaaaactatgttactctgtatagtgaaaccaaacaatgaaagacagcaggattacaaagtatcatgaatccatgtctttacaattacaataaccttagtaatctaaaaccagagaaacttacttttcttcctgaccactcccttccggcaaaggattcttatctgttgctgaagaaaaatgacaacttttctgaaagattgctcccctggaaaccttgttttctgactgtttaaaatgtttcaaaatattaacaaggcacaaacgtcatgaagatcggaaataaaggataactttaatctctctcaaaagtaaagacacctaagtcaacataacttttataagtgtatgcagcacagtatacgtatcaatatacaaataatgctttctttccaaactcactccccaaattactatattattgcaaacacttcggtatggatttttttcagtcttttgtaaaaatcaactttacactagtgactaacctcattgtaaaaaccaaaccaggattttgagcacagctagtgcaaagcagtgcagcaaaatacaatgcgtgtctgtgtatataagcttgtgtctgtgtttatatataagccttaaaaaacataatacaaccgttcactttcaatgaccacaggcaacgaataaagcccaaaagaacacaaatcatagacgatataacaacaaaaaaaggagtagagaaatacatttgctacttccaaaaggcaaaaataagataactaaccagtttttgtaagaattggcaacaacggctctgcgtatatctatctctacctactatactagtttttcctgacatagagagagagagaataaaactgtagttggcaaatggaaaataattatttccccacaaattctatgtggtgcgtcaattatttactaattacttacttcaaatagaatcagaatgtgatcaaaagaagccgaaatcgtaagaagaagaagaagaagaaattgggaattggggtttgagcattacctcttgatagctccttaaccatccaaattccaactcttaaaaatttggaattgaacataatcgttgaagctcagcgagtcactactggacctgaggaaagtgaaaactaagaaatgaaagttttttcttcaatgattatataccaaaacaacaagaatagagcccgtgtatggagttttctaacgaaaaaacgagcaattttgaaatttcacattctccataccatagaaagaattgggcgaaacggaagaatgaagataaagaaaggggtaccttaagcgattcaacggatattagcaaagcacgaaactgaaggtttcagataacgaagaaaaccttcttcaaagggtggtatgaatcgggggcgcgaagcttccactccagaataaccctacaaattttttcttcaaaataaacaattaattgccatataatatttaataaatacagctacttccatagaaaaatatttttcttgggcacaaattatctagtatattatttattttttaaaaa

SEQ ID NO: 225235 - DNA, 2811 bp, Cannabis indica
aactatgctggtaaaagtgacatttcttgtagtggagccagtcgttatttcaaaaattatgtgaaagacgactaggatctcatcaactacagtttttcttctgacctcctctgccaaagtgatgatttaatgttcttagtaagctccctcacatatcttcttattcctttttccttcttttatttacttcatactctaacgatattacatgtctctcttcaggctgctctgatagctggcttgggcttccaagcccaccaactgaatgctacctctctcacgcttgaactaaacacatcacttcaaagttgtgaaactcttactaacgagagggattttgttatcggggaagcgaacaagttaaagaataaaattgaaaagctcaaaaccaaacacgaatgcgatgttcaagaaaagactttgagaattaagagcttaaaaaaaactttacaagaagtcacagagaaagtgaaggacttggaggtaaaagaatatgattccaagaaaatggtgaaagcagtagctcagaggtctctcttcaaagtttcgtaaagtaacaaaggaatcaatctcaactttttgcagcctaacgtagaaaagagtgtttctatctttaagaaaatgaaaccagaagagaaggctgcagagaaggaaaaacgagcagcggaagggattggcgatattaaagaagaaaaggaaaaacgtggatatttaatctctcaatgaaagtatcaaaccgttaactcagaattttgttaacattaaatgaggcttagataattaatactttgaattcaagaattaatacaaataataaatgcaatctataaataataaatgtaaaataaagaatttttaacgtgattttttagttagctctacacactccacgagttcttcttatttataagagtattaaagaaattctagaaccaaaatacaagattagtagtcttcttttgaaggaaaaaaatggtcatccatcttatattgtttttcccctatttataggcttaacatagcatgtacttaatcctacatctacaacgattcatgaaacgtggataatcttcacgtttcacttatctttaatcacatgcaagaaaatacacacttaaacattttttatttgaactacaaggaaattagggttatgtttaatcttattaaagacacgctttattgaatttgaggatattcaatctcgcattaagtttgacattcctctcctcattaatagcatataggtgtcatataacttctgatgacgtattatttgttccaaatttacttgaggccctattcttttctttattctattagttgttgtattgtcgagaaatatgattccttctcttcttgaggtgtttatgttaaatatttagtcaatatacgagccaagttatattgccaaatattaatactcgtgtcaagtgttgacttttcatattgattgcttgaaatatgggagataacatatattattatttctattattaatgtatccattcatttatttctaaaaaaataaattaaaaaaaaaaagttagagaagaattacaaaaaaaaaaaatacacttttcataaaaaaaaatacaaaaaaataatcaagctgtgaaaactacaaaaaaaaaaaaacttgattgtacaaaacaagctaaaaacgttaattttgatttgcatatttcaatgcagttgatatattgtttttttcttttttctttgtagatgttttgttttgtttttagtcgctgtctagttcttttatagttgctttaagttgtttcttagttttgttttttttttttttacggagacaccgtatttttattattttaaaaatctgattttgtaaaaatgtaaaaggaaaattaaatcagtaaaatttttaaaatagcatataagtaagtatttatgtaaaaaatccaacaaaaaatatataaatcaaaatttagtataaaggcccatataaacccatgtagcttgtgaacttacacctgtaaacctgagcccaattctccaaataaaacactggatttcaaaagggctttccaattttagaagtgaaagtaaatgttcttctttccatttctaaagatgtaattgagaagaatattctcaaaatgcagggtaattttttgatattatttcaatttcacctttgtgatatctctatacttacttactacattggacatttttataagaataaaatccatctctctatagaaggtataagatcccatatctcatcacttgtactatatatgagagttttacaaagtattagttagaaaaggaaaatgaaattatagataggtagctgtccttctgtttttacaaaacaatggatcaagacagacacgtcactactcccacctccaattttaattcatactcttccatatataacacaatgaatttttgttctaccagcaatctcttttgccaaatacagtgcatgcaatgtaagagtccactggcacaaattataaggcaattaatgcattgtgtcttaaaacggattgaccacggaaagaattaggttatgctaattggcggtagtactgtagtaaatactgatttagttttttgacaccacataataagattggtaccgaaacaatgtctcacaaataatatggaatttgatacaactacgcgcgtaaatacaaacatactaatactatcccaaatatatgtttggttaaaaaaaaaatatatatttttatttttacagttcaaaatagtttttttttttttattaattttacggaattttatatagaaactcttactgcaactagcgct

SEQ ID NO: 225236 - DNA, 4039 bp, Cannabis indica
ttttttttttttctatatatatccagtggtcaatttggagctattgatttcctatggttctgcttgtaaatccgtaactagtttacacattaattcaagaaactcagtaggtttaaagataagaactttataattaaccccccacccccaaaactgtaaaaagaaaatacatttatcaaaaatcataaatggttttcatgtaattcatactaaattgtaaaattactggtcaatttcaaccatattggcctaagaagaaaaaattattatgtaaataaacaagaattttagcttagctttttggaaaattaagaacaacagaattatcctgaataaatttaatagataagaagatgtaaaatagaaacacacctcaagatcttgatgaactgcattgtctaaaagtcttgacatcaccatgttgtcccacagctttcttgagcttataataataactattgcaataataataataaagtgtataataaacttaaataattaatcttatacacaaagaagagatcgagatagatcgattcagacactaaacaaaagaaattatataataagttcaagaaagctgtggaaaagcatgaccaagactacccttttcagctcatatatatgaaaagctagctttctcaacatatacatctcagatctcaattgtgaagaggatatatatatagtaaaagaagaagataatgaatttgaagatggatgagagaaaattgagaaatgggtagtttaaaatgaagcctcttatggaccactctaccatatataatctctgtgcaccagctttatagagaggggagaggtgaaaaagagagggtggggataatatgagtagggttttcactcatgagtgagaaagagagagaaactgtttattttgaggaaagagagagagagactactatgcattattccaattttacctactcaattaatagtataactataataatattatttataagattactaataataataagttaataacgtacgtgtcttctttttagttctttacattttctagctagtgagtgcgcagtagggtatatatttatatttatttatatataaatgtttttttgtaataattcatatgggtagaagatgagaaattaacaaaaatgacgaggaaaaaaagttggaaatttatgtatagatattagaatgataaataatatatatgttagaaataataaagaggggggaaatataaaaggggaaaagaggaaaattcaaaaaccatcccatccccatcacatggtggcatgtgatgaagatcgatctctttttattttattgggatttaaaggtatggggtgtttatggtcccccaatcgacatgtttcaattttattttatttttaaaatttatgtacttatatgcattagacttatgtatatgtacatgttgtgaatcatcaataatgtaattgtgtctcttcggctagctttcttgcttaaatatgttatttcatttatgtacacattaatatatatatatatatatatatatatatatatgcaccttaaagggacattagccatgagtaaatcatattttaactcacatattataactaaatacagtaaaaaaaaattaaaatacaaaaaaaaaatatcaatataataaacaatccttaatactaaatcatatcaaaaatatttttaaataaatataatatttataaatatattacaatttaaaataaatttattaatacacttttaattatagatttagccataaaatagtggaaatttatcttgtcttttgacatggttatgaaattctctctaaagtggtaaaagtttgtttgtgtgtttattctgttttattgtatttgttcatagcttcatcgagtacgttatttaaaaatattaaagatcagtatgctaatattgcaattgacggggaggatgatagtgagtttgcttttgactttgttgatgagggtgaacaaccggttgatgagcggtggtgtatcgtggcgagattcctgactgaacatgctattgattttgatactatgcgacatatcatggcatccctttttcaaccaagtaaaggaatgtatgtcaaagaacttgagccaaactgatacctccttcatatctatcatcaacttgatattgaaagagcgatagaaggaaacccctggatgtttaatcacatacaatttgttttcgagcggctacaacatggtcaagacccacgatctcttattatcaataaacttgatatgtgggtgcaggttcatggtctaatgccaggctttaaattcgaacatgtgctatgggagttaggaaactacattggtacatttgttaaaacagatcctaagaattttcaaggtatttggcgtgactacttacgggttcgggtgaccttggatatatctgtcccgtaaaaaaggaggaagaaacttcgaagaactgctgctgaagaaggattctgggctttttttaaatacgagtatgtcccaacgttttgtttcatttgtggaattttgggtcattctgataaattctatcctcagttgtttgttttacctgcggatcaaattgtgaaaccttacggagttgctatgcgagcgcaaccaagatggaggaaccatctgatcggtgctaaatggcttcgtaccagagctgaagaagacatgtcctctggtgatacttcgagatctaatgctgtaaatttgacagcaaacagaaatctcctgcatatataatggaggaaatttggctagaaatcaggagaaagttaatagcaaatcaggtgttatcttaaggaatcaatctgaaggagacaagtgtgggaaagctataacacacaatattcctttgatagttggtcatattgatatggggcataatgttgagattggtgaggactcacaacttaccatattggatatcaaaagaagaaggactaatgagttaatgtctagtgggccatgtgtgttggatctttctaaaaatgggccgactgttatgtcagcacaagataaaatggaggtctatgatggtgatgttagtgacaatggggcttcaaaaaacggattgttggtgggtgctggtttccaggctcaccgttcattatgagtattttgagctagaattgctggggacttaggaacccatgggtttttcaattcttaacggatcttattatccgaaagggtcccaattttatcattctctgtgaaactttatgtcagaaccatgtgattgatcgtttgaaagtggttgtgggttttgagggcatgttatctgttgatgttagaggccataatggcggcattgctttgttatggagattcactgatgaagtggaatttcttggtacctctgttaataatattgatttaaaagtaacaatgatcagaggtttgtttctgcccagctttttaatctcgaagtattcgtttctgatcattctcctatacttcttcagttatcgtctcagcttttcaccaagtcgaatgctcactttaaattcaaaaatacctgactccgagaacctctttgttgtcaggttgttgctgactgctgggagatgtgtgtgggtcggcctataatagaaaaataaaagtttgtggggagaagttgtggggacgggattatacaggaaattttcaagatcacattgctgcctgtaaaaaagaattacagaaattaaaaagaagcaaagatcatgattcagttatgaagtataaaaatgcccaggcctctcttgctgagatttataatcaacgtgaagtgttttggcggaagcattccaagcagctttggcttcgtgagggtgatcaaaatagtaagttttttcatgccaaggccacttctagaaagaaaaacaatactattcactctttgaagaacaattctggtgtttgggttgattgggaagggggtttggctaatgtcattgtccactattttgatgagttatttacttcttctagtgtttgattatcattgtgtgactgatggcatttcacctattgttcaagcttgcaaa

SEQ ID NO: 225237 - DNA, 2359 bp, Cannabis indica
tcatcatcatcatcatcataggtactctgaataattattatttgataatttttaatttggcccaatgaaagatggtttttcatcatatatttgatgacaaaacttaagtcaaaacctcaaaatgttggctaaaaaaaaaaagaaaccaaggctagctttgttaatgttttcgtttcctaacattttgagatcttttaattgtgcttgtcatgagtgtaatgcttttagagatctgtttgtgcttttgaatgatccctgttttccaatcttgaatgtgtgttgttttttaagaaaaaagtttgcttggctactttggctaccctactttgcttatatatagcattttgatcggtagttggtggtaattaagatggtggttttccttttcctttcaatattgttccaatctctcttaacttattttatttagattattgatggtaaaacctcaattaaaaattttagtggcgaaatccccaatattagtttactgttttaagaacaacgtaggagtaccgaacatcgaaatccaaagtatataagataaggttgatgtagttttcgaacaaaatatatagaatcttgatattaaccttataaaaaaaattatgcagagtataacttttttcttctttcttttttacatgtgaataaagaaagaacatatgaaataaattacatgaaattgttttcaaacctgtctgtaaatatcatctaataactcatataaatattacatggaaagatatattataaaataaatagtagctatagtactgtctccgcagctagaggttgttggttgttagcaaatatacatctgattacgtaataataattattcataaaaatgagggaatcagggcaggcaaaggaagatccgcaagaatgtgccttaattttatttatttatttattttgatagagaatgcgccttaatttagcacccaacaaaaccttattattggatttttcgtgaaaactttaaattaaaaatatacaaaagtgacaacatgagttgatctttcagatgctttcatatacattttttttttacaaaataatgataattaaattaatggtttaagacgtcatctctattactataatatattcagcgcaacagagctcgcaaatagagacccccactacctcaatatatacaataacattttgatttttttacttttggtaagaaaaaatacacaaacttggatgcatatatacaaccttttcttaataatgagccacatgtccacatacaaacatataaaaattcataattaattggggaatattcactcgccatcaactcatcattggctctatcttttctcattatacaatatatatatagggcataactactgtacgggtggccaaattttcgctacgggtatggaaactttttggtccattgataaaaaaatagatggtgattaaggtaagcaatataatagttagcgtaaaggttagtttaggagataatttggtatatttgttaataatattttatcattatcttttaaatttactttacatttgagtataagtgattcgttaacattttttacttagctcatgtgaatagattagactgactccttctctttaattccttttaaagaaagagaaagaattaagaagaaaaaaaaaaagatttatttttcattcaatatcgttttgttactttacttcaattatgttctcaaaaacgcctgatcttgaactagagttttcttaggtcaccaatttagccttagtgagatttcgcccaatttgagttttatctataatttccaaagactcaatatttccaacaaaacacctactgggtcacttttaaacttatgaactttaatttttttctttacttgtcgaataacttgattatcaaagagttgtcggaagttatagtaaatattattagttttcaaactctgaatctctctgataatgctttagcgggaattattccgaaaataaaagactgactcgataatagaaattttcaccacatctaaccattcttgacctcattttaagtacctcttaatttgtcatattgatatgagaacaaacttaatttctcaatgatgtgttttttgatactattattattatgccttagaagaaattttgtgtgcatattgaagaaaaaaaaaatattaaattatatcctacaacatagtctactatacttggagtttatcttagataatcttacttttctaatccagtcaacctcataccataaggataaaatctaaagtcgaaaagtacaaattctatatatctatattctaaagtgtgcctatataactgaattcttagtttatgaaaaattcatgggtgactt

SEQ ID NO: 225238 - DNA, 4682 bp, Cannabis indica
gattcggactgtattgcttgacttttatttatttttgttctcctagggaaagagaagagggtattatgtgagaataatgatggtgatgaggtattcagtataatgtgaattattttttcttgtattctaaggatggttcttcattagctgcttcttttatcgattttctgtattatcatgatttttctctcaactcttgctggttgattcaacttatcaggatggggaattcccagtggtacaggaaaagaagcctagtaaggccaaccagagaaagaaatcaaggacccaatgtaactaacatactagcagttttgctctagtttttggccttaaaacactgaccagtttcatttatgatgtatgcagctttgcccctcctcctgctggtatagaagtttgtgcaaaagatgaggctgacagtaaaaggtttctttttgattttcttgcataattggcttgtttaattaatctcctactagaaaggaagtaaagctaaatgggatttggtggtttctaacaggcgttgttctagaaggctgtctgctaggttcaaatctaaagaattagaggaaacggattacttttctgagatagaagatgacaaatttcaagtatcttccttacttgatcaaccagttattgaaagtagtgaaatgctttcttctcaacatgatgatccagctgaatcaaatggtcagttgtcatcttctttgcatggtgatctagttggtgcaagtggtcaaacattacaaggatcaacattagaaaaagatgacaaaaatacagccctcaattcagcccaaggatttaggcgatcatctgttggaagaccgctacgccgagcagctacgaaggttcaatcctacaaagagttaccaattacagttaagatgcgcagaactgagtgagtatcttcttatggttctgcattttaatagcagacgtaaaggagttctgtttgatattgtagtgtcttttgtacaagtaccagcttctaagtaaattctatttgggccaatttcctttacatcctcagttgctcaatcgatagattcataaaattgtcccgattatttgattatgatcattgtaatacatgcctttaatcacaggttaatgggaattctttctccttctaatacaatgtagtccttccattatttatcattaatttcataacatcagcaaaacttgcattttggtatttaacgtcgctcaacggatcaaaggtacgccggggataacaggctgattaaacatcatttgagcatgggttcatttgttcctaaacactgaaagaaaccctcattctgttcttccatttgttgttttagactttagttgctgtgagtttttaatgttcttaatgcatgtgccatctttgctagcttcccatttgaataaccctcactaactctgttgatacaacattcaatccttatttattctaaagtcatcaattatgctgtaatttttcaattgttagcttaatttgttgatacgcccactaactttgaaactgacagtaagtatggaacacatgcttgggacatatgcttaatctaacaagtctcagcattctattctatactcccattattttctaaagataaactgtttgagcacatgtgccttaaaaattgttaactaccacaaaaaaatataagttaccagttgagcagaatcaactgtttaattaaagttacaaacatacaatattattgtgtttgttttcagcctcgaacatagctgcctatctacggatttcaacctctgacaataaatgaagccaacattatcttcgtctttgtcatgtcaagagcaagtcgccattgtcgttctattcaagttcgagctacagtcttgtcgattttgtcactacgaagacctctaagataaatatcgccctcacatggtcatttccaagttcgaaatattccatcaacttcatcttcatcccgtcttagtcaaaactattatttacatcatcatcaagcttgatggaagaaccctgcagtggtcttcatcttaaatttattttaaaaataattacttgtaatagtgtggcgccaaacttttaaactagttagtgttacagccaataaaaatattgtaattctcacaaaaaaacttagctagcttcactacaaatatcccagactcaataaaaacttttctgttttaaaaaagaattatacattaaacttaaatccaaaatttaaattagataaagggaaccaacaaaaataaaaattaaagccgaatcttttcgaataattttaatgggaccgattgagaccgagtagagtagggaaccaagtcctaaaccaattgagaccgattccaagtcatatgtcatatcatagcatttttaagttaagtaagctaattaaattacatcagcaaaaaggggtcattcttcattatatcagtacttgtagtaaattttaattaagtacagctggttaaatattcacctgatttagattaaaagctggaataatattattgtttattaggtggtagatgatttgaatgatcttatgtgaggagtagagtaagggcccagcccagcactgatcccactctcacatgcatgcaattgtaatacactaataccgaagtgaccggaagaaaaaggccgaagctgcaaaccgcgttagtgcacgaatggttgaaaaaagagagaaaaatgattagtgaaaaccaactagctaaggtggaaagacacaaaagcaaaaagtttgttgatttgaagtgatttgtagaacgttcattaccgtttgtagtttttttctaatcaattaattatgtagtcaataatatttgcttataacaagtaaacattttcttctctttccttctctaactaattttagtttctaagggtgttgttgacatagagtttctatgccaaaaatgtatatatttgtgtacacatgatgtgtttaagggttacaaatcttatttagttgtcattcttacaaagaagaaagacttaaattaaattttaatgatcaggggtttatatttcccaatgagtcctactttaaattaaaatgatagttaatgttaatcccttctaacatttaattttatattcttttcaagtctattcctaatttttctccctccaactcaaactcacataaaaaatatctcattaggtaacattcagttggaaggaatgaaagcatagttataattagaatgacattctaatactttaaaatgaaaccaaataaaaaataaaataattttttttattttttaattttattccactttattacctccaaccaaacatcatcgaagttaaagttgaaggataataaattatttctaccaccctttgaacaaaatcattataattaaatacaattctaccctttataaaaagttttctcgaaaaatttattcacaatttttaacaatataattataaaatcaatttttaaataaattaggattaccacgaccggtgataatgagtatagttgtaaatatatgcgtccgacatatattttgaaaagtccacaatagtatgaatcgtgccgtgccaacctataaaaagatatgaaaatgcagtgtcgtgccaataataatggtaagcccgacacatcacataagcccacatttttcgtgtcgtaatttactcatgatgccctgtttttcataaatgggccagccattttcttatacgggtctaactcgagcttcactttctcactattttatttacaattaatgagttaattactaaattataaatatttttttatagcttcaattatttttatattatgtttcaacaatactttacacataattataaaaaaaataattagaatgattaaaatttgaatatttattggtaaatacatatgtattattattattattattattattattattattattattattattatcaacttataagaatttttaacgtgttgtgcttttgaattagtctatttgtacttacgtgtcgtgcattcaagtttgtcgtgctatgttgtgtttaagtctatttttttgtgtcgtgccgaaacaatttacaatatcatgtcatgttgttcccaattccatatttttttcttgcttctcgaactcgtgtcaatttgtactgtgtcaaaaagctcaatctatttttaaagctctaattataaataaagtgagctaagaaatgagtatcatttctgctattacggtgaaggtgtttcgtgtttttcatactttaagaaattatatgtaagttttctttttaatttattgtatgcgtgtaaaataaattggatatgcatattattgaatgtttaaattctattttcagtattatattatttaaattcccaaaaaaatacaaaatatttagtatcactataatgacatcattgtataataaaaattatataaaaaaaacgctaaaaaactgataagttcatcaaagaacttgtacatttatcatttaggtaatttatgacgcaaccatcgttcttcacaagacgtaattaaattaactaaactttttttaggtatggattagtgaatatgtgaatgtattatagctttttgggtttgaatctccgtaatattgttgtgttgtgcatgtgaatatgatgaacctttctgcatgactatccaggtacgagaggacccacgcgcaaacccat

SEQ ID NO: 225239 - DNA, 3686 bp, Cannabis indica
tgtaagtacctaaccgttaaaatattatgtcattatccacatgtcattttcttattggtatattttaattaatttttttaaaaaaaataaaatttaatgactgagaccaattagaaattgccacgtgccaatttatttaacaattaactgtcaggtacctacaaaagttctagaattataacttaagtattattaccgccaaaaattaaacttaggtatttatttgcaactgggagttaaatttaagtatttataccgcaaattactcttccaaaaaatgtttaagactttatgttgcagaatataatgcaatcctcttttaatttattgctttccattattttatattcaagaaatctgttttgtcaatattgctttcttaataaagcctcaacaataatttaagagattttgtaatatcatgaattgaattcttcttattataaatcaatacaaagccaaaactacaggcaacaaattaacaattcatgtaatgggaccaattttcgctgccttcagtaagaaaaaactttgaaccagtgtatgatacatcttcatttgattcaactcagttattaattaagcacatagacatagtagagatgttgctcttggactcataggaagcagatgacatgtcactaagtagatgagaactctggctcgagcatgactctgtatagaaaactatgttgtcttgattttcaacaaaaagttgtatagaccgtggaactggtggaagttccatcactattatcccctcaagcatttgaacaacacaccccattgatggcctttgagtttcgttgtcttgtatacaccaacaagaaacaacacaaactcttctaagctcctctatgtttgcatttccctccaatcttgtgtctaataggctaaggacatcacctccttccactattagcctagcagctcgggttgcgaagaattgtactttcccatcttctgaaatctctgagtttctctttccggatatcaattcaaatagcatcattccatagctataaacatcggctttcggggttatggccactcctgcaatccattctggtgccaggtaacctcttgtccctctcatggttgttaaaacacggctgaattctctgcctacaagctttgctagtccaaaatctgctattttaacacagaattcaacatctaagagaatgttttctggtttaatgtcacaatgtatgatacactctctacatttctcatgaagataaaccagaccccttgctgtcccaactgctatttcaaatcttgttttccagtccaaaacatttgatgagtcattttggcaaaaaagatgtgaatctaaagagccatttgacatgtaatcatagaccaataacttattagtcccttgagaacaaaatccacgaagtcgaacaagattaacatgttgaagtgtcccaattgtgctgacttctgttctgaattgcttctctccttggtgaacgctttcaagcttcttcacagctatttcagtcgagtcatttagtttacctttgaaaactgaaccaaaacctcctccacccaatttctctgagaagttcttggttgcatactgcaaatctctgtaaccaaaagctaccaatgaaccgcctgctaatgttcccattccaattgtttttcttctatgtctcaaagccaagtacaaaattaggcatagtaaaactattaagccaacaggagagcctactgcaacaccaacaatttttcccttgctttttttagtactttgaaactcagaagctgctagtcgaatatagagtgtccttccattgctgtcacctgtagcaagctgatttaggttcagtagatctcttgtccaaattgaacagccattattgttgtaagtataagctatgcaatggcaattgtttaagcaggtagattcacattctgtaatacttcgtactggttcagattgtgcattttctggcacagacatgcttggcacttctaaaaatctgtctttctcatcatttggaagactattgttcaagcaattcagttgactcttcctcatgcagccgccagagtaatctttcaaatcccaatctctctgagactttggctgaaaccccatcaaacattgacagaaaggcaatgagttctcactgcagctgccataagcgccacaaaaagcataaacttgacattgttgtcttggaaaagaccatagtaaattccatctctttgaaggctgccctaactgcttcatctgccctgaaacatccatcacaagtcgagatacaccagaagtgttatgagcatacatagtaaataagatatcactttcgtttgaaacaaacttgaaatagcaaataggatcgcctctcatttctgggaccaaggtaaagatgtctccagtccaaggtccagtggtccagtagctcctcgacctattccaaagaataatataaaaaccatcacttgggactagctcaaaagtgaagagaccaggggaaggatcctctaaattcttccatgaggtgagaatttgtttcctctttgttattttgttgaatcccaaactagctccaggaagccatgtatcagttggatagtcaaaactttgccataagagcttggattcatcaaattcatcgtctaagagtactatatttccatcatcttgaagagttgcccttacagaagtaccagaagtggggaagctcacatttgttgaccaaactgggatcttcaactcattgatgagaactaaattgctatttgatattatcagctttgatgaaaatctatccataactggtttttctctatttgccacccaaagtatggtcttgtaaggatctcttttgtaccacatgcctatataatagttcaaagtagttttacctggtgtgaaaaatcccagttcatagacctcacttgcagatactatggtctgatcaccagaaagggattggtttgcagttatggtttcagctccaaatgcaatatgggttttcaacactaggcacaagagaagagcaagaaacatgacttttcggtttgtattggtagccatggttgcataaaattcttcaggcactataacaaaattctgagtttgaaaagggaatggaccatagcaaggcttgtgtttgactttataagaaattgaacaaaggtacaacatccggcaataatactattttgcttatgaagtaatcggcatttgcatctaacaatgaaccaacaaggcaaataatatttaggtaagggttcattattacaattggtgttgtttcaacagattacttcaataaaagagtttcaagagtcaaaaattgtctaacattacgcttaatggtcaaaatttatatattaaattattaaatatatataatagtagtatttcatatatcatagaaatttaatacactatactaataaaattatataacataacaaaattataacaatactaaaactagaaatagaaaatttcaatgggcatcgtcatgaaatttattgcttattaacaatcaattgtaacttaataatattatgtcgaaaaataactgttaaaattctgtaaaccaactttataacagctaaatgaatatattaataaaactaaccatgctataatccttttttaaagagctttatgttagattgtggatatgaaacacctgcaaatatcataaaaa

SEQ ID NO: 225240 - DNA, 2540 bp, Cannabis indica
tgaggtactattactcattaaatagccaatattctgaatacagagtatgaaggacacttgtcacaacaacatggacaaggaccgcagtgaaagggaaaaggcataacagaaaagtataaaaggcacatggggccatacacagcaaaagaaagagaacaattacattagcaaagattaggcagaggataagcagagtaattagtcttcataatgtttcttaacaccacccctcaagggtgagggttattgtgtcacaccaagcttgtcaacaagaaactgaaacggagagtgtgatagcccctttgttaaacaatcagcaacttgatctgaagagggaacatattgaatgtaaagcttcttctgcagcactctatcccttacaaaatggatgtcaagctctatatattttgtccttgcgtgatagattgggttagaggcaagtgcacttgcactcatattgtcacaccaaactatggaggttgaggatagtggaaacttgatttcgttcaacagagattccaaccagattttttctgctatcacataagctagagccctgtactctgactctgtgcttgatcttgatacaacagactgcttcttcgaggaccatgaaactagtgtgtcaccaaaataaacacagtagcctccaaccgacttcctgtcgtcaggacaacaggcctagtcaaactcatgttgtcattgtgtttgatatgtagaccatagtgttgagttcctttcaaataccttagaatcctcttagcagcactgtagtgagttgttgttggacattttaagaacttacttagcttgttgacagcaaaagctatgtcaggtcttgtgtagacaaggtactgtaaagcaccaatcaagcttctatagcgagtcggattttcaagttcaacaccatcttttattgacagaggctttcctcctaccattggagaaggacagggctttaagtttagcatgttaaatttgttaagtagctctgcaatgtttttgccttgagtgagatacatcccagtgttgtctctataaacttcaatccccaagaaataactcaagtctccaagatctttaagagagaaagtctggctgagcgttgtgatgaacttttgaagctcggctgagttattacctgtgacaataatgtcatcgacatacacaagcaccataatgatgaagttgtttgttctgaaaacaaagaatgaggtattagcttttgaatgctgaaaattccattggatcagtgtgtttttaagcttgtcaaaccaagctcttggtgcctgcttgaggccataaagggatttttcaagtttgcacacataatctggtctatcaggatccacaaatccttcaggttgtgacatgtagacatcctcttcaagttttccatttaagaacgcattgttgatgtcaagttgtctcacctcccaaccttttgtaactgcaattgttaggacaattcggattgtaggagccttgataactgggctaaaagtttcaccaaaatccaaaccgggtctttggtgaaaaccttttgcaaccaagcgagctttgagtctttaaagtgatccatcagcatttagcttctctttgaacacccatttgtttccaacaacattgtagcttgatgatggtggtaccagcttccatgtcttatttttaatttgtgctatattctcatcagacattgctttagaccatcctttgtgtttcagtgcagcaacaacagatactggttctccctcatattcaatccactgagacttgctcatatagaccctaggtttaaaaacccctgctttagatcttgtcaccataggatggctgggccttactgtgctgacttctttttcttgaacctgttatgtttgagactgtggtgaattgttttgggaattagtagtatttaagtcaacagtgttttgagtatcaaagtcaagatccacatacaagtgtcctgtaagatcaagatgagtttgtggagttgaactacctaacttgtctggttgttctacaggagcggcctcttgacagctagtatcaggttgaggtaaggaagatgaagatgaattcgatggttcagcaggtgtatcattttctacatttgactgaagaacaggcagggagaaccaattattaggagttgtgacattgacagattgttcattttggtgtgtattgagaaaacctgttttgaaagggaattcattttcattgaaaatgacattccttgatatgtacaatctgccagttgagcttagacatttatagcccttgtgaggctcactatatcctaatttcacacatttagttgaatgaaattggaatttgtgactttggtagggtcttagacagggatagtaggttgttccaaaggtctttaaaatggtgtaatctggttttttacagtttagcacttcacaaggtgtcttaccaccaagcacagtagtgggtagtctgtttataagataaacagaggttgaaaagcatcaacccaatatttagaggcatacaagcttgagctaggagtg

SEQ ID NO: 225241 - DNA, 5866 bp, Cannabis indica
agtattttgtgatataaattcaaaaatcatttataagcgttatctttatacaagagtcaaagtatgacctttaatcaccctcaagttataaatatattatatctgccacggtttagggctcgaatcataacatatatcattttagacacctttagataaaaaaaaaaaaaaaaatcaaatcccaaaagatgagttataagctaagatatgtggagtaaaatccgcttgaaattgtttcacaaatttttgtgtcggtgaaagttgtcattttgtagcagtgtttgtaccatatcatctgaaaaaattaatggatacatacggatacatgttcaattaatacatttacaaaatgatttacaaattaatattgatcactcaaccgaacaagatataattttaatcatcaaaataaataagtatttttttcaaaaaaaaaaagtgtcttatatatacctttgtttttttagttacacatatgatatttcatcccatgatccccacactatggtcatttgagctttaacaccatcgatggctataacattacagtcaagttttagccttagagttcaataagagaaaaattatgatgaggacgacttcctctgtgaacaaatattcctagtcaatcttgcaccatagagtttcataatcagtacgtatcagttttgtcggtctcttcctcttcctcataatactcatgatcatcaatatcctttatattttttttcaacacaacaagactagtacttctctttaaccactccaccacttccaacatggttggtcgattatcaggactgttatctgtgcatttcatagctagtaaaaccacagatttaagctgatagagatcgaatttccctttcaaccttggatcagctatgtgatcaaagtcatccatttggagatgaggtgtgacccattgaacaatgtcacgctttactcctttggagagtttctccaaaggttttttgccacttacaatttccaagagcaatattccaaagctgtaaacatcacaactctcagatactttaccccacattgcatattccggagctagataaccaagtgttccttttactctagtagtcatatgagttataccatcagggattagctttgcaaaaccaaaatcagctacttttggttcaaagttaatgtctaaaagtacattgcttgcttttatgtctcgatgaatcatgtgtgggctgagttcgcagtgcaagtacctataatcaataattcaaaattcatatatgtattattaaacactattactgtgactgcgtgacatattccatattttaaatgttaaaattaagtaaaaattctagataggcacacagaaaatggtccaacatttgaattgtatctagtgttaaatttaagttgggtaattagaattttcgccgcctaaattttaacatgtaccaaattatgtttcttgaattttttttgccgttaaaaattttcctaaactattgatattgttagatttaaagatttttgtctaatttcatttaattttactatttgagtgattgtttatatactaaatcatgcttcctaaactttgatatctaccaaattatatcctcaaactttgacaggtactaaattatgcctcctaaattttttttaataaaattagataaaagtacttaaatcaacaatctcaatagttcactaagtatttttaaccactttaaaaattcaaaaaaacatgatttaatacataaaagttgaccaaaatcgagaatagccatttaaattggcagcatattaaagcatccctaactcgttcaaaaagaatctttgaatgattcaaaagggtttggtattatacgtcttttcatatgctactaagtttttcaaggcagtttaataaatatatacatgatttgacttgaatataaattaaaagtaccagttgataattatatatattatattagtagaaaagtaagaagataaattatttacttacgctaaaccttcggctgaaccaatgatgatattgattctacgagaccaatcaagaagacaatctgaggcaaggcttccgtgcaaatgtgtgattaagttatgattaggcatataatcaaatacaataagcctttcttctcctccagcatggtatcccctcagtcctaacaaatttttcgtgccttactcttccaacatttctacttctactgcgaattccatctctgcctttgctgtcatcatctttagtcttttcactgctatctgaatttcataattgatagatgtttaaattttaattctttcaaaattacaaaaataaaaaagagtgttagatatgagaattgcctcgacccctttactagtttgaccacgaaaaacacttccaaaaccaccttctccaatcttgtgattttcatggaaattgtttgtggcatgtacaagctccttcagagagtatctttcccaagagtaatccctattaacactactgttttctctatgacaagacaataacaaaagagagaaagatgatcaagttaattaataataattatctaggacatgatcataattgaaatactggccgtacctggtctttgattcttctttttcaacatctgaatcaacaatagtgcaacaacaattccatggcatctttgtagtggaagaagaagccaaaagaaaataatatacccaaactaattaaagaagactaaaaaggttaatagagcaggaacaaatagagaaaataatatttttggaaacttcaactctagaggaatgagtcttatggtggtgaagacaagtcatgatggttttagctaattttcaattatatgatttacttaattattgtttcttgatattaacatatgcttatgggtgtagttaatgggcactcctcaagctgatgtattctaatctagacatgtagtacttgttacattatgttgatatattgttcaaaatgaattaaatttcatcgtaaacgtcaattttctacaataatttttttaattgtatattcttaggacaaacagcagctactatataatatttctatgttattattgttgtttttattaggatgagtattttaatgcgaaaatgacatataatcgtgtgaaataccaatgttgaaagagtaactcagcgccctaaaactaagaaaaatgttacggtgcaccttaaggtgtaaaaactgttattaatatattttaatatttagtcacatacaatttaatttaataaataatatatagaaaaatgttaactaattacaatgcagtagatcaatatagtattgtatattttcgtaacatactatttttctgaatgtatctaaattgtatttatgtgacttttaggtggttatgaggtgcgactacccggtttaagatatcgttttttatgattggtattgagagctaagggtctagtggacgatgtaatatgcatttgatgcttaattttttttgtaattatttgtgatctctctactttatttatacattttgataaaagtgatgagatgtgttatttttttttaataagctaaccatgcaagaatttttattaaaccaagagttatttgatattagttattttcttactgggcttcataagctaacccctattttctccccttacaggatttaatttgatgctagtggatgagaatgataccattgaggaagaaaattgttttttttttttttgttttttttttttttgataagtgagaaaatcattattagttttgtcttattctacttattaaactttcaatgtaactgattttgtatttaagctgaaattgatggtctggatgatttaaattagctatgtactagtttgaaaagaggaatgatagatgctaggtattattttggtactttattcacctattaaatctatctattcagtgactacatagttgtggggatattattgttcttttatataaatgagtggtcctaattttattactaatattttttatcgatataggagttaatccattatttttaaataagtattttgtgatataaatccaaagattatttataaacattatctttttacaagggtcaaaatgtgacatttgatcactcaagttatgaatattatatatttgtcacagcctagagctcgaatcgtgacatatatcattttagaacctttagataaaaaaaataaaataaataatcccaaaagatgagttataatatgtggagtaaaatttgcttgaaattatttcacaaatttttgtgttggtgaaagttgtcattttagccgtgtttgtaccatatcatctgaaaaactaatggatacatacggatacatgttcaattaatacatttacaaaatgatttacaaattaatattgatcactcaaccgaacaaattaaagtgtcttataatattacacaaatgatatttcatcccatgatccccacactggcaattataacctctctctctctacacgccccatgcattgtaagacagactaagtctctctcatctcttatacttgagatttgcctactaattctaacattataatcttaagagagtcacttcagagttcacagcacttgtgatctgagtagtattatctctagtattaatacaactaaaaggggagtagatcattacccacttactaaaaggaccaaatctttataaaaatactatgtctctttactttcttattctttttgtgtacacgtggtgatataagtcataaatacgactccgttgtcggttgtccaaatctgatatcaacaatctagtactttcattgagagtgttgtatattgatctgatatatcaacatggttaacacaaggagagctctggctacaactcatacctcatcaagtcttcctcaagaccctatgactgttgatcctaatgttcgcttccagccacaattagaatctccacaaatctgacagatatggccaactttgccaacccagcaagcacaacaaacttgatcaccacgactggtcaggttgacactaccaacccagtttttcccaatggccaacctctgccgcccaggattgatccaccactggcacctcgtactgagggcttggccaacgtggagcaatcctcgggcaccacaactgactctggcccccaatattatgatatggaaataaggccaagaattggcgagctaaccgttggtgagcctcacatggatttgggagaagatctcgaattggctagtcttagggaggttttctgccaagtcagccaaattgaagaaccacgcattgttggatgcgatgcattcgcaaaacagagacataaatttctgagatagatgaatgaccaggagtacatccttcgatctcatcagacggagctagaccgtcgtaacaaggaagctaatgacctgataaggcagttcaatgaaagaactatcgagaaaggtcatgaactaattaggtatcctctctaagggagactagtcaacagattgggcagggtctacagacaaacagtccaaccaagttctttaggaactaggacggaccttcccctgcgtagaggtggacaaatcctgccacacagatctaatggcgggagcaggcaaactctcgcaactagcggcttggggggtcgacccgtgatttttggcacaacaacacgcccacttagcgaacctttggtcggccaaccccttataatggtgcacctctggccgaccaacaacgtaaacttcctccctagagcatccgagagcaagtcacccaaagaccaatctttaaccggctaggcctgggaacaggtaaaaacacctaagacaataacagcttgaagtgaataaaatcacttcagatacttagat

SEQ ID NO: 225242 - DNA, 3888 bp, Cannabis indica
ttttttattttatttggtaggggaaaagaccggcttcctgtttaaacaactcataaattttaattaattattatttaaataaaagggtttttcttcttcttcttcttcttcttccatttcttctcaattctccatagttatctttcctcaagctctttctctggttcccttacagattcctttccattccaacctcatgtgagttctcttcttcttattttccttttcaaggtcttccttgttatcaattgtgaacttgtaatgaaaaccagttccgctttacgtgaattatcactgctttgttttaatggacgaaagaactgaatcaagttttaagggaatggatgtgtcatcttatgctctcgtttgattactttttgcatttatttttggtctctcaataattttccaactagctcactgtagctcagaactcccagttacactaatcagctggtgtatggtatggcttttattttcttagaggtttgtggagaaagcttcaaaactatgatatgggtcatttttgtggagccaaattattatgagctatttttaatttcgtgtattaagtttgtgctcattcttttcctctatatgtatagaaagcaagaacattatgcgcgatgtaagagaaaggcaaaactgatactaaatatccagttatggtgttagtgatcttctataaatatttttgatttggttaaattaattgcacatataaaattaagtttaagctaatgtacttaatactataaaatctgttggtttcaagtgctaagttgatttaagtatctgttcaattggtaacatacacatgtaccggtaacttctggagctgaaacatgattgttgaccattataagcaaagtatttgatgatattaggcgtttttgtttgacagcacaattataatctgaatctgtattcaggaactggtagatttatatatatatacagaaaaatgttatgcataatcccatgaattcactgttcttatggttgacttcagggtctgagagtgcgatgaggagttatatatgttgtgactggtgaagattaagatgaattaagaatacttttctaactgcatgatgccttatcttaatatcaaatattataggagatgaaaattagttaaaataatttagaacggctagctggttatggagaatattgaaaggtaagctgtaaccattactctgttctctcttcttccctctctattatactaatgaatgccaagatcaaggatataaagtcaatagtatctaactttgtgtttgctccaatctttttgaactgattccaggttacctgagaaagccttctcgaatggagatgtttacattggaagttttcagggagcactgccacatggtaagggaaaatatacatggtcagatgggactgtttacgaaggtgagttgggaagataggaaaaatgacaggcaaagggcaaataagtttgggtgtcaggagcccaatatgaaggtgattttgccggtgattaccttcatggttttggtaccttcactggatctgatggctctatttatcgaggattgtggaggatgaatattgtgcatggttttggaaagaaacagtattgtaattcagatatatatgaaggtacatggaaggaaggagtacatgaaggtaacggtagatattcctggaactgtggaaatatgtatattgggtgttggaaaggtgggaagatgagtggtagaggggttatgaaatgggcaaatggtgacctttacgatggcctttggttaaatgggctcagacatggatatggtatttataggtttgcagatggaggatactattttggaacgtggagtaatggtctaaaggatggtaaaggattgttctatcctgctggaagtaaacatccttacttaaagaaatggtgtagcacccgaaattcagagaatgatgaaaagaacttgttaccagaagaaaaacctcagagatcaattgttaagagaagtctctctgagaaaatttctgctggtggaattttgaaaagttcaagtcgaatatcacacagaggtgtgtcatttagagaaacttggagtcgttcagattcttctagagaatttttatgcaacgactcctcgtgcgcattgtcccatgcctatggaggaagtcaaaatctgtcacaggataacgacgcttcagtttatgaaagggagtacatgcaaggggttttgattaagaaaaaataaggagccatgcagagataccgaagaaacaaaaagaacataaagcattccatgcagatgaagtaaagaagagctcatgttacaatatttttgacggccattggagccagtatttaagacttaatttgcaacttggtatcaggttcgttgcctgttatattactagtgtgtacatgattatttattctattcaattgctgattgggattcattgtgtaaagaacttcatatttgtttttgttaatagaagtaatgccctatctttcattcaccctcaatcccaggatttaaataatttataacaataatttggactactttgctgtattgttgcttcttcatgatattttctgcatctcctttagttaaaataaaaaaactatttacatagttctctgggattattactttactgaaattctttttgaagctcacagatatactgttggaaagattaccccagtgcctgtgcgtgaagttcgatcatctgattttggggagcgggctagaataaggatgtatttccccagaaaaggttctcaatttacacctccccacgattcaattgatttctactggaaagattattgtccaatggtgtttaggtattttccaatcttattaaaacgatgcaagcatatatattgtttggttaaaagctacttgagatctacctgtctagatttcaattgaatagaacttcattttatggtcaaagacttatctaatagcttttatttatttcctaacacaaacaacatgctcattttacatcctattgtcttgaatatcttccacatttccattgtgtttgccctttgattgaggtgatgtgtgtcggagtcggagttgtaattatcagtgtgataaaagaactaaccctcttttcacttttcatgttttatatgtgacattgctttgcttttggaggccaattagctttgagaatttcggattcttgggttctatagacagaaagaagaagaaaagttcaagaaaatattagtttgttttgagttcaagttctaggtatcaatctaaatgcatatggattgaaaacatactgtcctcaaatgtttatgcattgaagttgcaagagaaaatgaaaaaaattgtatgatgtgttataatttttagatacacttttatcaggttttcctgccttttctttgtttgtattttctgtttgatatagaagtgtcgaatcttgaaaaacgaaaagtattcagctctcagttgttatctgaaattcctaattttaaagtccaaaatgcgtagagcatccaacattatactctttacattttcatagttgcataacctgtttataaccttatatattcattctaattttgttagcctatttttaggaatttgagggtagatgttcaagttggatgcggcagattacatgatgtccatttgcggtgatgatggtttaagagagctctcttctcaaggaaaaagtgggagtctcttctttctatctcatgatgatagatttgtgattaagacattaaaaaaatctgaacttaaggtttgaacacaaacttccacagtcaattatttgtattcctagcttttaatcggttttatttgcctatctgtgtcaaccttgacaatttattttcgagtctaagagtacgaataaggt

SEQ ID NO: 225243 - DNA, 2455 bp, Cannabis indica
tccctgaatgcattaaaaaaaaattagaagaatctaaagactttcttctaaaatattttataactaagcagtacagcatataacaggttttgtcaaccttgtaggcctccttttcatatgcactaaagatattattacacctattcacctttaaaataatgagtctcaatttaaataaatgtgattggttagtgtgtactgtatgatgcatattttactgcacatattattactcattaatcattactaataagtttgaatcccaaattgttactgttatacgtaacaatattttgatagcactagtggaatttataataattttgagagcaataacaaaaaaattgacattaactgatcgaaaatgaagaaatcaccagactcccataattaaaactaacataacatgtcaaaagtttcttattttacgagttaccactcagattatagtaatttggccaccttatagcaattagcagttagtctgacctgtatggtgacatctctagcctcaaattcagcatttccatgcaatataattttacatgactcgaaccgttgaacttgatgcttccaatatacattgtgtccacaattccagtcgactccctgattctgcacttcaacgttctctaatctacatcttccacacctatcaaaatgttttaatgattaatgatagtattgcctccaaattcttcaataaatgaaaataacacgaacctgtggccatattgcaggatatgttccccattatcatcaatcctatttgagcccataatgttgtctgcctctataatcaggcttccatcaagctggaaaacagaaaccagatcgtttcagcacaatagtaaagtaagttaaatactctattcatgcattactaacctcaacattcctccacaggaactctgcgacctctacttttaactcagatcccttggatatagaacctccattgaactggagttcatgtcatagcaaaagataatgagaaaaatataagaaaatgatcacaaatatgtagtctcagattacaacatctacattctatagcatctcaattattgacgagttaaaagcaaacaaaaaatgagaagcagatggcatctgcatttgggaactaggattaataaataatcaaaagcttatatttaccgttcaaatcataaaccaggaatatgagttgaagaatgaagcatggtatacacagcaaggaccatgatgaacttactttttgccttgtgacctcccagagcggaccaagagcagggtgcaggagaataagaaatggtggtccagaaatatatttttcattaccttcaatctgcaggttatggaacagaaattactatcaaggtttttgaaggaagatgcatgacattcagcttgagcaaagtttaacccttgtaagtgaatttaatatcaatatttaaattttgatacaacagagttgtacctcaggaagtccaatttcacactgagaaagaatatcacatgagtttcttaagatatcaagcagtgaaccatcaggagtctgcatatgaatattcaagcatgtaaacatggtggaatgaacaatttaaacattatgctatttaatgtcctggagataaatgaagttcaagcatgtaaattagtgataactgaagttcttcacaggcggaaataaaaaaaataaataggattataatataatcataaaagaatgacctggtgtaaatttttgttcgcaagttttctttgcttcttagcagatgatgtaactcttcttctttcattaaacacaatgaaggaatcaagattatctgttaaatcaggccactacagttaggtttgcataaagtaccgttgacaaaggaagaggtaggtaagaatgatcaactagataaacaatcatataccttccacatccttagaacgttgagatggaaaggtgttaaaaaagttatcagcaatattttgcattgtgcattccagcctaccacccaagacactgaaaaagatccactagttaggtgtcttaacatttatcagcagtagacactcacattgtaacttgcaattatagagtgcaatgaagtttcgaataaattattcaaaaactgaatggtataatgttcgttaattatccttatttcacaaatgaaaagagataattgaataaatttcagcatatattgcaaagcaaacaatatgtacaggttttcagtttaggtggaatcaatcataaataattattgctgattgcagaggatagttatataagagaagatgagagaataagtacctgtgtggtttcccaaaatagtctacaaatgagatttgctttttcgtattgagcaccatgccaggtaaactgttactgttattacttgatccaactgattctgcagaaagtagatccacatacaagatgtttgtattcgcagggaactcggcctgcaaacttttt

SEQ ID NO: 225244 - DNA, 4370 bp, Cannabis indica
ttgaagcggggacgttacagcattgctactatattggtccaagatgccataatacgagttgctactagtaacttgaacatggaatttgggataccaactagcaaagctatgggcgatgagatctacacaattccaaataaaaaaattatattggttatcagaaaatttaactaggcaagttcaatcagcttcgagaacaattggggaccatccataaaaaagattaatctttacctcgaggagccccttcaggggtgtgggcagcttcccgagggactgtggcttttataaaagtagcacgagcatctcggtcttgattttcttccttgataggaaccctcactgaagaccaggaagagagattttgttctttcatatccatggtggactgatcctttccaagcaacccgagagctacaaggtttggctcaagaagaaggaaacttgatgccttcattccaaatggaaaattcactagaatttaatgatattgcgacatagttgtagatggagtaggttttaacatcattgctgtacaaaggaaaaaggaggtattaagattgaaataaatgtaagaaaaacatcataacataaacatggaaagtgaattatgaaacttacgatgtctttggaaaaatgtatgagcacaaggatgaagtcctattgtccaaagaattggtcattaaattatttcttgttaggaagatcaataataactttgcactcccctgtgtaaattttgaggtagaagaagcctccgaaagaattcttctacatgcaagtgatctcgtatggttcgtgaccttcccatcccagcatgtggtataaggatctaagagaggctaaaaccttataacaattacgaatcagctggaaggagcaattcaaacataatcacaataatctttgaaatagctctttaaaggaaggatagcctcagcatgtatgtgttcaacactccaagccaaaatttttatggatcgctcatactacactgtgagttactagcaagtcaaccaagaagaaaacaactcttcttgtctctctctcaaccgaccgacatacgaaatagtcaccttgtttaatgcgatatgattgtaaaaagtactgacatacgggtaatggaggttacttttgatttaaaaaatttgacttcgaattgcattgtggggttttgaggtagttttggtttttgagctttggaaggggccataagtttaaaaaggttaacaaggggtaaaaacaaaggttttgccaaagggtatttagtaagatgaagaggcatatgccaagcagcttctcacaaacaagaacgtttaccctaaataattttgattatgaattgactaaatcaagcaaaaatataattagactgtttaatctctcaatatggtcatggattttcacctcattacttcaagttctgttttatgtattctaagaattgtcttaaagggtaaagcaaaagaaaagtgaatttcacgatctaaaaattatgggttttcaagtttagagtcagacagattcattgctcatctcttgaaagaaagaaaaatacattgaaaaaactccacataatttgaaatatagaatcctaaaaattactaaatgcctcaactagattaaattagattaaaaaccctattaaaattaaaagtttaaaaagaaaagcatatcataagattcacattaagggattaaagaaaatatactttgattagattgatgatgaatttgacgaaggttttcctaaaactcatcagatgtaggatttaggaatgaagctttttttgggtttcaaaaaaatagttgcagaaatttggaagaaatagcaaagagatagagagggcatacaagagggaaattttgagttctatacttcttcttttcttagatagtaatggtggaaatggtggtgagagatgaaaatgaaagacttttaacaatattgtaagcactgtttgattaaatgaaaattgaatcaaaggtgattaacctacgggtttgttgaaaagacaagcatccattgcaaaagccatggttagctctgtattgggaagacaaaaattgccaaaagaagagattcaagaaacttacttagtacacaaaataataagtgaaaatcatgattaaaaagtctttttcaagatgaaaagaaaaatacttttttaaggaaaattgttgtgccaatattttgagcattgacctagctatttctatgttttaattctgagttacttttgttgtgagttggtgttggaagcttggaaattgtggtaagcttctaacctagctatttttatgttttaattatgagttttgggctgaatattgaaatgttttgtgttttgatgttcacttgtgatgtagatgcatgttggtgtgaattggtataaaataagtaatttcttggttgattgagttctatgtcatggattttgagatcaatttgttggttgaattaattgttggaaagtttggtgaaattgtatgttttgatgtttttattttaagtttgaaattatgtgttaaattcactgttattaatggctataatttgtgaatgatgaagttgggctatatgcatgttatttagggttttgttgtgagttttggtgcattttcgagttgctaaaatggtgtttctgggttttcaacctaggcgccgcgacgcgctcaggagggcgttgcggcacgctcgcgtggacagattgcatgttgaacttgttttgttcataacttttcgattcagactatattttgggtgttccatatatatcagtcgaaagctcgtttcgagctctatatgtttatttgtatttgaatgccaattgtatgattaagtgaaaatagatttagagattaaccctatttgtgaattctgagaattgtgactaggattatcggtaattgttcaggagcacccgtagatttggaatctccacgtacttgggacatcaggtaagacagtaattagcacgtagagttaagtgtggtggcgctcatgtttgatattatgattgtgattaaatgaggaacccggattggggttattaccctaaagtgagcggttatatggtctagggttattaccctagtgattaaatgattttgaatgttatgccatgctatatatgttgaaataaagaattatgcgctcaaggcataattaagttagactcggtaaattaataccctaagttttgtaataataaggtctagggttattaccctagaatatatgaagatataagaaagaaaagatgtacataatatataatattgctaatctaatggaagcatgaattagggttattaccctcaataggtattattttaagcatgctataatgtgttgtatgagtaatcaattagtatgcaagttagggttattgccctaaaacttcatatattataatatatattgaaggtattgaatgtacgcatatatgtcaagagttatgtgtataagacataactaggttagaccttgtatacatcatcaggataaactacggaaagaacataatgtatggattatgtatatatgaatcgggttatgcaggtaaggcttaatcaagttagacttggtaactataaccgagacaaaccctgttaagtccttattgtaaaataatgtgtgagcgtaccacgtgggtctatactgcatagacataaatagacgtgtgagcgtaacacttgtgtctatactatatagacataagtagacgtgtaagcataacacgtgagtttatgtgccacatagagacaaataggtgtgtgagcgtaacacatagatttatgtcaaatggacgataagtgcggtggcatcaataattatgtgatatatgtttattgtgtctattagtatttatactgtcttgctgttcttggctcacgggtactctactgtgcaaaggataaatctattaataatcaaccacgagtgcgggagctttgtgatggattgtacatgtttgggccatactagaccaagcgggttgggtctaccagcgaatatatcttgtattttttagattttgccgcttacgtcagcatttaaaatgacttgttatattttgcaaaaattttaatgggatcacgaaacatgttgtctttttggattaattgtaaattttaaattattacaagttatgtatttattccattgtaatgaaagtttaaaatttttcgctcttattttctagtaatcccgaattagcgggattaggttatattactggttgtagggtgtctaatttcttagggcgttacatttagtcccaaaaaattatattgcgactaagaagctgtcactaaagataactaaaaaaccgtgtttttgcaaatgtcagttgtatatacgaaaa

SEQ ID NO: 225245 - DNA, 3893 bp, Cannabis indica
ttttaatataaaatacactaaaatttacattaattagaaataataataaatattattagaaaaatgaaaagtcgtctctatatatattttgctgggattacatgtatataataatatttataaacaaaaacgtgacaatttatatgcgatcattaattccttctttgtatatatgagcttcacatcgatctacccacgatcgaattgatttcttcgttaattaattaacagcattaccacacatgaacgtacatgatatgattaaatagaatatatatatatatatatataataataataatagtatatgtacgtatatatatgatcatatgttaatggtgtgctatatatacgtacctatttctgatatagagtactcattcaaaaactccattccaaatatattggtttatttataataattctttcaagtacgtagctaataagtatggcattgcccaatattgtgattatcaaatcggtagccatggaaaaatacatgagatgtttaactggaaaggaggagaaggttgggcaagagaatcgagaagaatttaaaaggggtgtgaaattacaagaagataaggacattagcagtcctttgataaaattccaagtggtgacagccacctcaaatccagagttggtccacattcggtgctgctacaccaacaagtacttggtcatggggaccactactacttactatgactatattcaagccgtggctgagaatcccatagaagatcaaacttcaaatgcatgtacactattcaagcctattagggctacagatgatgaattcaagggtgacacacaaatgtaccgacttctacacgtccggactaagagataccttatttaccggatgatgcccgacactcgcaacgatcacttgtccattctctccgagacccctagaacttatgcgcccttttttgatgtcttcaaaatcatggatttcggatccatcgtcatatttcctgaacaagtcgcattcaaacaacatggtagccaaagcaagtttctcaactgcaaatccttcaatgaccacccctacctgcagttcctcgatggaactgacgagggcgacacaagggtagccaatgtcatcaccaccgttggtgacggttttgttcgcataaagaatctctccactggaaaattttggaggcgtagccctaactggatctgggctgactctaacaaaactgaggatgacaacagctctgagtttcgggacaccatattctggcctgtcaaactcggcgataatgttgtggcattgcgcagtgtggcgaacgaccgctttttaaagggaattactcaagatggcgtaacagattgccttaatgccgcagaggaatacatgacaaatgaagtgaagctggaggtggttgagaccttgattgagaggaatatctacgatatagaataccacacagaggtagcgaaggtatataatgtcatagagaaggatattctcacatctcgcaacactagttacacaaaagaagacactgtcaccctcaagttctctcacaagaagtcaaactctaagactattggaggcagtgtttccctcaagttaggtgccaaagcaacccttaaacttgacgtgatacccacattcctaggtgggcagatcgagctttcagctgagctgacagggacagttcaatggggaacgaccgacttaactgaaaaagtaaccgaaactatgaacgctgttaaagtggctccaagaactagaaaaacagtcacccttgtagccaagcatggaatatgtgaagtgccgttctcttacactcgtcgtgattatcttcgcaataagcgtgagccagagattaagagactgcatgatgggatctacaagggaatcgattccaccgaaatagactacgacaccaaggaggagcccctaccagcttctgattaattgaatcgatcaacatgcaagcaataatattaatttcaagttccgtactactttccaataatatactatcatgtgatgatgtgatagctatagatctaaatgtcatattttctattctaaatctatatatgtattttgtgatgtgtctttgctctagctcactttttgcaaagagactatacattgtaatacaaaattaccaaattaataaaagggttaagattcgcattcagtatctctagtgtttgattttgtgtgtataatctcagattctattcttgagtgtttatagtgctaaactgatagataaacttatgcaacaattagtatcaaagcttgaaagttcaaaggaggatcttggattgagtaattaagaacttagtaaattggttgagaagaaatggggagcacgaagttcaatttagagaaatttacacggaaaagaaaattcaaattatatggcatgtaaatatgacagcattgttggttcaacaagaattataagttgtgattttaggagagaagattctacctacaggtctaactaagaaagagaagtttgagatcttggacaagctcatagtgcgataattttaagtttcaaaggataaaactcttaaggaagttttgaaggaatctactgcaactggtgtttaattgaaattggacatgatcaagtatttggctaattgattattcttgaacaaaaaatatattctttgaagatggcactagagaagtggtatcataatcatcttcataattatataaattaaatattgtgttgagtatttatgaatttatatatagatatatatatattgaatcattgatatcatatgaatagaaagtgaatttttaggtatacatctgatataataaactcagctcaatagagactgaggcagagcaattcatttatagacagagtcaattacagggcaaggggcaaaagccaatacaattagactacagatggcagtatacaattccataaggaataacagaaagatttcttgaaagatagggacagctggtgaatcttgtactgcaatgaaaacgtgttgaattgtgccaatgattaggtgagctccgaatattcaggaatagggtatgactcagcagatgacatgtcaattggttttactattcctttacactccccctcaaactgaagggtgagatacggatacccagtttgtcaacaaggaaagtaaaacgtgatggtgacagacccttggtgaggcaatcagcaatttggtcatgagatggaacatatctcacttctaattgcttttgtaggaccttgtcacgaacgtagtgagcatcaatctcgatgtgcttggtgcgtgcgtgatagacgggatttgaagcaagagctcctgcaccgatgttatcgcaccaagtgatcgaaggagcagagaagggtacacttaattcgctgagtagagactcaatccacgatatttttgctgctacatgtgccagagcacggtattcggattttgtaattgatctcgataccgcttctttgaagaccaagatactagtgaatctcccaggtaaacacagtatccagcaatcgaacgcctatcatctgggaaacaggcccaatcggcatcagaatagcctatgatttgcagtctattgttgcagttgatatgcaggccgtgtgttcttgttccttttaaatatcttagtactctcttggctccactccaatgtgttgttgtaggtgtttgaaagaattggcttagcttgttaaccgcatacgctatatcaggacgagtgtgacacaagtactgtaatgaaccaatcatgcttagatatatagtaggattgtgcattggctccccatcagatacagacatcggttttcctgcaactgtaggtatgggacacgactttatgttggtcatgttgtatttctacagtagatcctcaatatatttag

SEQ ID NO: 225246 - DNA, 7459 bp, Cannabis indica
attgtataccttttgataatcagagaaaataaactgcttctgatttagagatctagggaggaagacttagttgatagtattgcactatcaaattggagtaactgctgtggatcaatcagagataattgctatggatcaatcaggtacacatacctaattattatatcttattattgtgttccatgttatatacaaatagatcttgggttaattgttaatttatataacatgtagcactaacatgactttattctagattatataaaccttgtattaaaaccaaactcaaatattcaagcgaaaatgctcatgatgtaagccaagcaatggctggattgcaggtaggtttagagaaatcaaagaatgaaagaagtgtaatattgcttagttaccaattgaaaggaatagcaccttatatacacttgagtcggtaaataactaaatataacagaagggaaaatagcagtaataacaaaactaactgagcttaactctcccttaacagtagtaagaaaatcaagtcacatgccttgttgcattgtatataaaatctatgaatgaaagaaacggctgacctgagtctttaatttgataagtaaattgtcaacagcagaatttgtgtacgatgtaagcaaaatggatgcacctctaattaacaatgccttaactgcatgaaccatggtagaagtctttcctgtacccggcattcctagtatgagtgcataatcccttgtcgtgagtatctgaaatgaaattcatggaataacaagtggacacacataaaagcctggttaaagagattaaaatattgcaagagctggtggtacactagaagcaagatcttagagaaccttgagaatggctcgacgttgatcatcattcaaatttttctgtgaccacacataagaaatagcaggatcctggcttaaaatgcatccactttcaaatcgaggagcctacaaagcatccacatatgcatagaaaatcagcataaaaaataataaaaaaaaggtgataatcatatcatacaagatcagtactaaactttacctcaaggtcaacaatcatcttccttaggtgtgtactttgtgcactttgtagaaagagctgaacaaggttaaaccttaaagaagaaatcaggcatgactttagaaaggctatatatcgcattactcgttcaacatatctaacttgagtaagggcttgaaaaatgaataaataagataatcgtagtagtgtaattgcctcatgactgcaaatgaagacataaactcatctttgtcgatccaccagacctccctagcaagatcacatgcctctgacgaagcatttccagggagccttaagcgcttcgataaagagacctagaatatagaaaaaagaaaaaagaaagaaaaaaaaattaattagtctttctttcttatctaaaatttgaaaattaatacattcattaactggattagaacataaagaagggtaaacaatataaagccaattttcatttcaagatataagtatcatcagtaaagacaggacttatccttacagaaacatgccagtcacttgattctgttacaaccccactagcaatggttagatgaccagacccagcactaagtatctgaccatgaaaatctgaccgttagtaaattactgtagataatgaaatcaaagataatatacaattcgtgagtaaattatgagttcagttataagatgtgtaaaattatgtgatgaggtgttaaaagacaaatccagagagttgttttctaatgaaggagcagaccaataaataagatacctgaaagataaagaattaaaagaaatatgtttaatagctctggcttcctatacataaatcgctaccgtttaaaaatatataactacaactgggagggactggaaggacaaaacatggaagaagaaacatataaaggatttttaaatgatgatttcactgaaaaaaaacatgtgcaatggtatgtgtatgtgtacatacataaatatgccttgaattaatacacctgtgttcaacaatttaatgtgcacgtttgttgaaaatttacgttgtaaatacccataccacatagtcaccacttttaaaagtgcaacgtgaatcttttgtcagagaagatgaggcattcagagaatccccatcagataacttcttatcaacagaaggatcactgtgacatatgaatcggtagataaatctgttgtctttcttaatttcccaatgtggaagttcatcatgacgagcaatagagaaaacacgagcatcatcactcctcaaattgtgtgattgccatattttgtttttagaaagctgaaaaaatagataaaagtataaaagaaatgacttcattgaaactttgtgtacaaagctcttggtacagttgtgcatatgatgatcttgaaagttgcacctgtatctctttagcttctaagtcaatcagccaatcccagtgcttaaggaaactgccatgagaagttgttaggtggtgagtgtttgaatcaaataaatcccctaatccactgctttcagcacttccaccatgtacctgaagcattaaatatgatcacattgaaaaccttttcaaaaattcatatttttcatagttagaagaaaaatacttgaaattatacaagaagatacatggcataatagacctgagtcgccctacaagcagacaattagcctaggaggaaaagcattaccttatgatagatggtacagccactaagatggcgacagcctttgcacatgttcagactctagaaaagaaaaggaaaaaaattaaatgaaatgaaatggcatatcctagaatcactctctgatcactaatacagcagctcacacctgtaacatgggtggcagcacttgcgttgttaatgccttaaggatatcagttgcaagttcattgcgacgcatgattagtccaattaggtcagatcttcgaactgaaattccctatagacatgaaaaaacattagataggcctcaagatttcaatgggaacatataatttatgtattctatcactacctgtgtctgatctgactggagatagtacagaagacccgaatcaatatgactttgatacctaaagacgggcagcaaaatcttaagaaaaatgttttatcaaaatccacttagaaatctggtgtctgtgagaattaaagaatgatgtaacatatttatacctctcagacatcaaaagtgtgtaaaggattacttgggcacagtgttccgtagatgactacacaaatatcaaagagaggaaagatgaacatcaagaacataaatcaataaatgttttctacagcaaacaaattttgcattctggaattaatttgcacaaattctatgaaaataattgaacttacctggccattcggtgctttcccacttttgaattctaaaggcatcacattctcagttcttccatttctgtttgatcctacttcaactctaatagaagcatcaatcatccctttcaaaccatactttggagcccacgtcatctcctcgatatcaagtacctaaggcgtacagattagatatttaagaaatgaaaaatttcctaaagtacaacatcaacaaaggaacaacatacaattatcattcttcacaaaacaagttgtagcttgttcaggtagatgttatcaagcacacatgcttattaaaccacatgttaacaagatacgcatttaaagcacttgaaaagccaatcatttttgcattcaggataatattaaactcatgaaactatctagttgaaagaacgtacacatttatggaatgcatgttgtagagagctagtaacacgcataatgaacaaaaataaaatcaacctacacatgaatgatgttttacctcagatatgttgacttttttagatccaacatcagatccaaaatccacagtaggggtactaaagccctgccaagtaaattaagttagattgttaaaaaaaaatctttcaaggttctcagtgcagccatttgcttccgtaacatctggttaacaatgtgaaacatcatacacaaatatgaaaggcacattgggtccgtacccgacatttcggagtgaataaattatattacacaagaaagcattgagaatgatagcatgaggcaaggcacgggatatttcacctaaaatagagaaaattaaatttggagaagtgggacacaagaagacaacaggcaaagcacaacacaatgcccataaaagaaatttctaaaactaattcctaagatgattttctacaatgacgcatgaattacacctaatacatgcaagaccttgttgataaatcattctaaacactaaggatccctgaatatggggcaacttatcactaagagacaaaccatttaaatttactgattagtgacagagtgcaataaacaaataatgaaagcaaaaatataaaccagtggtaaataaataaaccaagattaacagacctgtggagatttgaagaggttaacccaattcaataatttggggatggcttcaattaatgttctgtatgtatccttttcatttactgcaatttcaaagataacatagttgatctcactcaaaaaccaatgttggaacataaatagtctagtaaacaaatgtgaattgaacaatatattttggaatgacatattcaatacctccacatgcatacaagttctcaatattttgttggagcagtgttcgtgcatattcctccaagaaaattactgtaggcatctcctttgtaagaccagcctaacaagtaaataaatttgaaatgatacttgtaaatgtgaaatgaatatagagactatatgcaccaagacttttacaaggtttcagctgaagtgtaaacctgaaatatctgatgaagcagtgtaccaattaatgctgcagatgaattttcattgcatcttatcctctcgtccaggacagttcgccttgggcaattgaaactaccagcaacctaagagtatatcatcagttagagaacagaaggaaaaaaaaaaaaactaggccgaaataagcacaatcttgtgtgatgaataatacaacattgcaaataaacaaaaatacgaaattctacagtctaccattggaaaaaataaccaaaattacccgagttccagacaatagtaaatttggatgaacgatcagaaaattcttttcccgattcacatgacaacttccctggtcatcaaattccccaataatattcacagtatctccaggagaaaatgacactgtaaaacctggaaaatccagtccaaagaagagtaaggaacaataagttcatgacctaagctaattgaaatgaaaaactgacaaatattctgtaaagaattgacaaacagtttaacttcaagaaaaacaataacaatggatattcctactttatgctaaattaatatgactgatggtggaaaataaaccctttctcctaagtgacactatagcttactatttttgcttaaatacttccctaatgcaacatgcattttacaaatgacatggttggcaagatacctaatactaacgtactccagtagtattcctgaatgtgattatactgctatgaaattatgaaaccaagtcattaaaatgaagtgaccaaggtaaaaaaatcaaaaagatattaatttgctgcatagcaagaaatcctgaaatactaccattcttcccacaaacatgcaatccgttctactccattttgctcattcagcaagcgcagaacctgagaaccaatagtaatatacaatttcatatcttataaatttgaagtaagaagtaaattcatgaaaaatgcttactagaaaccttataaggtgattgagcattagatgagttaacagatccacgcttctcggatacctgaggaagagataagttgctgcgtattaaactgataagactatttctctttcacgagcagttgaactagaaaggtttaaccaaatacctctaatacaagaaaattacaattggaagagggttctggaacctcctgaacatccaaaagatgtgttttaacccctttatttggaagatccactttgacaggaaccacatcactactgccatctacaacatggcatcgaaacccatctgccttgtcagatgctgaatcttcaacagatatgacatcttcaacctcatctaagagctcaagcaatgcctgcagaaaataataaaacagaaagatatcattcgtaggtagtattattaagtcagcccgccacaaggacatgatgaaaacatgagactgtatgattgaaaactcttcaacttttctctgaaaaatgtactttacccttttgtgatgtttttgtttccagcagatcatatgctttattttttcgcaacaccattagcatgctgcagttttctacagtaagttagacaacataacaaccatagtttgttcaaattacaagaaaattattgctaagataaagtaagagaaacaatttcttcacttgatttgtacttcctgcacccagaaaaacatttaaatgtggaaaaaatatgagagaagaaactttagactatatccctttctatatacgtaaataagtcatgtaaagaaacagcattcagtcaaaagagagccatgatcacattactagatgagtacccaaaactgataaaagcacaattaccttatcatggcaataaggtaaggaaggcggagttcgaaatggactctgtctgcttgctaccttacagttagttgtgttggttgtagttctactaaaatctacatcctcttctgggttaacccttttcagtcccaccttattcaaggataccgatgatcttgtcaaagtctgcaactttagtcattaacataattagcttatttctgtcaaaacaacagaataaaccagcagaatcaaaactaaactaacgaacatgccttattaacagtgcactgttgaatggttgaggagtttttccttgaagattctgccaacatcctcaccatctccggcattcgctttgaaacagcttgcaatctatcgttgacgggagatatcttccaagtgatctcatcacctccatcgtcctgactctgctttatcaactatagccacatagatacaatcgcttaataaccaacagaatatacatagatatgaagtgattataagatcaactaaaccagtagttaccattccaggagagaacttgaatcgtttcagggacgcagacttagaaatctccggtgatccatcgattaaaccgtcctcaatctcaagattctcttttttctcctgagacgcattagccaaacctttaccattctccttggattgaatagtcgtagggttttgagaagcagaagcagcagcgcgatcattaccatcgtcatcttctatctggatagggttttgggcgagggatttagggggaacagtcttggagttgttctgagaagctgagagg

SEQ ID NO: 225247 - DNA, 3336 bp, Cannabis indica
aaataactataatatacactattgtaataaaaaaaatagactaaaaataagagtagattcgtacatcacttttaaaaatgtgtattgtaaaatttttcaaaaaataattctaaattttataattataataatataattatatataaatattaattaaattataatgccgtgcactgtagacaaaacttgaaaatggtggcacaattgcagtctccttgaaacaaaacaacggcatatataaaattttgccgtgtccttggagatgctctaatagagcacatggggaaagaaaggatagaaatgtaaatgcagaaacgtgaatggacaagaggatcctgattatgatatccatcaatttttctaatctctccgctaatcattatccaagcaaagagctcgaaacctatagctattttgtcgagtagctaaaacttgtccgaaagcaatgggaccacgtcaccaaatattattaaatttataaaaaaaacgaaaagaacaatcccacgttccatttctgcgcgtgaaaccaaatccctcaaatccatcaaaatatcttcctcctctcgatgacgtggtgttagaaaaagataattaaagatcagccaatagcgggtcccatctcgtgacccgacgaaaacacaataaaataaaaatgaaaaagagttgccacgttagctagtgttactgtatgcgcgtccttttatatattaccgtatttcctctttcataaattaacgaatccccaataatcccaaacgtgtactcgcccacactttatcactctctgcccctctttctttctttctttctttcattttttgctataagctaattaagctcatcagactgatagagagaaaaaaaaacaaaggctctttatttgtttccattttctgttttttgtgcactgtgagaaagaaagagcgagacagagaatcggggcatatgggtatggaggcgacgacgagcaacaacgtcatcgcaccgttcgttatgaagacttatcagatggtcaatgatccgatgacggacagtctgatctcttggggtcacgccaataacagcttcatagtcatcgaacctttagatttttctcagaaaattttacctgcttttttcaagcacaacaatttctccagctttgttcgccagctcaatacttacgtacgtcactgttactgctttaagataatatatatttatatttttgttataattgttaatcaatttagtcaaatacttgaacaggggtttcgaaaggtcgatccagatagatgggaattcgcgaatgaatggtttcttcgaggccaaaagcatttactaaagaatatcacgagaaaaaagcactgtaataataacagtggaagtagtagtactaacaccaccaccaccagtaaccggggagtaatttcccactctactttctcagcttccaaacagcttgacccgacagaacttgacgatgaagagatagtcatggagataacaaggcttaaggaagaacagagaactttagaggaagagcttcaggggatgacgaagcgactcgagaccactgaaagacgaccccaacagatgatggcctttctctataaggtcgttgaggaccctgatattctcccgcgtatgatgacccagaacaaaaaccacctcaccgaaaagaaacgacgcctagcaatatcctctgccacgacctcttctaattcctccggaggcggcgccgctactgcccccaccactgccgccgggacgagtactaacaactcgctcaagaccgaggacgaagacgacgtcgttgcaagcgaggcaggtttcgaattggacagcttttataattttaaccagtcttcatcttcatcgccggagtatccaccgcagccgagatggggtgcccagcggccagcccggtttatttctcaagagggtttttataatggttaccccgggaatagccaaaacccgatatcggccgtttcagtaagtagggtaccggaatccatggcggcgatggcgtcatcatctatgccggctccggcgagatttgtttctggatatgggaatggtagtagtagtaatagtaatagcaatagtgggcaattaggttattttacaggagtagtggctgggatggaatccagtgatccagctccaccgccttatccattttcattgtttggaggtggtttttaattcgttattagttaacttcacaccgtactatattgtttctctttctttctttctttttttctatcttttatttttaaaaaattttgctctgtatttctttcttttttatcttattttagacttcatttgctttgtaaacaaaagattaataatatgttcaaatattatatgtcgccaatggaactaccaattgcatgaaattcttgtttaatttatgttttgaatacacctgatgatcttatatatatcgaagtggatacaaaaacaaatatttctcttgttttgcgggaataaaatcagcactttgtcttatttaatttttttaagcactttatttggtacactacctatttttcctttcaggccttttctttttaattttcaatttatagatcattccttttgtggtgtattatatttctatttttggaggtatggatggaaagtgcccttgttatatggcttcaatactttgttgagaattatgagttacttctcaaaatcaattaataaaatggagtaactcatgttctgattcttatatatataatttaatatttttatattttattcatgtattgtccaatacatacacttattatttagataaaataatataatttatcattcaattatgtttattttgtccatagagttaggtgtcttaaagatgattaacaatattatgtttctttccattttttttttttttgatgattatgacatatttaagttatacatattatttatacacaataatatataaataataatctcaccaaaaatttttactaattgaataaatgctatatttaatatgattttatcctaacaaaaaaaaaaaaagtataaataatttttttttgaatcaaaaaagtataaataattttgtctcactaattttaacaacaaacatttatcaataataacaattatacctagagttactaaaaaatcaatatatttataagcttgtataataacttataagttagacttcttcaaattaactaaaaccaaaaattgtatttcctttgttccgttcctgttactattctataactagttaatttgaaagcttttcaacggctacaacctcctaccatctacttctaaatttagtagttgcgaataaattttatatat

SEQ ID NO: 225248 - DNA, 2636 bp, Cannabis indica
aaatatgatttagtatataaaaagtagtcaaattagcaaaattaaattgaatgaaacaaacattttttaattgaacaaattcaataattcaaaaagattatttaagtgtctgaaaaattaaaacataatttaatacatgtcaaaatttaaaataaaaatcttaattaccctaaattggatgtataaaacaaaaaacaaagaaaaaaaacatttttgtacacatttttctccatgagcagtaaagataacttaaattcaaccccataattctaatctaataatatataaggtgagccattttattctacaaaaacaagtagttaaagtacacaaaacttacataaataaaagcatgcatgacaaatccactagccctaaaactaaaactactagttggagtttttgcatactactttgtccaaattcattagccataaactaaatcttaaaaagtgatcattaaattgcccataatatacaaaacaaaacattataaaaaagaaagaaagggcatttgtttgtagtagtaaccccttgggtcaaaaggtttgatgacctacacaaaaggttcattttaataaagaaagatcatgcatgcgtgagcatagggcatcaaaaacaaattattagttattattaataataataatatatacaaacatgaatgagatttgtactacaaatctcacaatatgaaaaccaattcaactctctctaatttaagtaccccttttctttttggtttttttccccaccatatataaagaagtgtttcttctatagaataattacttttttctttccaacaaactttacaatacagtcccacaagccaaatcatgttgaattctgagttttgtaaagctaatgcaagtttttttttttttttgggagatatgaataaaatgacttctaaattcttcacaatctccagattcagaaaccaattgtaaacttgataaaatcattaattttttttagctctacgcatagctcagttcccgacaaagccgagagggacaataagatacagaggcgtgtgaactaattaattatccaagcaacaagtaagaatctctactgtgtttaatctaactgatgtaagcaatattgcgtgggaaaaaagagatgctaacctcccacaaaaagcttttttttttcatagtatagtagctcacatcttacttgatttcgcccagaaaaaacccttctttctcgtagcaggattattatctgatatggctcgaccactctttgaaccaaacgagaagtggcgcctcaaaaaaggcttccccacggaggttttcatgcttgagctggatgccattgtaggaccttttccttgatttccactacttttagagtgatcaaacacgacagtatcaccatcaagatcgacaaccggttcctcaattcctgtcttagccttcgatcatttcgtgttttattgctttctctgacaacttgtgggtttgtttctccccaaaagtaaaaattggacaaactggatcgtatttgtcaatgtcaggtgtcatattttccaaacattcagcatgataaacatggccgcaaactaagacagcaacaacagagagttcattacaagcaataatcttttggctgctccataaagatctctcggtcaaaagctttgagcaaacaccgcatgtttgcaaatcagcggaaggagaagctaagactcggctaccagctctagtcatcttctcacgattaaagccaaatgactcgctgtcaaaagaccacctttctctatttgaattagccattagctcagaaaacgcattcattgaccaaccatctgaagaccctcctcgagatcccctagttgattcattgctccaagagggaagagctgccctttcttcagaaactgaatagctatttggtgatttaaatcccgggatttgtgcatcagattcttgccttgacaactgatgtccaggagaatgacgaggccacctcaaaggagttgagttggcaggaggaacttgaccttgtgatgacaaaggggatgcagtgaaggatgaagtggatggtatcgaaactgacaactttgcaggagatggatatgagactgtaggggattcagtcagctcctttgtctacaggacccgacaaatgaacaaaacatgtcacgaaatgaaagcatgcaagtaaacaactatctacactaaagaaataaaaaaaaaaacagattgcctcaacagataaaagatctacctgctctagacttgaatccatcgaagcatttcttctaacagatttatctgccacaaaaaatatacattatcagatttgaaaatttcaaaagctcaacacaatcaagctgtttggttgccaaataaaattattaatatgttcaggggcacaaaaaaataagctaaaagcaccacaaccagaaagcagttgtgctgcctaattaccatctacaattatccaacaaaggaaaattcatttaattgaaagtgaaacaaaataagaaaagagaaaggaaggcagctggggctggcagatcaaccaatttcactagaagaagctaaggattaaacatattaagaaacagtgcttattgttactatgtcaaaaaaaaaactttagcaaatgggatcagcaca

SEQ ID NO: 225249 - DNA, 5594 bp, Cannabis indica
cttggcaggtcttgattgggatcaagtttctgcgtgactggcctttccttggccgtatacggttatgctttgttgaacctccatattttcagatgactgtcaagcctatttttactcatgggcttgatgtcacagaattacctgggattgctgggtggctggtaatgtgtttatcatattttctgcacagctgttcttgaatttgttttctatttttcatcacatgctttctcttggtagtgcttgatgaaatgtgtgttgttcttcaggataagctactttccattgcttttgagcagacgcttgttgaggtgaatttgaattttgagactccactatatggctcatttatcgtctgctctcttttgttccatgtcatgcctgttccttcgttatgctagacatcagttggcaacaacatttgtgtgtaaatgttctgaatttaattgttggtaatccttgcagcctaatatgctggttgttgacatggagaaatttgcctcacaaaatccaggtactttaccagattacaacttattatatgagcagcaaggtcaaagtatgtatttataatgtcatgaaggtgtcgtggaagattgaagtcttaattttatctaagattgttctgttagaaattgtccttcttttgattttgcatttttacttgcgaatggctgttagcttgctttctatatggttctcagttcaattttcatggaaattatgcatctttcaaccactttagctgtatctttaatgtttttgaatagctcatgttctgaaagactttttttcattacttgattgccaattttcctttttaacatttaacataaagtggtccatatgtatagaaattttcaagaagcttaattataaacaagaatttgtttttaatattcttgaggcgcttgggtggactaagtttgggctcttatgttctgcagaaataaaataagtaaactgctgtaagtttaaagctggtggaatgagtcattaatgttagtccctaattattttctaagttttaggaaacagaacttttataggctttacataagataaggtgtagatgcaatagttcatagcttctatcttcacggatcagaaaaaacctttctgtacatgtttttatcaaaaccagtagcagtttgcctacgaattgtacttgtatcttttaactagagttttataatgatatctgctgtttctctgtatcttgcatatttcaaaagttctctttcttgtttgcttgcttacctgtatgcatttatttgaatgtcagaaaattggttttctgtggatgagaaagagcctgttgcacatgtcaaagtagaaattgttgaagcagctgacatgaagccatctgatcttaacggtttgttaagatttttcttttgagtagtttgctcgcagtgcttttcacttaaataatttcttaaactcctgcttaacaagtgaaactatttttttttttcaggtttggctgatccctatgtaaaaggtcagatgggtaattacagattcaagactaagatacagaagaaaacactgactccaaagtggcttgaggaattcaagatccctataattacatgggaattgccgaacacactagctcttgaaattcgtgacaaggatcactttgttgacgatctacttgggtttgtctctgtaccttgtaacatatgatgtttatagaaaggccctcatttaggaattaacaaaatatgtgtttccagattaatcaagtatcttttaggtagtgttaaccaaagaaatattttgttggcctgttggcatacttaattgttaattttctttctgtactattttccctctcttctttgcaaaggtcttttgttactttatgttttgagggctaataaaattttaaatatccagggactgttctgtttgtattaatgatcttagggatggtatcagacatgacatgtggttgcctcttaaaaatattaaaacagggaggttgcatcttgcgataactgtacttgacgagactgcaaaggtatattctcgtcattttttgtgagacatatattaagtaagaaatgtaggtggacagggttatgcagcgaaattattagtatgatgtcgagactgtgtgtttaacagtttttttgacctggatatcttacatcttctgaccaggccgaagatatgcagtgtgactgggacccatccactgtggaagacaagagaaattcctttgtcaatgagaccaataataccagttctttctcgtctttatcatcggataagtctcagaaggtaccagataattttgagccgattaatgttgaagggcaaaaagaaactgggatatgggtccatcgtccgggaagtgaagtttcacagacttgggagcctagaaaagggaagaataggcgtcttgatactcaaattctcggggagtcaaatgatgtctcaaccaagaactctagtttaggagcatctggatcccaaaacagcagtactagcactgatgaattacctgatgataaaaatcgagtgggaagagttaggaggggtctacaaaagattacttcggtgtttcacaggagtcccagaaaggaggagcagtctggcagctttgtggagcctattcaatcaccacatgtaaacattaaggcagtcaatgcaacagaccgtaatgttatgctggttgtggatgaagatggtggtgtgccttcctcgggagagatattaaatgaagaggattcaagctcagaagaaggtggttcagagagcccattgaagggtaaaataaaaaacaaagcaaagaacttctttaagcatgctgagaagtctgctcggagggtactgtctcggaaagggtctagaagacatacaagcgactaccctgcggcgacagacaaaggagttctagcagattatgattcttctgatgacgaatctcttcctggaaaagttgagagcataccagttgcttctaatgttgtcgtccccgatgctgatgttgatgggggtaatgattcatctagctccagagatcatgtggttcaaacaagtgaaatcgatacagaagctaatgctaaaagtagtcctacagcgaaggtagtaagtcctcaaggcttggaaatgttgcatgatagagtggggaggacagccttggtagtaaaagggacgatgctgagtctttaaagttgaagcttgatgaaggcagtttggaagagaaagcacaataatactagcaagcaatttcttgtattcttcctccccgtggatcaatttgtttaacaaaaaaagaaaaaagagaaagaaaaagtttgtctagttgaggctgccagcccttttttttgtttgtatatctaacctgaatagtgttttaggtttcaggtttgatgaaccttatatgtcttcttcgtcctgctttgcaaatacacacaccatgcgtcaattccaggtgtactgaatttggtattggtgctctgtgaatatttctgaagttgctatagattttatgtttatttgtgaatatatataaaatatatattttacaagttaagagagctagagttgatattttgattggaattttgacgccttctgaataaaatttgttttcttttttagtgttaaagcttgtaatgtaaattgacatttttcacgtctgaaaggtaatatgctctgaacatggtgttttcgtttgtttgattgaaaaatttcaaactaatgctaggataccaaattccctttacattttggaaaaaagaacaaataatgtggttgagctgtagattttcagtctaaaataacgtcgttcatgttataacaaggccaattggaatataatattcacatttgaagaattcatttgcttgctctgaccttctggtttccttgtaatatcccctcagtcctcagagtacagaagtcaaaaactcaagctagttacccctaaaagtttacctgaatgtcacttggcctggatatgctaagaaacaatgaatttgttaggaattaaaatgtcaaaaatagtatctttggaaaaaaaaggaccaatcaatcagtaaaagtggagatttgtacaaggaccaaatgttttaacaatctgtacagttttgatttgaaatccaatggaaacagatcaagctagaaaatgtaatcatattttgttttaatcctctgtttttatttttgtctgaatatagcattactacaaaattatccatgttaatatatctaactggctataatttcttcaaaagaatcacagatatgattgttttttccagcaaattgactccgaagaatctgcctccacattcccattttgggtacaaagccttgtcttctcatcagcttcaaagcccaatctacatcttccagttgattttccttgcatagtccattaatcaaagacttgaatgatttaaaactaggactcccaccctttgagattatctttctcataaaatctttggcctctgaaaacctttctgcatcaagtaaaccatacaaaacctcttgataagaggcagaagttggattacaccccttgaccctcatcctctccaaaagcataattccttcatcaactctcccttgttttctaagccctgaaatcaatatattgaatgttatcgtatccggatcgataccctcaatttccatcctctcaagcaaacgaaaagcttcttctacattcccacgatcacaaaaactatgcataagcgtggaaaaagtcatagcattcggtttcaacttcagttgaggaaattcatcgagcatcttaagtgcatcatccaatttcccacattcacacaatgcttttactaatatattaatacaacaagcatcaatctcaatacccaacttcggggcacccacataaacctcatgaacgacatcaaaaagccttgccgacacgagcaaattcagaaccaagttaaaggtcttgacagtgggccaacaatcctgcctgggcatatcgaaaagggtctcgatggctttgtttatccgaccagccatgtttccataaaccctgatgacgttgcggaagaactcgtcagataactggcagttcctctcggctctaatccgcgaaacgacatcatcaatgtcgtcgtacaaacgggcttgggcgagcttttcgacgattaaggaatagagaggctcgttgggtttgtagtccttgcgcttggagtagtgatctaatgcggagaggattgagttggggtctctaatggctgcgaaaacttggacgacctcatttggggctaaccagtctttgtggttgagtctggcgggaatagtagttgtggagaaagatgggtttttttgggtggttggtattggcaactgaagaagataggagaaagtgaaagattgagtatggatttggctttttggtgattttggttgtgtaagcaagaaatgaagttgaaatcatgctcatcttccttctttttcctcttaatccgctactcttttatactcgctatgttttatatatgtttttgagtcacaagcctatgcttttatggagtcaaaaaagtacgaaaatgagtcagtcattttaatgatttttttctttggcattttctgca

SEQ ID NO: 225250 - DNA, 4736 bp, Cannabis indica
aaaccctaattatttaataattcaaagtattaatcatatgcggtctttacaaacttatttattcaacaactaaatttggcgattggtttgagaaggtcctgacaagttgtaccactactaagaagtttgaggtgccaacagttgttgggctctttggaccgcttgaaatgaccgagtttagcagaaaaagaatccaccaccactagttcttttgcatctgtaatattgtacctagaacaacggtgaatatcacccagttttaatcatgcaatgttactctatttcctaacaacggtaaacccgctactatgttgtaattttgagattcaaagatagattaggagactttagctttgaactcttgtttcacaacaatcaatcgcttccagtaccaactaaaatccgtgggatattcataatcccacaagtttcaattcatcaagtagacactgtttatccatttgacaaacaaattatcttttttctttgtaatgtcccaaacatactttcccatagttaccaaattccattcatgtatcttcctaaatccgaaaccacctgcaacctttgataaacaaattttctcccaagcaattcatcccaaagcatgtgaatctgagcccccttccacaaaaataccctacaaattgcttcaacatttttcaaaagatgttttggtagaatcatgatttgagcccaataagagtggattgagattagcactgaattagtcagagtaactctccccatataagataagtttcgagtgctccaaattcgaattctacttgtcatgttgtctaaaatacctttacattcagccatagaaattttcttagaacaaataagaatgccaaggtacctgaaaggaagagatagctgcgagtatagcttgacacatctaacacccgagtcacttctgtatcggacattctatgacaatatatagttgattttgcatcatttggtacaactctaaagtggaggaaaacaatttcaatcctctaagcattaacataattgacatataatctccattgcaaaaaaaaaaaaaaaaaaaaaacaaaaagaatcatctgcaaagcacaagtaatttaactttagagttgagcacctatcatgaaacttaaactctggccgagatcctactttctttatgacacaagataagtactccattataagaataaataacaaaagagagatgggatccccttgatgctatagttaattaattttattattaataaaaataaaaaaaaaataaaatttcagaatagttttagtgacacacattgtggattagcaattaatattaaaattttaaaatcatataatgagggtcactaaaattctctaaaatatttagtgacacacaccttttgtgcgggtcactatcttgtgtcactaaaaatcaattttgtagtagtgagagtcctcttttggctgcaaaaaatccttgtgaagaaccattgagtaataataagaatctacaagtttttatacataccataattaaatcaatgaatctctgagaaaagtcatagtcaataatgtcatcggctttccacaaaccaatcttgatcatacaactaggcttgaaattctttctaccatatagcctcacaatgtcttcccacagtataatattgtgagctatatatctatcatgcacaaattcactctagttttcagcaattaagtcaggaattacctttcttaatgtcgaacaaagaacttttgaaactgtcttgtataccacattactgtaggaaattagccgaaagtcaccgacaatttttggacagcttgttttagggatgagagtgatagtagttgcatcgatttccttaaaaatcttccctgaaattaaaaagagatattacaacaaccaccacttcagaacccaccaaatcgcaattatcgtgataaaaactactgccaaatccatccagccctagagatttcattccaggaatagagaaaatagcatctttaacttcttgagctgtaaactcaacttggagaatgttagtatgttcagaagttaactttggagcaagtctcatcacctcttggctcactcgagctctgtctttcacaataatgcctaagctatatttttagaactctgtaggtacatgacagttaaatgttaagttattatatccacgtgtcattttcttattggtatatttaagctaatttttttaaaaaaataaaaatttaatgacaccactctaggattatcacgtagtaatttacttaatacttaattaacatctaggtacctacagaatttttagaattataactcagggattataaccactaaaaattaaacttaagtatttatttacaattaaaatttaaacttaagaatttatgccacaaattactttttataatattataagtgaacatagattcataaacttgtaaagtatatagaatcagaatgcaaaattattatacaaaagagaaatacaacttttttatcatataacgttggcattggtaatctgatataaatataactcttactactcatactattatttttagtactaatgagagtaagaatgagctctctctccaactgttaaatacacaaatttttatttcatatgaagcatagccactatggctactgaaggccaccacctctgttattagttgcatattcctctttagcagcaaacccgctactgctgccgccgctaccaccagcttctccttctcctcctcccataccacccccgccatattcgcctccggctgcgccaccagctccttcaataccaccaccaactccatattgtgttgcaccattaattccacttccatatgcagctgctgcaccactatttataccatcattatgaaggagagctctagaggcataagtacccattaccaatcccaataaaacaaacaaagtgactacacttattgtaactctacgagtactatggatactcattttggagaattattaataaatataattgttgtgtggttttgtttggtataacatatgcaagaaatggcagctataaataggaatggaaaagtagggtaaattaataattatatgtaatatagttttaaatataatcaagagatcatgatggtttacttcatgagaaaatgtcaaaatatatataatagaacacatgaaaaacaaaatataagacaaggatttgttttaattatagatatattttccctaacttgccattcacaataagttgatggctcctagctttttattattattactttttttattatttatattatggtgttaatggtatttatcttgaaatgaatgattcaaagttatttaataacatttacaaactaatatcatctacagatttagatttttatatgattattcataaacgtatccttttcttagctagaatgtcactatctattaaggtattaattatatatcttaattttattaattaacctttgtgtataaataattttcaagtagagtcaaaattatattaaagtgattcaagccaagaactaacaatgataaattagagggtttgtttggtactttaaaagccttccatattgtattaaatcttagtaaattattatatttgaaacataagttgtatcgtattaattattacaattaatacttaattttaacacaacccatatttattaatgtaggatgtattgtggtaaatggagttggggacaaggttggggacgaagcctggctctgagatcgcggtcacgcagggatagagttgaggtccaggctctgggtcaaggttgagggcctagtccagggttgagggtcatgggccgagtgaggggccgcttcgggctctaagatcgcggcgacgcatggattgagtcgatcgaggtccgggctctagggtcgaggctgaggtaggggtgcacattgggtgggtttttgggttcgggttttggaatcttggcatcgaacccaaccgtatggagaccgagttttttgggtttccagttcgggtgggtcgggtttcgattgggacgggtttgggcagattgggtcaggtttcggggtaggctaggctttttaaaataaaaatcacttttttaacaaaaaaaatttcaaaataatacaattatataatatattattattatatatccatattacataaactaacacattaacaatgtaacacacactcacaaatacacaattaaaaaaatatataatataattatataatattatatatacataaaaataaaaataaaaaataaaagaaatgttaattgggtttcaggtgggtttcaaaaatattaaatctgaactcgggccggtacataaccaagttacacctaaacccggtgtactaaaattgacacccaattttttcaggttttttgaatttcaggtcgaatgggtttcgtgtgagtttcgagtttcgggtatcaatgtacacccctaggatgagcgcctagtctgaggttgggggtttgggggccaggcgaggggttgagtttgggttgagggttggggtcaagcttcgagtttcgggtcaaggtctaggtttgagtttgagttcgatgacatggctagggcagagttcaagctttaggtccagtgtcaaggttggagcagggctagggtcgtggttgggtgataggggagtgaggctggatggttggtgttgggtcgggggacgtgtctgcattatgggtcaaggtccatg

SEQ ID NO: 225251 - DNA, 1981 bp, Cannabis indica
ttttctaagtgaaagacaggtagacaagcctaattaagaaaaaaacattatcattattatatggaatttttcatttttgtcataatcagtactttggtttggtaattaaccaacaatacaggcagtagtaattagagagttaaaacaacattattaaaaaaaacaaaacaaaaattcaagtaggtgacaagcaacatggaaccaaaaacaagccacaattacatgtctaaaattataaataataataattaagttggatttgatatctctctctgtgtgtttaaaggcctctctgaagcatttcttggtaccttttgaaagagtgaagcttttgcatacgtatttgcttatgaaaccttgtgatgaacaagtctgcaacatggtcaatctcatcttccaacttgaaagactcacctccttcttcctcttttgcattccttaccatatcaatcacagaccctccttgtagatcttgatcatcttcctctagctcatcaaaaagagaatgccttaaatcagggtacttatcatcatcatcatcatcattattattactactatagttgtagtagtattgtacaagttggcctgaaccagcagcagttgatgatgcatatcgaaactcgtcttgaccattggctttggcattagcattgtatagaactatggctttgtttaaatcctcctccattacatcatcatcatcatcatctccttccttgtgattattgttcccaagtgattgtgaattttgtgagagagtgactccattagtactttcttgttcttcattagtgaaaacattatgagccgagctttggctgcatttgttctgctctttgctttgctacctaatgaactcaacaaagatattatctgtttcaaaacaattgaagccttgttcttcatctttttcaataacttgatatgatgatataaacaaagaaaatatataagatgtaatatagaacagagagagtagtatatagaacagagttttttttttttgaaaaaaagtttacttggcatgaaggaaaatcaatgctcttatggttttcttatatagaagaacaaaagttgtttgctttaacaaaagtgaatactatatatgaattaaaaaaaaaaaaaacaatgtgtcacaataaaaacaagagtattctaagttgatgaagtagcttctcaacgcagtaatccaatattacagatttgaccacatacaaaataagcttgatgggattggaatgaggggtaagattgtctttgatgagtttggaccacagaaaagaaaagaagggcttataatattagatatatatgttggtatgagttgaaactctatattctatttgaagaaaaaaactatatacatatagctataatgtaatataatattagtgttatattgatatatacgtagtaatgtaatggcatgcaggtggaaaacaacataaagagagagattcttggcttgggaagttgcatgggaaggaaaggaaagcattttattaaactaggaaagaaaaggaggtttggacggtgaaagggagtgttaaagttaaagtaggccaagtttaatatatatatacaaattgtgtaaaaagttaagtgacccccttcaactagcattgtagtgcgcactagttcatcatcatattattttgtgcaaaattatattttgtaatgaataaagcgatcactaattaatttcgttcaatgaagcaagactatcacattacatatatatcgtttcaaagatacttgatttgctttaaattttaaaatcaacctcttgtttcttataggccacttttgttaggtttatgtctatatataggtaatagctaatctgagttatgtattatttatgaaaaatatcattagctatagttgattgaatatgtttcaattagttttagaggcacactcctaccaaacaaacctttagatgtaattttttcagcaaattaataaaaagagaagt

SEQ ID NO: 225252 - DNA, 3980 bp, Cannabis indica
ttttgttttcattttaaaaaaaaaagtcatttttgtaaaaagttacttaattcagtatattcttaaaaaaattcctaaaaattaatataaacccaaataaaaatctaacacagactatttagctattggaatcacatctgcaagactataaaaatgggccggggctgggtttcaagagcataaaagagtggaatctcacgaggctattggtaaaggcaatggcttctaaaaaagattacattcaggttaagtagataattaaagaatgaagattgatggaactaacgctcaagtaatacaagttagcattggaagaaagttgtggtagtgaaagatagattaaaagagtaatatacagctatatatactctggattgactacgatgaaagtttagcattaaaactgtgagctccaagcttatgcctcccgggtaatagtgacagatggcataatcatatttggaacaggttgcgtgtgcctcggcatagattcataccgtggctggctgtttggagaagcctccaaactcgatcaaagacaagttattcaaatttggggtggtgctggataaaagttgctattgatttgtggtgatcatcaggttttggaaagggatgatgaacactgctttaaatgcagtagcatatcgagagaaagagtaaatagtgttacagcttaaaaaaaaagaaagatttctcataaatttttttacgatatgaatgggaggattagttagtggctctatacttgtaaaatggggctgagactggttgtaattgtcacgcaaatttggagacgctcctagttaatattagtagaactagcataccaaagatgcatgcctggtcttacttcagcttaatgtacttttaacctaaactaaatttaataccacatttatttttgcaattataccaaaaacaacttaattgtaaatctaattacaattaaaaagacacacaaagcagtcatggcaaaataacagtaagaaaatcaaaattaaattgaatatcgactgtgaaaaaagaacaaagaagaatacaacaaatttgatgatcgttatccattttctcatagaaacttaagaatttgttaaaaatatatattatttattcaggtaggtaggtaggtcggcaataaaagagaccccactcaatcctagactcctcctagtactaaatacattttttactttgaatgtacctacgccataattcgcaaacattacggaaatattttttttgcccctcagttaaatttaccactcctttatatgcaaatttttcaagcacatttgtacagagttcacttatcgacaaaagggtaaaaaaagaaggaaaaaaaaagtaaaaaaaggaaaaaaaaaactaaataaataaaaagaaagggtcaagatctcttctaaacaaaagaaagccgatcggagccgtcaaaattggactgtgagttttcttttcttcaaatatattttacttgggctccactcaagccggatattccaaccctaactctatcttacacgcaccgtcatcagaggtggtacatccgtcactaccggtgttctcgatccttctcttcttcacaggaaccacatggcgccgtgcatgcgaagccggctgaaagcccagtgtcagctcaagcgccggctcattatcccgcgttgcgtcattaccgggcttggtagctgactcagtgtcagctctgaacaacagagaaacctcggctgtctcgactgaaaccatgcttgtctcggtctctttactgtcaccgtcgacgttgggtgcagggtcagactggtgactcaccgacgagtcatgactcgtggaacgatttacctgatcatctgcgcagtaactcgcccacttggattgagtcgtgtcgcagcgagttccctcgacttcgaactcggtcgccttccttgcctttggcttaacaacgtttctcttaaaccggcaacgcgtcttcgtcgctcgttgttggttggtgggatcgttcgaggcagcggagttctcatctttcgacacgtggcgaatatcgtatgccttcagaggaggtccgtggctactgacggcggcttcggaagtgatcggcgtaatcggagagcccttaagaacggcttccacggcggcttgacagagatgccaactcccggaccataacaacccaaccgaaccatatatcgggtttacaatccggccacatgcttcgtacaataatgaccgaaaaatcgctgaaaaagaaaattaaaaagcgaagccaccattattagccatgacattcaaacattccctatgtttatacctttctttattaataatgaaacttaccaggacgatggtgttcggggccggcgttgatgaggttcataagtccagcgcggccataaaacttggctaggaaaacagtggcgttggcttgagactcaggactcttgatccactgaagacaaggtctaatactacaattttcgctacacccttttcttaatattcgacaaccattacaactcatccgcatttttggaaaacaaaaggatttttgaaaagagggaagttttatttgtattctttttttcgaaggagagataggaaaagatttaggagtatttttcaggttgattggtaaaacatttatatatatatatttagagggaagaacaacctatagaggcatggagccgctgggttaggaagccgctgctgtttttttcattttttttcctttttttaaattattttgtctccaagacaccggtttccacattcaaggaggctaagggtatttgtaccctctttttttctcatttcctattttatttagctttgagttttcttattatttgatttataaaatataaaagtcgtactctttataaaacactctccaactaatgcgcgtggtacccacacccaatcgtttgggactccctactcaatcttattggggcgtatcatataatttacggatttaagcaaaatccgaaagctatttaaaacaggagaagacccgttttcaaagaaacggatacattagattcgccctggtaccttctctcgtatttttagtcaagttacgaaactgcccttaattttgcccagtgaattcatactaagaacacaagggtaaaactggaaattgcgaatggcggaggaaatgcaagttgggggctaagtggggtccagttgacaactgggcgtgatgggtgggatggggttgggagaggacatgcaagagggtacaaaaattgagacgggaagtgagcggcgcgtggcagccacggtgaggtgtcagagtgcggtcgaatcgccacatatcgtggatgtgggtcccacttgggttgctggcggtgcataaaaattttaatcataaataaatccaaattaatattaagtggaagaagaaaaaagaaaaataaaaataaaaaaaattatggtttcataagagctcctggttttcgggaagtcgtactagtttaaagaaaaaccacctagtcttaaaacaatgactggtttccggatttagtacggaactgtgggcgcactacaagacctattagccaacggttttaagagaattatttttttttttttaagagtaatatttttttttttctgaattttaatttttttgagttttctcttatctctgactctgtcacgcgcacgcacgcgcaagcatgcttttttagtgtcgctcatgcttatccagtaaaataggattatcaccttggtttaattcttctactctcgaacactcccatttacatcacttttaacttctttttcatctgttaaaaaaaaaaaattgtaataatactatatttataagaataaatttgatgtaaatttgaatttgaaccaaatacattttgtttagcttcaccatatttaaatttattaccactaaaataagaagatctttaaaattttgattggcaactatgattgttcaattttataattttaagaaaatataaaaa

SEQ ID NO: 225253 - DNA, 1998 bp, Cannabis indica
tccaatccaatccaattgtaattggatatccaactttttataattggattgtattggatcggttcggttcaattggattggattggatgatgcccacctctagtttagagtaatattttaccatttaacaaaataaaaatctaaaatagtattttactcttttattattttattttttggccccttgatcttagcttcttctttcgtccttgctatttgtatagtgaaaaaaacatatcataatcacagtctactattgctatcaaaattcgaaaaagaaaattataagcatttttttgattgtatagtgatatcacttatttattaatagtttagaagttttggattcaaatctgtactttcttacatttccatctcttcctcaccactaaactagttttagtggcttagccttaatatataataaaggattggttacattcaaaaggactatcatacatacttatcatactttctgacaatattaattttaattatttggcagtaatagagataaatttggccttattttaatcgacataaaactaatgtgaaataaatttaatattctcatctagttcacaagataatctcatacacttttttataaaaatagattaaatctcaaaccccaagctaagtgggttatgagtctcaaaatctgaagccgttatataaatatatatgtgatttaaaagttgattatttttactttttgattcgagtggtttatctagctcttactttttgcatttaaatattgattattttataattttttcttaagataataatggcagatcattgcaagagggctttactattataatttatactgacaatgagtagagaagtgattaaattattttttataaaagagaaataatgtctttcatttattaatacaaatttagtccaacgtctataattagcaactacttgctctaattatccctgcacacctttgtaaaaaaacacacctttgtcatatctaaatatatgtctatagaataaatagcatttttgccacctgaattttttactctactaaattttgccccctaatatatactgattgttacgaatagtcctcaaattataacgaatgcagaaatgtagtcctttcgttcaattctatttaattttatcgtttaatgacttacatggcagtattatttaaaataaaaaattacgtggcaatgtggatattaattttgggtgatatagatattttaatgcaacctaaatattttttttgtttttttcacattaatgaattaaaacaacaaattaaataaaatcattataaaaagagaactataaacacttagaaccctagctgccctttcctctttcctctctattcttcacgcagggttgggatcttcacgatcttcacgcctatgttcttccctcttcaatttttcaatgtcttcttcatcttattcttataaaagtggagatacatctatgaatatgtatgaatggagaccaccgaaatccgcatattgtcctgtcccaaaagtatcatactcatggtcctcatttgtcctttcattttcctcttcgattggtggctgttctttgtcatttctagagtcatcttgcggttcatttcttggctggtgttgctctgatattgcagaaatttcttgttcaacagaaggtgcttgtggctgattccttggcagatctagaacatcaaattcaggcccattttcagaagactgagtggctggtaactcaccgaaaataggcccacatttaggagcactttgcacattacaatgaggcccagtttgagacaattgagtggctggtgactcacccaaaataaccccaattttaggagcattaagcctaatgtgatccacttgtcctttacccaaagatgatccacttgcatcacctactaaccctttctcaatacttaaagtagaacctttttttgtgtaatctaaattacaaaaatagtactcaaggacatgactattttta

SEQ ID NO: 225254 - DNA, 3500 bp, Cannabis indica
atacatgaactcatgtttgtgttatgttgacctcgccagccaatgacgctgagcctttaaagcgatgagattataaataataatcaaacaaaactaagcaaataagaacaccggaacttatagctattcgaccttgtggttatggcaatagcctactcctattttacttgtattacttcaaagaataattaagatcacaaggagttggccaagtgagtttcttaataatcctaaggaaaagcttacaattatttagacagaataatgagtctcaagaacatatgattttcggattcctaaaccatggaatggctccactatttataagaaaaagaaaatacatcaattaagttttcaaaaaatataggaataaattgggaaactaaactagtttcctataatttttgtcagtgtgtcaatcccataaaaatagggatttgattgaattataaaataaggatatatttatggaaaatatctttaaagatcttgttcgatcgcattatcctgctcggagtaattattaaaatagggacgagcctgcaccggcaaaggaatttcacccctttcacctctcttgtaatctgcaaatagatctctctcagcgatgggttcgccttctggaatggtctctaaggcttccacaagttgagatgttgacatggaggtcccagtttggtcctgtcctgcgaaaaacctttcgacagttggaataagttcccccttgacagacatggtcgcgcttacgagggggtcttcgttcaaatccatggaagagaaagcaaattctctgaaacgacgaatggatgcgaagatgggctctctctttcacacacactatcttgctatacgacacaagtacagttctagcactaacataagcaagaacctttcttgccctaaatgtgaaatgccaagaaactcatacaggggttagtgcacttacttgtcgaattggaagaaatagctggtgtacccagaaagttcgcctgaaagctccgaagccagtcgatgcaacagtcacagtcaacctgaaaatcaaatgtccctcttgaggaagaacttcgctggttcagctgaaggggagcaacatctgggaaaagttccgtgcgaatgatgagtaagcgcttgatcagatcctctaatgcttcttgcatgcaaatgatggcagaaaaagggaaaaagaagttgcagagaaaatgtgaagttttgagtaaaaagaataaaaatgacaccaccacagacagtttttattctaaaaaggagaaaggactatgagagatcaacaattcgaaatgggtacagtgaatccaacgactaaggagatgaggggtctcatgtgattgacctgggccccacaaaaatgtaaaggttcctttttccacgtcactcaatcgccagtgatactccacctttcttgctaaacacgccttgccacacaagaaaaggaggaagagccaaatcttaacaagtcgcgtggttaccacacaggaggaagcaaatgtcacaaatgccctcggtagattacaacgcatctgagggtgtgtccacgatctaaacctgcatcacgtatcaacggtcaatgtaagagacaatagtaagcttccgtgatcccgtcctgaaagtcttgggggtaaatgttatccaagttttcatttatcagacacgtggcataatcaaaaggaaggataagaccattacataaatcacccaaggcaaccaagaaggatggctcccggatcggaagggaagggtaggcgatgccccccaggaataacttccttcggtaaagaacccggagggcagtaagggttttgaagagaacagacaagtaccagagcatggtagtgcgcgtacccaccctctagtatactttttgtccaaacagcctagttagagactattttacaaatgagagacctttgtgcgacatgtgtccaggctcatacaaaactctctgcaagctatacaccacatgatgaagaaagttccaaccaaccgaaggtcagatcgttctctcgcagtactaatcttggtggcgtatggggtacgaaaccctaggtaggtaaagagtgtgcttataaatagtctcattcttcttgaggcaaggggataacaatttttccacctaccgtcaccctactaaaatccatagaaaaactctctttcacagagaattccacagtgtaatgccttgtaatctcaaaacatctgccgaaataggctaataatatagactcgtagactaagaatcattaacgtctgaaccatgtaaaaatctatctgtttattatctgctgattgttatcttctttacattctcaaaatattcggtttttggaaaactcgataaacaatgacataaaccctaacgctatcaacatgatgtagcctccacgtcagcagaagatcaaagcctcacaggctcacaggttggacctcaccaaatcaactcaaatgttataatattatttaagtttatcccatcagtgggtaagaaccctagtactattattataagaaaacccattcatgcaaagagttaaaatctcattacttgagtgctaagactcgttaacgccccaacttatacgtaaaaaactctgagtgtcttcttcaattcttatatttaataattaattttttgaaaaattcaataaatataatggcctaaattttttaattaaatttatttaataactaatgatgaataatatacatataacacttcttaatatatattattaatacttagtgtacattcccaatatgttcatattcttcctttgaaaaaaaacatgttcataatcaggcaaagttctaaattcaattttatgtatatatataatttaaaaaataagtgaataaattttctttagaaactaaaaaacccaatgatgattttattatctctattggctaagcctctaaaatgctaggacccccatccactactacatataattttcatattttttcttttttatgtatattaatgttgtttgtttggtcaaatggctttgaagtaatgtccttatttcacagcaaagcaaagctgggactcactatttatttccattctaattccatatttccatcgaagcatatatcattttcattcaatttaattattttgccaatttgccatatgttctccttaaaaatactctttcttattttcttcatcattatgccttagtaaaggcagtccttttctacccaaaaataaaatatataatattataaatttgtaataatatcatgagagtcaaaccctattatgtatgaatgagatgatatcattcggatctcgtatatataagtgatacaaatctacatatatggcatcatcatcatcatcttattagctcccattattttgacactaccaatgttgaataacctatatataattatatagcttgcatgtactgttttccttattgtcacatacttaaacgaagaataatgtgtgtacatatataaaaatataaattttc

SEQ ID NO: 225255 - DNA, 1816 bp, Cannabis indica
  modified_base (49)..(49): a, c, t, g, unknown or other
agcatgactgcaaatctgagaatgaatgcagccgtttttaaaatgagcncaacataaattaacttaagaaacaaaaaatgaaaaactaattctgaataccttaagagcatgagcacttaagagtactccagtgtgttttccctcaaatcatccagtgcaagcttaactgcttttttagtaagattactgtctagttgaatctttcgcctcgttgatggtaccaggaccttggcataaagtcaaggaacatacaagtgaccaaaaatgcatactatattgtagaaaaatcaattaagagcaagcaatgccaaaataaaaacaaataaaatgcatgagactatgagagtatgacagtgtataggatattgctcattgtatagatggaggacgatatctatgtgagcatgtgcaggtaagttctcccactctattagtacattgctacctcgattctcgacactccccaattccaacccataacttctccagtcgatgctttgcagtgccttcaaagatgattgagtgatcgtacaagaagagaaatctttgaagtataaaacctgaaatgaaatagttgtataatcatagttaaacaaacaatgaggaacaaaaaccaaacatagcgagtgtagtaagtattgcataaatcaaatcaaaagcaacttgttctgttttaacaaaaaaaattggcacaactgtacaactaaatggatcgaagttaacctctgttttagcaccacatgctctgaagcaagtacttgtttggtctgatatttcacttattacaatcactgcttccatcaccagacctgtatttctacgactttttgtttgacttaccattccactcccaaccttgagagtcccactacaaagatattaaaatttagtgttcagacctatctaaagaatataaagaatgatttaaggtaacaatgaccttactagatgatgagacagcgatttatgtaccaatgtgaatattcaatattcaaattctttatcaagattttgaaacatcagtagaaaaacaaatatgcagcaaactgccttttctatgatctatcctactaacttctagaacaatgcactttaagaccaaacacacacatacagagaaatgtcatgacttgtttataaacttacgaatttgggaaacatgagtgacactgtgtatttaatatatttccatgcttcaatacatattcttcaaggcctgattttaaacgttcaaggtttgaagctgagaaaggcaagggattccattcatttgctaaaaatagatattcgtcctttgatcgaggagtatcttcacgttcaaccaccagctcaattgcaacactctggagtaaggaagttaaaacagtcatgctacttttcaacatcacatttttagacacgttgaaaaagttatttaaacaagtgcaatccggttggatcactaaaatcttacagaaacatacttgaattgtcagtacacatgcatgcttcttcagtgaaaattaagtattttttataagcaaagtatatagaagttcaaaatataagaacttaccggaattttcagaacgagtatctgtaaaacaataacaaacacatttgtattagtaatcaggaaagaaatccagatggaaacagaaggggaaatatagtactcgtcaaaagtttcaagctactggatcatctgatttattattcatatcatagcagaaccaaaatatcttatcaaattactaaaacacaagaaatattatccaaatataaaggattcagagaaataaattacaaagaacatgacaaaagtatcaaacctttt

SEQ ID NO: 225256 - DNA, 2815 bp, Cannabis indica
ttgcgtagtgtttataattttcgcaacaatggtagatggagatagtttttagactgttactaaagggtagaagctaaaagataagaagaaacaaatgagtgctgtaattattaatcattttcaggtcctaaaaaattatatggaagaatgctcacagatccaagaagaggcagtggaagttggaggtgggggagggagatacctctctgtctataatatctaacaatagaagagggggagtacctcctctaataatgaatagtttatataatgagctagaattttagggggctaaaccaccaaaccaaacaagatgttgtaaaacatctcattcattcaaaaaaggtgggtttagtgggcctcctatagactaaataaagtgaagtcttcaaagttggaagatgtgtatgtaaagattttttttgttggtgttttttctcgaataatactccgcattaaggtgggaggattttgataagatggaacccgaccaaagttggaaaatgtgtatgtaaggatattttttggttagtattttttcgcgaatagtagttgacatcaaggtgggaggattttgattagctagaatttgagtatgttttcggtaaatattcagtattgcactagactgacgcataagataaaaaagaagagtacatattttttgttggtttttaaatgaagataattagttttttagcatcaatttcaaaaacaacgctaataaaaaactattagcgactatggtatatatgtcggtttttttaaacgggcgtaaattctttaaatgacacttaattataaatcaataggaattatactttttgtagtagtgattggattggttaggtgatccaaatcttagatgtgatccaatcaaagttctccttttgaaaacaaagtaaaaaaaatgatattactatttactaccatgagtggtgttaatattacccacgtaacatgaggtatcataagtgtgcgagtaatgatatggaccatttatacaccaaaatattctgttaggtcctttttttcatattctatacccgtttaggtggtaataattgtttttaatttagtgggagtgggagtgggactgcgagactacatcgatcgcacggcctacttacaaatttataaagcttaatacatgtactatattaattaaagcaaagaggaaaacaggcctttattatttcttttatgcatttcatgctgctacaacgaagtacaacaacaagagttaccactactatacgtacctatacgtatagctaatgctatataaccaaaaccaagatctgtaagaaaaaacagatcgcaaccagaaccccaatataagcatggtatccgtatatatatatatcttacttgagatattctcactcacattaccatgccatcaaccatttccaaaggaaaattacgagaagaacctctagggcaaaacacaaccctgtagtttgttccacctgggcaagtgaaagtactggtgggatcatcttgaggataactataagcatcgggacacctcgtcttgaagaacctcgaaaagtttgtaggcccacatgacccacgcccattgttgcaacaatattcattggtcttaaaaaccgtacaagggttattgcaaccacctgcggttctcagctcacgagggcactgtccattgatgtcagctgtgcaccgtattcccctgcacgcgccactagtggggctaaactccatgggaatgttgaacccatcgatcacagaaatgtcaatgaaatccatgttaccgaactggttgagagcgtattcggccaaggtgttgggaggaacaccccatcctttacactctaagctcccacagtctccggtttcgcaccggcctcggccgctgccatcaaaatggcaattggtacgaccccaaatacgtgccatggctgtccctggtgccacccataggttccagccctgcccgggatctaggcggcgaccaccgccggggctggcagcggcccagacggtgtagggacagtcattgcggatatcgaaagtggcagcgtggatgttgatagaaaaatggaccaagaggatgaagaggaaggagagggaaaagctggctgagtgtaacattttgttcatttttcttagtatggtactgtgattacttatgctagaatacgtggatttaggtgggtttatataggtgtagaggggtcccttattttgatgcatttatttgtgtttttttctttaagaagataaaagcactgattttgatcatagttcgttagagtagcattatcttttaataataaagtagtggcggcttttgtattaattaaataattttgggaagtgtggtgccgggagggggcggctgtcgatatctaatatatatttggataaacaagaaaaaaagagcaatgccttttaattatagcgtggtcgatggatcgagctataatattggtgaccttgacttaattaatataatgtatagaaggcttgtgaaaactttcatttacattttttagttaaggtgccacaattaattacttcatttatatatatactagtgcatgcatgtggatgcgtgtatattattatataaattaaaatcaaatgaagaatatataaaaattaatttgagaaattttcttaaaaaaaataaatgaacaaataaataaagaaatttttacaccaaaaatacaaaatgaaatttttattacataaatacttatacacggttacctcaatatttttacattttttctttattttattacatatataccacatgcacactcccccatgcatatgacacgtg

SEQ ID NO: 225257 - DNA, 3042 bp, Cannabis indica
aaatgatgagataaaaacaaaagtcatattagtaaatgggtgaattaatatgagttgtacacgtgtagtcgtgtaaaaaaactgacagaattgaattgggtactaacaaatactaacagaagtgaacattgtgcacttttgaccactaaaaaaaaaagattagggtacttaagtcatataaatatgaaactttgaatacttatgccgctattttccctataaattataagaaacctagtaaaaatgttaagccataacatcattccactcataagagataaatcttgctcgttgagacaaaaataaaaatatcaattttagtgtatcctaatcaacacacactgatctttgtgtgtggtgaaaaatctggaagatcgatgtgtgagtttaatgttctttggatacaactataaaaagatagtactgatgacacttgataatatatggagaccctgagtgtggtgtgatgataatcatttcaaaatactttcgctgcacatctgatttagtaccacaaaactaacattattaggtaggttaaacatttttactttcttaacaagagggtcacaatacattgtgtaatgcccctcacttcacatgtgtaatcacatatttacacactataaatcaatacgagtttttataacatactttatcctcactcgtatgttttttgtgaaaatttacctaatatcaatttttttaagctctttttaataatatagtctcaatgtctcatacctaaatatagtcttaaaattatcgtgcttgaccttctgtaagtgaaatcagattgcacaacttacctaattttctccttaaccggggatcacaatcctaaaacctcttcctcatggtgaagagcttctacagcacttgtgataggtacttctcatgactcatgacaattacagttatatagcttgatattatatcttttttaagtctaatttcagtctctccatccattatcatgtggtcatgatctctactcctcataagtaagaaaaatatgggttccacagtttaaggatgtggtttgcctgaaataaggaggcaaaatcacatgcaatttttcttccttgaattgttataaaagaagttatgaaaatgaaaacttgtttggtaagtttggggggtgcatggatggatatatagattggccccattttgcatgtgatctactaataataattactcttttccttcactaattaaattaaaaaataacttgtaataatttgtttggttcctattggttgaaagccacaaaacaatatcaactttggcattttgtagacatcttttcttgtttgggtcaatcaagggttcgaaagagatttacttggccctttaaactgatatcgatgacccaatcaaagttattggttaagatataaggtccttatagctcacacgtgatcttcaaaattgtcaaaaagatcgaaagaatgagaaaaatatctgcaccatgtaatctccttctgttaatgaaaaaaaaaaaaaagaaactttggcattttgcatttgcaattatatatgattttttcagatatttcaaacctttcattattgagtttcaaacttactgttttaagcaacaacaaaaaatatcctcctttgaacttattatacaaaatgttctctactgaaattaatctcttatgtacatatataaatatttatacatatgagttgaaagaaaaaagtctgattttattgagcaaaatcatttcatatatatttttatcaaagtttgtaactttatgattgcaacttgtaacccatttcattataattgcttgtgttaaaaacattttatttctttatttattttttttgagaaattttcttttaaacttttggagtgggactacattgtcttgctttacaagaaaagaaacaaaagccatgttatacatatatgagtaaaactaaaaccctaattaaatcaaaaccacacattcatgtccaaatctgaatcagaggcccctataagattttgtcactgttaactaaaatgttctcatatagtctctctcatcctaactagacttttttcctttgctactgttttcatcagaagctatttgaatttaaaccataaatataaatatatattccaaaattacctctaattggtctcccaaaagttagtttctaactaattttctgaaatagaagtgttgatgtgtgataatataagatccaaagatggtcaatatggttgaatgaattaaagaaaaacatatgaatatgacaagattctccatcatagcatatatggacaattcacttccaatttataattggctaagctcaagcaattaaatctaaccaagtgttccatcaaaaaaaaaaagaaaagaaaaagaaaccaaaatctaaccatgtgttaaacaagaaaccctagctacactactacaaaaaccattaatcccgacggtcctaagaataccttttttaggggatcgtcgctaaaaaattaagtgagtgtttaaaatcatcgaaaaaaattaggtattcccgacagttttaaatactcataaggcattcccgacgatttttaagtgtgccttaaaaattgttgatttttttaaaggagaattgccgacggttaaaaaccgtggcttatactataggcgacagttttaaatcgtcgccttccacatttaaaatcatcacatatagtgttataggccacagtttttaaccatcgacaattagttcaaatctgaaaattttcaaataatgtgttttttctcactctaatataactattttcataactgaaaatttttaaatctatacattttcaaatagtctctctcccccctttgcttcgacctctactactcgccatcctctctctttcacatagacgacagtctacgagctccaccactcgtctctcgtctctcgctatttttcttgctttctctttcacgagttccaccatagacgaaagctcgttcaagctccaccacagtcggccacggccacggccacgatcactaccgtcacttctctctctctctc

SEQ ID NO: 225258 - DNA, 3803 bp, Cannabis indica
aaatgacatagtattcaaggtcttaggagattgtcttttcaacttttcattttacatgttacacttttaagtactaatgagtacaacaacttatgttggctgatgaaaattcttcctcgttattttataaagagatgttttttcaatgaataaggaaatagaaactcaattaagaaagtgagctttccatgtttgtgtctcttaatatgtttctgaagctctgagctgcttgcccagagagttttcctctgaatctcaatctctcacttaattttctatcagaatcatcatcatctggggttttcgtgatcagctatactttcgaattatgaataaaattttccatatccattatccaaacaaaaaatcatgggacatatatagtttaaaagagcagattttaactgtcttaggaaaacatagattttcattcagtataaataagaatgcaccaactgatgcctagagctttgaggggttgaatactcaccattgtgcctttaacttgagtagtgacatgatccttatcactatccctcatcataagcttggagagaccaaaatcagcaacttttgcatttaagcgatcgtccaaaaggacattggttgatttaatatctctgtgtattattgtaggattggcaagttcatgaagataggaaaggcctcttgcagtaccaagagctactcggagtcttttcatccagtccaatctaattccagacttacctgcatataacatgcatctactattaagttatatcacaaagaaacattgagtgattgatcttctgaaaagtgctagtaagtattaactatatgtgaaaagaacatatggagggtgaagaactagatggaaatacctgaaagactatccttcaaggaaccatttggtatatattcgtagatcaatatttgttcaccttgctcaaaacaaaatccaacaagggtgacaagattcttgtgatgaacccttgaaagaagttcgatctcagttttgaactcaactccaccctgcattgactcttttagagatcttttgacagcaaccaattctccagtgggaagagttccacggtaaacctttaaagtatcaccacatggttaatattgagaaagtttatctaaatgtatgtaattgtaagtgcagaaaacaatgaaaatgaggaaacaacacaaataaatagcataaacaatgcactagagttccaaaaaagaaaagcattcaaacagatgagttgtcgacattacaaaatctatttggggttaagagttcattcaccaattgaaatgataatggtatacaatcatagtttggtttttgaaactaagaattatacacaaatttaagacaatgaaaaccaaccttcccataacccccagatccaacatcatttgcagctgaaaaattgttggtgtatttcttgagctcttcaaaagagaaccaccttgctccctttaactgtggaactgctccactactcgaatttggatcccaactccctgtattaaataaactaaggtctaacaacgttctaagaaaatgttgcttaaatttagttcttgcagaaaaagagaagtaaatactttaccaaaagggtggctcagctcagtggctctttctgctctcttcttctggtggaaagcatacagccctgcaagaagtaataacagcacagcagccaaaccaccaactgctgctccaatgatgatgccagtactcgtcttggatgacttgcttttgtctgaaggaacttctatagagtctatttacaaagagaaacatgaagagttttcaaaagttcataaataaactgaaacagattgctttactcatgttcaaagaatcacctgcatagctttcatactggtcagcaataaaaaagaagggaccaaaagtttttggggtcttgtaggtttggttgctaagtgcaaaacctatatctgaaatttcttgtcgatcgaaactatcacggccagatgggaatacttctagctttatattaagatattcagagacatccttgttgggattactcaaagcaatagaatcaacacgaacttcaaacttctgaaagaaggtcatgagagaattctcaagtatttggtagtaagttgtgttctccaagtctgagaaagaaggagctcggaagtttaatgatcctgtgtatggataagcacattggcagttggggctggaaatcatatctgaactgcaaggactaggaacacagccctttttaggtgtaacatatgaagaattagttaactgagaaactacagaagtattacagtaatttgctttgctttctgttgttcctgacaaatcaggttatccacaagtctgcaggagaaagataagaaggaaaaaaaagttattaggcctgccttaatgtaatcacttaaaaactttagaagattgaaggatattggttacattatatcaatgccattcacttcatcactattgcgaaactcagtaatttcattgttcttcaaatcaatgaggttcaggtgtgagccatgggatgtaccaatatccaatgtaccattgagtttgttcttccttagtatcctgcaattgatgtgaaaattaatcacatggaagaatatatgaactataaccatctcaaattgaaaggaaattctatatgttctcaatatatgtgtctctgagaattgtggtaggtcagatcaacttatgattatcaactcacacagtctctagatttggaagactgaataggtcaactgggattggtccttgaagttttgtgtcctccattattctgccacacaagttaaaaaaaaaaaaattagtaatcttggacatgcccttgatattcaacacaatacgggctggaaatgaaaacaaagatatgcactaagaaaaataataaggaaagagagagacatacaatgttgtcaaagactcaatcgttgaaatccatgacggaaaatcagacttgtcaaaagagttgttgctcaaatctctgcagtaagtgtgaagtcattgtaatcataattataatcatatgatgattgaaaatttatttctttttggaatgagaaaaactatatcaagagctcaaattgaacaacaattgtccataaatgctttaattgatcatggaagttcttgaacatacagataatgcaggccactcatgctagtaaggttaggaataacaccactcagcttgttatcagacaagatcctgttaaaatgtcacaagaatatgatctcttaaaaatataaagaaatattttgaagccagaagataaagaaactgtctacaagttcaaagcataattacaaaaaaatctagtttttctgcttacagctcagtaacatttgtaagatccttgaggtttgcaggtacagtgtcatttaattcattcccatcaaggcgtctggaggtttttagacaagataaaatatgatattgttaggcattgtaaacatccaaacaagttcactttacatacagtagactaaatgtatgaggttggtacttacaccacctctaaactcttaacaagtccaagggatgaaggaatattcccagtcaattggttactatcgaaaagcctgcaaatgaaatgagaacagcaatattaatgactacaatgttggcagttgtttcatgtggatatctttgaaaaaaagtaaacaaatgcatgtaaatgttcgaatgagttaaatatgtgattagatcaaagcaactggcagaattataagtgagttttcatagaactgactttattgtcaaacttacacatgtatcaaagtcatatttgag

SEQ ID NO: 225259 - DNA, 5133 bp, Cannabis indica
tgcataagacttacctcatcccaactaaaacaaacaaaactattcacaagaccaaaattaattacgtctcttgtttgtctctttgttctattgttctattgttcaatcatataatatcatcatcctgctcaatctaaaaaaatatacactcattcagcctcaatagcaacaaaaccaaaacccaaaatcaatcatgccgtcgtcgtcgtcttcatcatcctcaaatccaccttcctccccttacttccaaactctcctagactccgctcgtcccttcctccgcggcgagctcgagtcagtcgacgacaggctcccttccctcgtcagtgtcctccgctcagtcggcgccggcgagtgctggcacaaacacggcagcttcctcgatcacctcgtcgagatgtaccggattctcaagctatggcgagcccaggactccgtttgtctcctcggtctcttccactctgcctactcaaactcctacgtcaatctcgccatctttgacccttccacgggacgcgaagtggtttcgaaacatgtcggagaagccgttgagagattgatttacttgttctgcgtcgtcccaaggcagcctctgatccacgacgatcttctcttccattatactgactctgaacttatcgaacatctgaagtgttcggagatttcggttcggaatgctaagggaaaaggattgttcgatgaagatgaagcgtggagaaagaagataaggggtattgttcctgctcgtggggttgttgtgaagcacataaagaccggtgaagacgtcctcgtttcaaggagacttgtggccattttcttactgactaccatggcagattttagtgatcagctttttagtttccaggattgtttgtttgagaattttgatgggaagctggcgttcaaggggaatgatgttccggccggtctgtggcccggtgacggcagaccagggctttggatgagctcgatatcgagaatgggtgctctttacaatttgttagtgagagaggaagagatttttggtgaagagaggaaaagggggagtggagagaaggttgatgatgaggacagagatggtgatttggagcttgtgattccccctgtttttgagaattgcacaagggttttagatgcaggggaacaaatcaaggccagggatttgtactgggaagctgtttgtgatatgtctaagagagggttggagagagtggaggagttgctgttgggttgtattgagaaaaacccttttgttggagagccacatgtggttttggctcagcattatatgtctcatgggaggtttgaagaggctgaaaatgaggctcagaaagggctgaccctaatcttggagtggggtagtccttgggacaagaggatgtcctgggaaggttggattgcttggggtagagtcttacttatgaaggcaaaagaaagatcttggcctcaaaatgcttgggggattctaaatttaggccttgttaggtagaatcttaagactgtgacgatggtggcatctttagaaacttaacactattaatgatattgaatgaagggtacaaccatagagggtagttaggaattactgttcttctcttttatcgtagtaatttctaggcaccattgtcaaatttgaaaagttttattacaaataaagtacattgtgttgctgttcattatggtttttcgtctattttctatcgagtagggccgttgcgtaagattatacaaaagtacttttttgcttaattattttctgataaaaaaggaatcattccaccaaacatgtctgtatgtctgctgacaaagccaaaatgtgctagtgtgcaacgttatttacggtgccatcgactaatccaaaatcataccaacgttatctctgcagctcatcaatcataaactaacaatatggccctttggtctttaataattaaaaattgggtctcacggtagtcaattcaatttctcatgtcatcaatttttataagcaactaatcatctttactcaaagtcggatcccagctgttataaattataacttctcacatattgctggggaatattctaattcctaagtgggatgaggagattacaatcaaaatacttcaaaagcaagattacaagacatcaattaagagctgttgttctagaagtcttttattttcttccttacatgaacacttaaaaaaattctaaaaatgcagtgtttgattgtacgtaatagaaatgtaaaactaaccctatgtttactatgattttagtagaaggtttaagtttgtaggagttctatttttaagtttatttagagtaatctcaaattatttaacacttgagtttgagattgttttgatctcaacccctctcatttaaatttcactaagtgaaactctataaggatttatcaaacctcatatgcttaatttattatctaaggatgaacatatggtcactattataaaatttttattatcctcatttgattgacctatttttattgattatatacgctggatgagcattattttcatcaaatgaagtattaattaatgaaaacaccttcaataataataacaaccattgaaaaatatatatcaaccaacaaattgtgtgcaatatatctcggatgattttctcttaatatgcttacaagaattacttaatggtataccgacgtatatatttcagtggtaaatttaggaatatgttgtcttttaaaataagattttcaatcagttaaaaaaaaaataattaacattttcaatttgagcaattatccacaaccaaagttgtccttttacaaaaaataataagaaaattatatatagttaattcagattatagtagaggtgccgtggttatcattagtttttatagtattggccataaaggtaggctaggtagtcggcggtcggcacataattttaatttagttgatacacaaatttaaaatagactaactccgaataaatataaacagctaaacaaatatattcttccaaataatatatatctgaaactcttgatcattgattatcgaagttgaagaatgggtaatacatgtgtatcaaatggagttattattgtttgtatgattagcttggttgtatgtgtagagtttatgggggtttcaaaagccaaaaggattataagttatgggacaatggacggagatcgaagaatctcttcatgcatacacagcaggtttctaaagaattgcagggatgatgttgtgggaccacctactaaccgttaccaaagaggctgcgaacaaggtaccagatgtcgtgaacgcaaggttcctagaagagattctaaaaacaaaaactttgaacatcacacttgagttgatgtggccttagtttgcattggatttctacaagggatgaatagccaaatgtaaaatagttcggctgagtagtttgtttgtgtatttggattgtagcattggtggataggattgtaaggctactgtctttgcaaaccgtgagtttgcttcaatcgagatggtttcaaattatagaagatgatcacaatattcaggggaaaattattgtctctaaacactcaaaatgggcccacaattttccaataaatgttgttgtcttatctatatccattcgatttgatgtacagtctcatcataattaacatattagtaatttaatttttaacttcagcaattgtcatatgtatatatataatttcaaagggtaaatatgatttaggatcctaacttctgctcaatgtatcacttggtccttttagctttttaaagtctttatgttgttaaatgacgcatcaataaaagtagataaacacgattctttctacaattttctttctttttgtttaaatttttttcaatgaatacacgactataaatagagttttagaatttgacggatggaagccatgatcatggctatgtactgctaacatagttttaattcatgtttaattgctcaagccaaccaattttggataagatcagaccaaaatgggggagagggacatgcatgtcagaattttagagagaaattcttgtgtcatttgcgagtgtttttcttaaagcatcagagagtgtgtgtgattctaagatttggatttgttgtgtctgcgcgttgtcttgctttgatgtaaacttagcatggaccgaacaaaataaaatctgtgttttcttggtgtttgtttatattttcttctgtttacttctttgttcttctcttatgtttgtgattgtctgtgctttctaatctggttttgcagggcgttagaacacaaacagcaaccaagtgatagttgtagaaaattttatagacattattttgtatatagtattagatcaattctgcactgcacgtagtcctctctcctcctaacataaccacattttgaatttcactggatagtttagacagtcttatattagatgttttggttcaaactttaaacaaaatcctctaatgttgttcatcgaccaaaatcaacacacaactcctttcatttcagggtgctcacaagtcacgagctcatcaggttatccaatttccgcctcttcggccaacttcagttcacatatcttttgtgcctgcacagacaaatttgcataatgtaaagttatatttgcatggtgtaagtaaagtaaaaaaaaaaaatcaggtgaagaatgttaattttccatgattatgagctaaccaaaaacacattaaatgctaatcttcattactcataatcatcaaccaagatctatattttatttagagcatcacaaaaccaaaaaacatacatacctcacataccatctatgagagtgattattgtcaaagaaatagccaccaaatccctaaccttgagcaaaagcctagagaacagtttgtggagctaaccctctctcactcattaccattaacacacacacctacttcttcacataagacatatatatatcatgcccctctaaccctaaagggttattttccaattgggcttaagtggtccaataatggtagactataatttaatgggccaattatagttttaagggtgctctcatgtgcctctaacataatatatgattattaaccatcccattatggtaatgaacaaatatagggcacatagttaatgattatg

SEQ ID NO: 225260 - DNA, 4839 bp, Cannabis indica
taggtactgggataagggatcgccctgccttaagccacgctccgggcgaaagagttgaagaggctctccattcaacaacatgagaaggagaccaaagatgcacactttaacatcaacttatgaaaactagcattaaaaccaaaagctttcaaggggtggtccaaaaagggtcacttaagtctatcataagctttcgacatatcaaatttgaggccaacaaatccacaacaccctttattttcttaaaagaatctaagatctcatgggccacaataccattctccgctatccatctaccttggacaaaagtagactgaaaaggaaagatcaaagttggaaggagagtacgcaaacgatttgctagaatcttggagataattttgtaaaaaaagttacactaactaatgggcctaaaatcatctaaaccttacgccccctccttcttatgtataagaaccaggaaaaatttgattaagagttaacaaattctccgatctggaaaaattgaaccactatatccactacatccttgccaataatatcccagtgagcacgataaaatcttttcgacatcacatctggtccaggtgcctcaagaggggccatggactaaaccacctttctcacttcctctagagaaggaattcttactaggttcccagtatcctcccgataaatcaccgactcaataagattgaacagatctggatccctcgaaggaaggatgaagaatgcacatcctcaaaatattatcaaaaatattcgtcgatcttaacatggccagagattcagtgaataccatcatcagaaattgcattaaagaaattagacttccttttgacgagagtggaagtgtgaaaaattttggtatatctgtccccttcaagaagccatagctcgcatgatttttgttttcaaatctcaaatttgcgatgagaaatctcctctatttcaagaatagtatctgcttccaacttaagattatattgggaagggagtctagcttgcacctcaataagaaatctactaagaatcgctaacatttctttgcagaatccaaaacattctttattccatttagataagcattctctagtattagctaacgggagaccaattggaagctcctcactcactgcacatcaatattccaagcctcccaaattcctaagacacctaaacgagtctaatcagctacagaagtaatcacagacctaaaaatctattaactatccactaattcagagtcgaagcaccgaagatggaaatggaaaagaccccaagtctcaataaaaaaaacgttagtgggagtgaggtgattcgagaggctcaaaatattgatgtgcttttctcatggaagtctgttttcttatacggactcaaatttgtactctatttttctacgtgttatttttacaattaatgagataatatcaattcgataataaaaataaaaatgatttctctttcatttatattatttttctattttatactatttaaatttcaaatatttcttagactactaaagatatgttttattaaaatttgaatatttactataaatatacaaattattattattactattatcaaatataagaattttaacatgtaacactttcagaatagattaattgtgcttacatgccatgccatttagcttgacgtatcgtgttgtacttaagtctatatttttcgtgccctatcatactcaagcccatattattcgtgtcgtgtcgtgtcaatttatagcatcgtgtcgcgtcgtgccaaagcctatattttttcgtgcctctcgagctcgtaccaatttcgtgctgtgtcaaaatggccaactaatacccactttcgaccatgtactctaatttattaattagagcattattttgtttcaatattcaaatacaaaaaaaggtaaataccattttggaccatatattttgcaaaatttaccaattagaccctctattttgttaaatgacaaaataaattctgtattttctaaaatggtaaaaatagaaccctgagcttaatttctgacaatttttttttttaatctaactaacttaaagacaattcctaacatgaactgatacagaaaatgtaaacagttttgtcataaaacatttagatcggattattattaaattttattttgacaaaaaatcattcaagatcctatttgtactattttagaaaatacagaatccattttgccatttaacaaaacaaagagttcaatttagcaacttttgcaaaatataaagttcaaaaaaatagtatttactctaaaaaaaaaatagtaaaagaaatgatttaacaaaccaattatccattataataagcaagagcaatcataatagaaagagacttgtcacatgtaaatgcctagtgaagagggagcagtgtaacgacaacgaagccatcccattatgaattaatagagcaaaccattattactactcgagtaagaagcagatcatggcgtggttttcgattcttttatatcttttatattaatatttctattacaacagagtttgttaatgaaagcccaagtaaacaattatcatatatgtcgtttgaattcaggactaaagtattaaaaaatgtcgcagggatattgcaaatgttggatgataacaaggataatcatgtaaaccacatgatttaatatgctcacgttttctttcgactgatttgtttgaacaattaactgagtttttatgcactgtatagcataatgttttcactgttttgtatgaaatattgtagagcagacaactccatgcttatataatgaactattcacacgtaaatggggtatttcgtaagaaaaatcagtgagaaagatgaagggaaaagcctagacaatgaaaattgtttccagttcataccgaatataagtgactgaatatcaataacgtttagagctttcattgaagttcaagattagaaaagcaagctggcccaagcagccatgaaagcaaacccaccaaatggagccaaggtagaatacttcctgtcctcaagaagtgccacagcatagcacctacaacatccatatattatcaactgtcaagttttaatagagtgatctgacattataagttcaaaaaatcactgacaagaatacagagaaacaaacaaacaactaaaccagtaaaagtcccaaagacaaggcactgaaaatggaaagagatcaaaattaaaaggcatcagaaattcacagctgccgcactgtttaatttaaaaggcatcttgaacctaatgacctgtcttttaaaccaagatttctttagcaatataaagaatgtgaggtaccctggttgtaaatttaacaggatctcttcaactgtttccattgaaacagtttaatatgtggaaattttcaacaatgacccgatttgttcagagctactacatcaatttaaaaattaaaaaaagagacaaacaaactagttggtttatagatttgtacaattttcattgatttggacatggaatgatacaaagatttggattttaataagtctcatttctctaaatatcatcagatgaaccacttatgttgaaaattagaaaaagaaaaagcaatgaacaacctcaaaacaatccatttcattcggaaaattacgacatgaacaaacaaaaacatggcacttacgtcccagagaatgccacgagaccagcactcaaaaggcctccaaactgaaatataagaaccagcttataaaatcatccaacacattcaattgaaaacatatcaaagaaaattagtgataatttaattgaatttaaaagaaaggaactcacaacgtggggtcgtttagtgattggagcagcaagcaaagctgctgtgtgaaccaaatggtaaagagatgcagtatgccaaacctagaggccataacaacaaaattacacataacatacataataataatgaggagaaccacaaattagtgacatagctcaattgggttcatgggttgtgaatgaaattgaaaacaaacctctttgtaagcagcattttggggtttgaaggcgtgggcaccataagctcccaacccaacagcggccacacctgttttccattcaaaagtaataaattatttgctcgaagttttctaattaaacaaatttcattctatcgaatacaagtgatttagttctaccagaaatggcagctattttgtgccagtgaagaggatccatggtttagtttgctcgaaactacgggtaatacaagttcaagtacagacccaatttcccctacctctattacattccattcaaagaagtggttggcgttgttagaagtcaacattctcaaacgacgtcgtacctgctcaagaaaaatttatatttgttcatgttttaatttattttatttttaattaattagatgttaaagtgaatacataaaattaaataaaagtacacaacaatgattttcaattttatatataaatcccgatcctaataacaaccacgagaaaaacttgtaaaggaaagtaatgttagacttttacacaaagatatttatgaatcacaatcaattagttataataagtattatagttagtctaacattattaatatgtgaaaaaaaatatcatatataagataaatagactatttttcttattgtcaattgattttgagatgaaacatcatgcattttaaaccacactttaccaaattttaacatggtatcagagtcaaattaaactctaatgagtatcatatagctaaaaagagtcttttgtaattcgttgtgagtccaaagtaccgccggtctaaaaagacgagccaaacttaaaaagttccgttgtc

SEQ ID NO: 225261 - DNA, 4312 bp, Cannabis indica
tttcctcctggcaacgtgtagatacgacgtcagtgatatgaaaattgccaagttatgctataaaatgaatttgttgtagggtttcctcctagtgacgtgtagatacgggtgttagtgacatatgataagtactggacataggtacgggctcatctgattagatgattcgatatattagtgccaggttgtggcatgggctcacatgattaggtgatataattatgttccgagcgtaggtacgggctcgtttgattaggcgatgcgttatattggtgccaggttgtggcacaggctcacctgattaggtgatgtaattatatgatatatgggtgcatgtttttagcacgggcccaactgattaggtgatgcagttatgagatatatggatgccaggctatggtacgggcttgcctgattaggcaatgcaatacaggattatcaaattaaagcattaccttatgaggcaacatatatataatatatattattaaatgaatatgatttctattattggtataataattttgtattaccaaatatttgtatactgatgcttagatgccagtagtgatttagatttcatcttatgaacaatgcataacggtttgattttgattgtgcgtaaatgataatattcaaataataaactatatgattattatcatttttcttgttgagtccttgtgactcacgggtgctatgtggtgcaggtaaggacaaagaaaagttagagctaccatgaggtgactaccttctccaacaatgtacatattgatcccactgacctgtgtgccgagttgccaaaagttattttggactggttgtatctgctgtgttttgaattgtgttttaaattgttgttgtctatagtcttttgggtaaatctttttataatagggatccccggaatatctttttactactgttataatatccattttcagtcttttattttagtcaagtcttgaatattctcacaatttttttataattgattaatatattagtattaatctagtttataaaatcagacacgtggtatttttatggaatatggcgttatagcaagagttttgggggccaattgggaagttccctatcggtctgccaaagtcatcccgctagggatgtacaagttggccggcatggatgtcacggtgatatcgagggcatggaacgcagtacacttgaagaaatactattgttgaaaaggcaagtctgatgtattttttttagccatttgggttgtggaatcaaggagatagcctgtaaggcgatcccactagatcaagtttctttttatttttccatcttggtgtcctaatgtaatgaaagaaagggtcacccagatggcctctaaattgtactctggaatacaagaatattacattgggattagtcaatcacatcttgttgtagaatggcaaagcaatatccctccactttcattaaataacaacgacaataatgaagtaggaaggtatgcgcataaaaaaatgtgtgtcacgtaagtccaagggtgcgggaccatgggtaacactacgtacttggaaagacgaggaggagaggcaaaaaaatttaagtcggcaaggattagctacccttgcttgacgaaagaaatacacctctcctcgcaaaagtcaccgagcctaaagagctcttgaaagatgctcatggcataatgttgaaacgagaggaacgtctctcaaacgtaagcaaacacttataaatcaagaggggatgcagtcaagtacaataagccccctcccatccgagtaaaaggatgaagaattgataagaggatgagactagtcaaaaagccatactccctcaaatgatgtctgcttccccaaagcgggaaagtcacttcgccaaaaagttaccctagagtcactcggccaacctcagttacaaaagatgattagccaaagagtaaccctcagagtcatttagccaatgtcaagtgaaaatgtcactcaaccacgcagaggctgaagtcacttcttaaaaaaagaaagaggatctgtcgaggtgaagtgaatcctccattgcaccagcatattagcacaaagtaagattcaagcaagggaagccatcaacgcaaagcggaaaccttctcaaagaaaactaggagggcctcacgcatctgccaggcaaatccctcaactcacttagtcgacaagaacacttgaaagaattcttgtaaactgggggcaagtgttaaccctaaaaattagcttcgctaatcttcaagattatttgtctaagggaaaagagatgagcgagagcacactcacttagcctactcactcgatgcatatttcttgaagactatagatttggatgtcaggatacgtccgcacaatcccaagactaaccacgtaaaccctacaaggattcatgtgcgcatgccttagtgggagacccacttggaggctctaaagaaaacggagcttgaagtgtgcgtgtgtagtgcaggtgagtgaggagctcgcatgtgatccgtgtgtatgggggagcggtgagacgtgtgtctgtatgcgagtgtatggggtagtggtgagacctgtctgtgtgtaaaataccctaggattaagagaatggattagcaaaaccctaactcattaataatgtattattgtggaattatattattatataatttaatatgtgagaatttatatgatatatgacatgttaagaccccgttggtgagctaggggcattttagtaattttgacccgagaagggtaaaatcaggaaattaatatatttacgtgcttatgggactatattattatatagtatgcttgtgttgtctttttgaggtatgttctgacaagttggcgcggtatagtcacaactgggtatttcgggtcgaaccgggttctgggccgaaatacaattttggcataaattattggcattttaattgagtgtgattaatctgattttatttggtgtattgtatgtggaatgaccattatacctttgaatgtttatgagtgtgcttaatggccataggggcacttttatctttttgggcatttggattattaacaaaaaatgggatttttggtatgttggaaaatcattttctgctttgttttgccctagccgacccttccctctctctctctatacaatttgcaatttttattgaaattgtggtgatttcttggagttcaagctcagagtttggaggtgtgaagcttgatttttgtttgaacttgaggtagcattccttctgttcttttacttaagattgttgctaagatttttatgatttaaagtatgaaaagatgttgagtagctcttgaatgcatgtggttatatttggtgttaatcttagggagttttggtttaaattgtatggttttgttaggatttatgattgttgagctttaggtgagattttagaatgtttactatgtttgaattcaagatttgtttattgttttgtgggctgagaattttggtgaagctttgagtctcttgaagttgggtgttcatggtggtttttctttgctcaagtgttgagcttatgttccatgttggttgtgtttaaatcttagtttagatgcatttgagctgtgatttttgagctttaatatgtgtttttaccctctgtttggttgaggttcaaaatttagggaaagtaggtatttttagaccttaaaatctggttttctgggttttcgaacccagtggccgcaactggatttttggtcgccgcggccaaaacctagcagagagccatcccattttctcgattttgttttggccataacttttgactcgggactccattttagacgttctttatattattggaaatctcgttccgagctctatatgattatctgtattttgaatgccaactttatattatgtgaaggtggaattagggattaaccctatttgtgtaaatctcataatttgtgactaggattatcggcacttggtcaggagcacctggggatttggaatctcttctattgcaggacatcaggtaagacagtagttaacatgtagagtatgtgcggtggcacttatattggaaatgatatatgtgagcaattagaaatcgagagtagggttattaccctaacatgagcggtttaacggcctagggttatcacctaagtgatataagaagtgtgtatgctatgccatattaattatatgaatatgttaagatttagggttatgtgtgcaaggaataaccgggttggactcggtaactagaaccgagatgaaccattctaaggccttattgtaatagacgtatgagcgtaacatgtaggtctat

SEQ ID NO: 225262 - DNA, 6432 bp, Cannabis indica
aaaacaaacataaagaagaagatagaagaaatagtatcaaaacatacaaaagataaagagaaacataaatctgttgttcttttggttcttgatggtgttgatgatgcgagcatagccattagagaaaatgtcatttctcattgtaaggatgagaaaggtgatcatttgaaggttttgatgactacctgtgctactaatactacttcaacacagagttcagatgaaattcctcttttgaagcatgacgagtttttgaagttaatgttggagcaatttagagcttctcaaaaaatagattcggatgaggataaggaaaatgaaaaggaaaaaattgagaagctgtttaaagatggcatttttaaagatgttgaacttcagattcctgctgcaatggctgttcttgttggtaaagcattcaattcctacaaggttggaaaagatggtgccacctacgagtcattgttggtcaatattttgaaaaaaatatgtgatcaacatcttgaattaaatagtgcagagaagataatgaggacattggcttgttttgtttatgagatgttgccgagtgatgataatgccttgatcaactgttgttggcatagcaagaagttcttctccagcattaaaaatcaatgtgtccactacaacgagttgatagctcattggatcttggagggttatttagagtcatctaactctattgaaaaggcttatgaagatgggtaccgcattttgaatgaactccgagaccgaaaaattctcaaaagagaagattatgagtttgtcaaaatggaaaaagtggtgcttgaagttcctgatgttcgatacaagaagttcgatgagaaaactcctgatctacgatataacaggggattcgatgactctgcaatgttgggcttaccggaagtgttggcacttgaaagagatggtgaagaatggaaaggtggtttcgggaggatatcagttgcagatggcatgatcagaacaatttgtaaacataacaagtggagagaacaggtctctacattgtttatgcatggaaatcgtctttgtagagatgttccaaagacattttttaagccaatgagtgaattggaaacacttgttttgatcaatccgaggtcgaaggatttgatgtttctttcaagttcttctcacccaaagcttcgagttctggtggtcaggggttgtgacgtattggagaatattgattcaattagtggaatgaatttaacagttttggagatttctggcgccaaatcattgaagagtctcccagataatctatttgacaacatgcctaatcttcgcagccttaacctttccgaagtccaagtcgagcatctgcccaagtcttttgacaagttgactaaacttcaatggctcattctcagggggtgctcttgcttaaaggagatgccaaatgtgaaatcatttgtaggtctcaaagtacttgacatggctggtgtttcttcattgatgacatttaaagataaaaattttggagaactcaaggatcttagagtgcttgactattctcatgccaaaatagcacctgcaccatttgtgcacagtctacataagctcactagactcacacatataggctgttctgaaataaccagagttcctcactttgaccagttgtcccaaatccaaattcttgagctctctggtgctacaaagttggtggaattttatgtcaaaagcttgcaaaacaaaagtttccttcgaatccttgacctgtctaaaaccaacatcaaacaattgcctccaagttttagtgacctacctagacttgagaagcttgatctctctgatatgtcatctttgaatgatttgacaaatattagcttcagccagttcagatgcctccaaatttttaacttgtcaaatactcctattaaaacacttccctcactttccaaccttagtaaccttcgagagctcattctcaccaactgtatgcaattggaaaagcttccagaaatggaaggacttacaaatcttgagaaacttgatgtttcaggtgccactgcattgaaggaagtactagatgaacggttggagacgtcaaagttgcgcatgcttctaatgaaaaactgtgggaatcttgagaagtttccaagtttgaaagcctttgaacatcttgaagagttggatctttcaggctgtaagaaactagaaatgaataaccaatccttcgagggattgactcaacttcagatactcgacctctctgaaacaaagattcaaaacttgtcttctgtttccagtccagagcttcgtcaacttgtactgtcaaattgtgtcgagttggtaaaacttccaactttgagttcatcatcaaaacttgaggaaataaacttgagcggtgcaaagaagttattgcaagcaggattaccattcaatgatatgaaagagcttcagtctcttgacctttctgagacatccatttctttgacatccaacttttcccaatgtaccaatttgaagaagctatctttacgcaagtgtgtctttgttggatcaaagccagagttggagaaccttgaattgcttgaggttttagatctttcagatactacatttgttgttggccaatcatctactcagaaatccaatgaagccttcaaattagacgggagacaaattgaaaaacttttgaagttaactgatcttgatctcagggggactcaactccaaaacttcccgtattggatctcaaaattgaagaacttgaacaagcttcggctcccgaatttggacacctttaaagaagtcaactggggtcagatcaagcgtctaccaaatgatttgaattgggaagaatgtggtatcttcaacttggatgctaagaatacagaaactccatcaatctcaatctacggtacgaaaatgttcaatgctttaatgaaaaaaattgacgaattggacaataactccaagaacatttgtatttttgtttgccctttaaacaaaaatggtgaagatgaagaaatctatcgtgaaagagatgtcagtttcttcaaaaacctgtacttgaagaatatttgttgtcctgatatttttgagaagtttctagagatcaggggatttgaaactcgtcctaatgaaattgatgatgcggctttgatgaaatttgattgtttgtgtttcattgaagatgattacgtaacttgtgtggcagacgttggtggtaaaatagagaaattaacaagcttgtggctggaaagatgttccaaaatagagttcatatttagtcaagacaaacatgtcacagtgagtaaaaactttaatcttttatgggtttcaaaccttcccaacttgacagatttgtacatcaagaacgtggaagatgatcagatcaagaaccttaagcagttgtatctagactgctgccctaagcttcaacatctcttcaccaatccagaccaactaccagaaagccttgagaagctccaagtcaagttctgtgacaagttggagaatttgtttaaatttgattcttttgaggataaagaattgaagaacttgaaggaattgcatctcctagaacttcctgagttgattggtgttgggattaagtttccttgtttgaaaaaggcaaaagtcaaaggttgcccaaagctagagcaatctaagttcataaatggccttggactggatataactaaaacaatcggacttactcatgtcatggaagatcctaaaactgggaagattactaaagagacaaccaagtatcggagatctgagggagaaacaagtcgtgcaaataagtaatttacttgtgtgcttggataggaaataagactatctgatggattgagtgtgtgaaaaataagtgaagatttggtgttattgggtgttttgaaagtgtgtgtgtgagacttgtgtgaaataagataagagtgtgatcattaccattggtttgctcaaagtgttttaatatttgttgtttgtgtaatatagttaggctagctaatttgtctagttcagtatttgggcatgatggaagtttggataattaatccaactaatcccatctgtctagaattatttatcccatttggcagggtgggataaataataccatattggtgaaaaaaaatttatcgtttttttttatattgattttgttaatacattttaaatttaataagatttaaatgaaaggatttttataaatttatttatagatttttttataaaaaaaaacttattcattaaaattactgaaaaaaaaaaatttcgaattattatatataagatttcaaaatttaaaataatattaattaaataataattacctaaattgattataaaaaaatatgataataaatatattcttcttaaattattagaaatttatatcaatattttagaaaattaatatttctattaaattggtgattaaattattatttagcataaataattttgtattcttcaagtatttttgctttactattttaattatttatttaataaaaatatgataaattattttattatatatttatgatatatatttaattatgtatgatatattattttattttataatttaattatttttttcgctagggagattattcagttttatttaagaaaaaaactggtatgaaataattttgagttttaaaatatggtccacacctataagattaaagcccacacgtgataatagggtgacatataaaagtgatattatttgttttgattattttattgaatatattaattaaaataaattacttatttaattatttaattaaatcttttatacgataagatatataagattaaaaatgatgaaataaaataaaaataaattgaatatacgatgcaattttactacattttttactaattactatcaaaatattattaggattcattattttgggtatattttttttgaaaaaaaaaaactacttgtttggtctttagtatatacatattataattaatatatttatatatatatatataaaaaaaagatattgataaaaaggggaggaatcaccccatatgccatttttaaacttttttttaatattttttttttctatttttacgattttttttatgtttatgatttgggttgctgcatgggttgcgatgtggatggcaatttgaattgggttacaatttaggttactctgttagttgatccgtgagttgcactatatattctgtaaaaaatcaaaaaaaaaaaaataactttgaaatgtataaatgaaaaaaccaaaaaaaaaaaaaaaataataacttgaagtaatatatttctatatatatatatatatgagtgagtactcaatgattacatttttactgtaacgacgatggttacatttcttttaacccgtaatagcatgttaccaataggtaaaaattctttttagaattaaattaattataattaaatatttcttaaaataactaatttttaatttgaatatttaagaagacctttttaacaattaatatttataaataatgttattttatatacaagcccctattataattttttaacagttaaatcatttagttataatatttataatacttgaatttaggaaaaaatattggatgtgtaattacgcagcccattttgtaatgagtcagagtattgccttttatagatatggtaagttgttacagtgtgggctgtgagcaacggctctttgacaggtggcatggtgctgaaatcaataaagattacaaagggaatatactaacagaattcctaatgattgctccctaatatttggaccacaaggacatggatgacacctgtccacaagggtgtaatcctctgtttctctgtatcaagcatcaacagagtaatgcaggtattgtgcaccagcagtagatgacaactctatttctcaacacctcccctcaaacgaaagagtgaaggcttcactccaagtttgtcaacaagaaacgagaatctagagttggacagtcctttagtgaagagatcagccacttggtcatgagagggaatgtaccttacttccaattcctttttcagaattttgtcacgcacatagtgaacatcgatttcgatgtgtttggttcttgcatggaatacgggattggatgcaagtgcacttgcactaatattatcacaccaagtgatggaaggcagtgacaatggaaatttaagctctttgagtagagattctatccaagaaatctcagctgcaacatgtgccaatgcccgatattcggattcagtgctcgatctagacacaaccgcttgctttttggatgaccatgacaccaatgtttcacccagatatacacagtagcctgctaccgatcgcctatcatcagggcacgatgcccaatctgcattggagaaaccagttatgttgaggtgattgctgctgcttatgtgaagtcccagggttt
